United States Patent Application Publication US 2017/0114356 A1 - sequence listing, part 117

SEQ ID NO: 216612 - DNA, 8456 bp, Zea Mays
  misc_feature (8455)..(8456): n is a, c, g, or t
gggaatggttcgagaccggtccttgtataaccagaggcccatcgccctcgtcttcctccaagtccgtccccgtctctacccccaccccaaaccctcggctcgcgagcgcgagggagaccccttcctccgagtccataacacggggttgccattcgcgtcgggggaaacgagcccgcgcctcctgcccctgcactcttacggtcctacctccagccatccgctcctccgcccagctcgcggagtcttcccagcgccgatcttcaaaaccctaagctctggcgcggtaaggttggagccggacgcgcacgggcggggcgcccgccatggcgcccatcaacagcggcaacatggagcagcactcgcagcggctcctcgagcccgacctccctgtgcaagtccgactgcagcttgccatggaagttcgggacagcctggagatgacgcacactccagactacctcaactttcttcgctgctatttcagagccttctcagcaattctcaccgcttacaccaagccacaggccacagagaatgctgagcacaagctacggaatgttgtgatcgagatactcaaccgccttccacacagcgaggtgctcagaccatttgtgcaggatctgctcaagctttctctccgtgtgttgacacaggacaacgaggacaatgctctccttgccatccgaattgtgtttgacctcctccgtaacttccgccctactgtcgaggcggaggtgcagccatttcttgactttgtggttaacatataccataaatttcccacaaccgttagctacttcttcgataatcccaacacaagtgccagtatggctgcctccatgcccatgcagcatttggaccccactgccgatgcctcagtcatgatgcaagtgcctggtggtggtcaactcaacccaagcgcacgttccttcaagatagtcacagagagccctcttgttgtgatgtttctcttccagttgtatgcaaagcttgtgcagacaaatatcccgcacttgttgccactcatggtggcggccatctctatcaagggtcccgacaaggtgccgccacaccttaagacacccttcaacgatttaaagggtgcacaggtcaagaccttgtcatttctgacgtacctcctgaagagcaatgcagattacataaagtcatatgaggaaagcatatgcaagagcattgtgaacttgcttgttacgtgtcctcctgattctgtctccatcagaaaggcaagatacgacctggagctattggttggtctgaaacaagttctcaacaccgagtacaagcgagggctgttccccttgattgacacacttcttgatgaaagggttctgattggcacaggtcgagtttgcatcgaaactttaagacctcttgcttacacccttcttgctgaattggtgcattatgttcgagaagatatttctcttccacagttgtcacggatcatctatttgttctctcggaatatgcatgattcttctttgacccttataattcatacaacatctgcccgcttgatgctgaacctggttgagcccatatatcaaaaaggtgttgaccagcaaagcatggacgaagcacgagttttattggggcgcatattggatgcattcgttgggaagtttaggaccctgaagcgaacaatccctcagttgcttgaagaaggtgaggaagggaaggaacaaccgaatctgagaatgaagcttgaagtcccattacagactgtgctgaatttgcagcaacctttggagtatactaaggaaatcaacgattacaaaagtctgataaagactcttgctgtcggaatgaagacaataatatggagcataacccatgctcactggccacgcccccagcaacaaaatcaacagtcttccaatttgtcacttcaacacttcagggggctgagggaggatgaggtgcggaagacatctggtgttctgaagtctggcgttcactgtctggctctttttaaggaaaaagacgatgatagggaaattctgcaatcattttcgcagatgctggctataatggaagctcgtgatattatggatatgttctccttttgcatgtctgacctctttgattctatgataaccaacaaccagctattgcacatattttcaacccttttgcaagctcccaaggttctgcggcctttcacagatgtattaattaatttccttgttagctcaaagcttgaagccctgaagcagccagattcacctgctgcaaagcttgttttgcaacttttccggttcttgttcattgctgcagctaaagctccagaaagctgtgaacgcacacttcagccacacgtgccggttataatggaagtctgcatgaggagtgccactgaagttgagaaacccctaggttacatgcaccttcttcgaaacatgtttcgtgcattgaacagtgctaaatttgattcattgatgcgtgatcttataccatctctgcaaccctgcctcaatatgttactctccatgcttgatgaagtcattcttgctttatggtctcatttaaggcctcctccatacacatggggcacaaagtctttggaacttttagggaagctggggggacgaaataggcgatttttgcgggagcctcttgcacttgaatccaaggaaaatccggagcatggattacgtttagttctgacttttgagcctgcgacaccttttttggttcctctggacagatgcatacaccaagctgttggtgcagttatgcaaggcaatggcttggaagcattctacaggaagaaggctcttcaattcattcgggtgtgcctcgattctttgttaaatctgagggaaaatgtacctggcgagggtgtgagccctggtgttctcggtacattgctaatctctaacctggatccctcaagacgtcggaatgatgcttcagatatgaagggagatttaggtgtgaagacaaaaacacaactactggctgaaaaatctgttttcaagactcttcttgtagctatcattgcagctaatgctgacaccagtcttcatgatgagaaggatgattatgttgtcgatatatgccggcattttgctatgcttttccatgttgactcaccatcctccagccaatctggatttatgcatcctattggttcttcactcccatctatcatcatgggatcaagatcaagatgcaacacttcatctaatctccgggagctggaccctttaatatttttggatgctttagttgaagtgctatccagcgaaaatcgtcaacatgcaaaagctgccctatctgctttgaatatttttgccgagacattaatctttcttgcacggatgaaacacactggtatgctaaggggaggtcctagcacccccatgctagtctctagtccatctttaaatccagtatattcacctcccccaagtgtgcgggttgctgtatttgaggaattgttacctcggttattgcattgttgctacagtagcacatggcaagctcagatgggtggtgtaatgggtctcggggcattggtcggtaaagtgtctgtggataccctatgcatttttcaggtcagagtcgtgcgtggtcttctttttgttcttaagaggttaccagtgcatgcaaacaaagagcaggaggagacaaatcatgtcctaacacaagtacttagagtagtaaacaacgcagatgaagcaaacagtgaacctcgacggcaaagttttcagggagttgttgaattccttgcacaggagttgtttaacccaaacgcttcaatggttgtgagaaagaacgtgcaggcttgcttatcactgcttgcaagcagaactggcagtgaggtttctgaattgcttgagcctctctatttgccattgcttcagcctctgatttcacgacctcttcgttcgaagaatattgagcaacaggtgggcaccgttactgctttgaacttctgtcttgcactcagaccaccccttctaaaactatctcctgaacttgtcaattttttgcaagaagcactacaaattgccgaggctgatgaaactatatgggtcactaggatgatgaatgcgaaagtagttctcacatggaacaaactcagaaccgcatgcattgaactactctgtactgcaatggcatggggagatctaaaagctcaaaatcatactgaattgcgagcaaagattatttcaatgtttttcaaatctctaacatgcagaacaacagagattgtcaatgttgctaaggagggacttcgtcaggtggttcaacagcaaaggatgccaaaggatcttctacagagcagcttaaggcccattctagtaaacttagcaaacacaaagagccttagcatgccattgctacaaggattggctcgcctgcttgaattactgtcaaattggtttaatgtcactttgggtgccaagctattggatcacttgaaaaaatggctggagccagaaaagcttgtccagactcaaaaatcttggaaggctggagatgaaccaaaaatagcagcagctatgatcgagctgtttcaccttcttcccccggcagcaagcaaattcttggatgaccttgttaccttggtaattgatctggaaagggcacttcctgaagatcagttttacagtgagatcaacagtccataccgtgctccactggcaaaatttttgaatcgttatgttctggaggctgttgactattttcttgctcgattaagccatccaaagtatttcaggaggtttatgtacataatctgctcggatactggggacctaagggatgcacttgcaaggtcacctcagaaaatacttgcaagtgccttttctcagttttactctcaaagtgaagcatctgctgctcaattatcttctgtaaaggatgaagcccttactggggctgtatctgagagtattactgtacaatcttcatcaaacatggttactacttctgagagttactttaatggattagagcttgtctcagcccttgtgaaattgatgccagagtggctccgtaacaaccgggttgtctttgacaccttgctacttgcttggaaatcacctgcaagacttgcgaggttgcagaacgagcaggatttgagtttaccccaggtgatggaaagcaagaggctgatcaaatgcttcctgaattacttaagacacgatcgaactgaagttggtgcactctttgatatgttatcagtattcttgtaccgcagtcgtatagattatagctttcttaaggaattttatgtcatagaggttgctgaaggatactccccgaatttgaagaaaactatccttaatcattttctgaacattttccagtcaaaacaatatggacaagatcatttagttgttaccatgcagattcttatacttccaatgctagctcattcatttcaaaatggacaaagttgggaagttgttgatcctactataattaaaactattgttgagaagcttcttgatcctccagaagaggtcagcgctgaatacgacgaaccattgaggatagaacttcttcagctagctacattacttttgaagtatctacagactgatcttgttcaccatcgaaaggaactcataaagtttggttggaatcatctcaagcgtgaagataactcgagcaaacagtgggcctttgtgaatgtttgtcatttcttagaggcctatcaagctcctgaaaagattattttacaggtcttcattgctctgctacggacatgccaaccagaaaacaagctgttggtgaagcaagctctcgatatcctcatgcctgccctacctaggagacttcctcctgaaaaaaatgatagccgcatgccgatatggatcagatacaccaagaaagttctcgtagaggaagggcattcaattccaaatatgattcacatattccagcttattgttcgccatgcggacctcttctatagttgcagagcccactttgttcctcagatggtcaactctcttagtcgccttggattaccatacaacacaacagcggaaaatagaaggcttgcaattgaacttgctgggttggtagtggcatgggaaagacagagacaaagtgagatgaaagtggcgcaggaaagtgagagccagaatcaattaggtgacatgcttaatccttctgttattggtggtgatccaaaacgctcctctgatgttccgtcgtttgctgatgatttgagtaagagagtgaaagttgagcctggtttgcaacctctttgtgtaatgtcgccgggtggggcatctatacctaatattgaaacacctggatcttcaggtctacctgatgaggagtataaacctaatgcagcaatggaggagatgatcattaccttcctaattagggtatcacttgtgattgagcctaaggataaggaatctagctcaatgtacaagcaagctcttgatctactgactcaagctctggaagtctggccaaatgccaatgttaaattcaattatctggagaaattacttgggaatctgtcacccactcctcagtccaaggaccctgcatcagccctcgcacaaggacttgatgttatgaacaaagtcttggagaaacaaccccgtctcttcatccgaaataacatcaatcatatttctcaaatactggaaccttgctttggcaacaaaatgctggatgctggaaagtcactttgttccttgctcaagatggtgttcagtgcttttcctcttgaagcagcaacaacgccacaagatataaagttgttgcatcaaagggttcaagaactcattcacaagaatcttgctgctgttacaactcagcagatagcacttgagctcaacaatgctcactcaatcattagcttttcattgtttgtcctcaatgcacttgcagaagtacagaagaatttcattgacccgttcattggcttgcttttccgtgttctgcaacgtcttgcacgtgacatggggtcttctgctggcagccatatccgacaaggacagaggcctgaactggattcatcagttaactcacggtctaccatagattctactgtcatatctaacatgaagactgtcttaaaacttataagtgagagggtgatgtcctcttctgaccacagaaaatctatgggccaaatacttcaagctcttctttcagagaaaggcactgattccagcattcttctgtgcatgctagacatgataaaaacttggattgaggaagattgtaggcttgcttcatcaactggttctgttagttcacttaacccaaaggaaataataacttatcttcataagttatcattagttgacagaaaaagctttcctccagctgcacaagaagaatgggatgcaaaatacttgcagcttctttattcactgtgtgcagattcaaccaagtatccgttgtcttttcggcaagaatttttccataagattgagagacagtatatgcttggacttagagctaaagatccagaaatgaggaagcgattcttcaagctttaccatgatacagtgggaaaaacattattttctagattgcaatttataatacagttacaggactgggaagctgtgagtgatgttttctggttgaagcaaggtcttgatctcgttttggcaatattagtagaaaatgaaccaattacacttgcagcaaattctgctcgagtaccaacgcttatgatagctgggcctgttccagatcgcatcaccatgccacagcaggttcctgatgctcaggaaagcatggatggtacaacactatcgtttgactctcttgctgcaaggcatgctcagttcttaaatgacgcgaacaagcttgtggtggcagatatcatggctccattgaaggaacttgcatttgctgatcccaatgttgcatatcatttgtgggtgcttgttttcccaattgtttgggtcaccttacataaagaggaacaagttgccctagctaagccaataatcgcgcttctatcgaaagattaccacaagaggcagcagggctgcagacctaacgttgctcaggcacttcttgagggtcttcatttgagccatccccaaccacgcatgcctagtgagcttatcaaatatattggaaaaacttgcaatgtgtggtatattgcaattgcattactcgagagtcatatagtgcatatgaatgaggccaagtgctccgagtcattggctgagttatacagacttcttaatgaagacgacatgaggtgtggattatggaagagaaaatcaatcactgcagaaacaagggctggtctttcacttgcccagcatggttactggcaacaagcacaaaatctattttaccaggctatgattaaagctactcagggaacatacaataataccgtcccaaaggctgaaatgtgcctttgggaggaacagtggttgtcctgtgcgtctcatttaggtcagtgggaagtcttagctgnn

SEQ ID NO: 216613 - DNA, 1097 bp, Zea Mays
ctttcatcggctagctagcttgttttacagatagtctccaactggttcatcaacgcccgtgtccggctatggaagcccatgatcgaagagatgtatcagcaggagtgcagggagctcgacggctcctcggccggcggcgggggccccgagtccgtcaacgacccctccggcgccgacgactcgcactccccgaccaccaccggcgcagcgcagctcccgcaacagcaacatcacctcggcacggtgcctggggtgatgccccacaagcccgacccgggcgccgccggtccctcggctgcggacgcggcgttcgtcgggatcgaccctgtggagctccttggcggtggcgcggacgacttgtacgggcggttcgagcccggggtgagggtgcgctacgggcccgctgcggcaggcgctgctgccggcgacgtgtcgctgacgctgggcctgcagcacgccggcgccggcaacgccgccgggcccgacagcaccgggcggttctccttgagagactacagcggttgttgatgcttacacatcgcttacatcacctttattcatggctcatgcatgcgcccatcatgcatttggaagagcaaggatcgacgaaagaaagagagagagagaaaagagtaaccagagaagagatagagggcgctagacaaagagagatgagcatctagaaagagaaaaaatgcatggtgcctggaggtgatgaatgggatgggatatatgaatatgagattatcacaaccaccttcgtcgtcttcttcccagatgattcttaatttacttagctagaagattaattccttttgctaggcattgttgttggggggttaaggataattaatttgtatacagcaaaggaagataggaagtgtataattgtttagtcacacttttttggttctttgttttgcatttgcccgtttttgttctggtgtaccaattttccttgtactcatttttcttccctctgtaaactaaacataagagacacatacatgcatacgtaaatacatatattggtaaatatggtcatacgtatagcatatatatgtaaggcctaaaaattgaacgtacgtatacttctg

SEQ ID NO: 216614 - DNA, 3430 bp, Zea Mays
ccaactccaatatctgcagcagcagtcacggcggcaggaggagagctagggaggggaaaaggagctcggtttttttatataccaaccggccacccgccctacgcgctactactatagcctagctagagccagctgcttgcctcgccctcccctttgcgcgtcgtcgcgctcctcgccgtccccctctctcggaatcggaaggcgatcgatcgcacaaggctgcgtctgcgtgctcggccgccgcccgacccgaccggacaaggaggggagggggcaaaaaaaatatatagttagtcacacgcacgcagcacaggagggaggagagggattgagggataaagaaatttcgggagacaaggagagagagacagagatggagaggagcggctggactcggaggcaggcctttcactactcccgcacccagataacgatgtggtagctagttcctcttaggctaaggtaagcagcagcgccgggagctagctcctcctcactatcctgcatgcttcgttccttcgttcagctttggttgcccggaaggaggtcgtggccgggatcccgccgatgatgatgacagtggcgccgccggcatgggcgtagcggcgccaccgtacgagaccaccacgtacgtgagccaacgcaccaagatcaacatcgcagcgatctccgccgccgccgccaccagggcggctaccgcggcttctatgtcccactcgcagggattccaccagggcagcgccggcgtctacggctactcctcggatggcttcgaccgcccggacgactccggccaccaggaccatcatcagcagcagcagcacgtggcgcagcagagccgccgcgacaagctgagggtgcaggggttcgacccggccgccggcggcggccacggcctgctccccatcgagggcgacgagcatggcgggcccgggtccatgtacgagcacgcggcggccgcagctggggcctccaacatgctctccgagatgttcaacttccccgcgccgccgtcggggccctccgccaccgagctgctggccagccagatgggcgccaactaccgcttcggggggctacggcagcagcagcagcaggggcccggaggggtggtggctggcttgtccggcgacggcggttggttcgtcggggccggcgcggcgggtcgtgctgctggcttggtcctcggtggtggggccaacatggggtcgttaggtgaaacgtcgtccccgaagcagcagggcagcatggctgggctggccaccgacccggccgccgcgatgcagctcttcctgatgaacccgcagcagcagcagcagtccagatcgtcgccgccgtcgccgtcggacgtccaggtccagcaccacgaggcggcgttccaggcgttcggaaacgccggggccccgtttggcggcggcgccgggaccggcgtcgtggaaggccaggggctgtccctgtcgctgtcgccgtcgctgcagcagctggagatggcgaagcaggccgaggagctgagggtccgggacggcgtgctctacttcaaccgccagcagcagcagcagcagcagcagctgccgatggcattgcacggccaggtcggcgcgctggggcagcagctgcacgtcggctacggccccgccggcgtcgcgggcgtgctgcgcaactccaagtacacccgcgcggcgcaggagctcctcgaggagttctgcagcgtcgggcgcgggcagatcaagggcggcgggcgaggggcctcggcgtctaaccctaacaacaacccgggcaacaagggcggcgcctccagctccggcgccgccgcgcagtccccgtcgtccgcgcccaacaaggagcccccgcagctgtcccccgccgaccggttcgagcagcagcgcaagaaggccaagctcatctccatgctcgacgaggtggaccggcggtacaaccactactgcgaccagatgcagatggtggtgaacttcttcgactcggtgatggggttcggcgcggcgacgccgtacacggcgctggcgcagaaggcaatgtcgcggcacttccggtgcctcaaggacgccatcgcggcgcagctgcgggccacgtgcgagctgctgggcgagaaggacgccggcaccagctcgggcctcaccaagggcgagacgccgcggctgcgcgccatcgaccagagcctccgccagcagcgcgccttccaccacatggggatgatggagcaggaggcatggcggccccagcgcggcctccccgagcgctccgtcaacatcctccgctcatggctcttcgagcacttcctccacccgtacccgagcgacgccgataaacacctgttggcgaggcagaccgggctgtccaggaaccaggtctccaactggttcatcaacgcccgtgtccggctatggaagcccatgatcgaagagatgtatcagcaggagtgcagggagctcgacggctcctcggccggcggcgggggccccgagtccgtcaacgacccctccggcgccgacgactcgcactccccgaccaccaccggcgcagcgcagctcccgcaacagcaacatcacctcggcacggtgcctggggtgatgccccacaagcccgacccgggcgccgccggtccctcggctgcggacgcggcgttcgtcgggatcgaccctgtggagctccttggcggtggcgcggacgacttgtacgggcggttcgagcccggggtgagggtgcgctacgggcccgctgcggcaggcgctgctgccggcgacgtgtcgctgacgctgggcctgcagcacgccggcgccggcaacgccgccgggcccgacagcaccgggcggttctccttgagagactacagcggttgttgatgcttacacatcgcttacatcacctttattcatggctcatgcatgcgcccatcatgcatttggaagagcaaggatcgacgaaagaaagagagagagagaaaagagtaaccagagaagagatagagggcgctagacaaagagagatgagcatctagaaagagaaaaaatgcatggtgcctggaggtgatgaatgggatgggatatatgaatatgagattatcacaaccaccttcgtcgtcttcttcccagatgattcttaatttacttagctagaagattaattccttttgctaggcattgttgttggggggttaaggataattaatttgtatacagcaaaggaagataggaagtgtataattgtttagtcacacttttttggttctttgttttgcatttgcccgtttttgttctggtgtaccaattttccttgtactcatttttcttccctctgtaaactaaacataagagacacatacatgcatacgtaaatacatatattggtaaatatggtcatacgtatagcatatatatgtaaggcctaaaaattgaacgtacgtatacttctg

SEQ ID NO: 216615 - DNA, 3172 bp, Zea Mays
cacaaagttccttcgaagaatctttgcatcctacagacaaaacataagagaacaaaacatattatcttatagaacgagatagctgaaatgtatgttttgaacataaaatgaacgtactacactcaccccaacaaatttcagtcatctgtcattcccccacatagccagcttgtagaacaaggtagctgatattaaacctatagaataatgtttgggtaactatgttttatacaatgattatcatagaaaaaatttaaactgctgagaaggtggtacgaagaaaataccctcttaagtcaattggaacaccagtatgaattgtatgttcccatttaaagatatcctctgcccatccagaacgtttcttgttgtaagcaatcttatatttttttgaggccatgataatcgcttccgcgaacctcttgtatggcatgtgtttacaccaatcttgagtcggtgtaaagttgataaaagtcacatgctttttaacatgatctattacgaaaagggtgtgacatccattgatgtactacttatgaactttggacaagtggagtttatgtatgaagtatgaactacttatgaacttatatggacttgattcgtcatgtatgacgagtcactaaaagccagatcaaccctggtagcatctggctaggtaaatatggttgttttatagtttgttccttcttggtttttcaaatcgttttcttttatgtaccttcccattctgtgccttggtatgaaagacaacactggctacctggtgattcttaaaaaaacactttctttctggaacttcacagcatgggagcatccatccttagatggcctgactacctttatgcatgtgtccatctagtggattttctgtttacttagtgctatgggattggggatcgcttatgctattatttttcaggaggaaatgatgcgagggaaggcaggatatgaacacctgaatgaacccctccatatattggttgaggcagagctacctgttgaaatcattgatgtgtgtttgatgcaagcccgcgagatccttgaaggtctgctaaagcctgtggatgaattccaggactacttcaagaagcagcagctacgggagcttgcgatgcttaatggcacccttcgtgaggaagggatgcagagatccggttcagcgtcccctttccacaacagccttgggatgaagagagccaagacaagagggtaatgaacaaagctgcaagcatcatgaaggaagaaccaaatgaatctattttgagactgatcctgtgtgcacatggggttgccttccttggctactgtactggcccagtacggcctcgagccaccagcatcggggcagccgtacccagacgagcaaatgcagcaacaagtgagcatgaagctgcaaagagaaaacacgccaatgctggcaagcaaggaacctcagtagcctcctaccctgatggtgatggatgcaaatcggtgttctcagaagttgcaggagctgagtagcaagaaagccaatgtgaaaaagaaacaaaagatgtagaatggtaagaaaatcagcacaaaaggtgtttgcaacatataaaatgaggtcaataaaattgagatgaagcaaagcagcagttcagttgatccaagaatagatgtcttggagttggttagcagaagggttgattctgaagaaaaggagaggcagaagagcagtaaacaggttgggttgaaagaaaagctgaagtcatggcctgtacctgaagtgtgcatagtatacacgaggagaaaccgcaagcaacacaagaaggaactgggagatgaagtaactggtgctactccgggaacagagtaccatatgcctgccagatatggctgtttgaaccaagtatgtcctgatgcaggctctgacaaaattcctgatcctgatgtagatttctacagtgttcctgatgcagatttttccagttttggtgatcattctgaaagttcatttcaaaatgatcaagtctgggccatgtatgatgaggaagatggtatgcctccctattatgctttgatcagaaaagtcatttccactcgcccttttaaaggtagactggtccacctcaaagcaaacgactctaatgggttcggagtctccagttggctctcgtgtggatactccaagacctgtggtgagttcaagtttgatgtgttcaagtttgatgcctcgctaaatggtgagctgtcggaagaattgagaaatcgactgatgaattaagcagaaaagatcaaggtgagctgtcggaacattttggttcaattccttgtgttttggtcactgctacacattttcatgtaattttaaataacaaaaaacatttgttactaatgaactgctaaccactgaagagagcaacaaaaattactcatctcagctaaatggtttcatgaagtggttagaaagagaactgttgcagttcggcatgcattctgagagtgccaatgattatttactggatcacatattcttttgcatatatttctattcaatcttgttaacgctttcttcgccataacttttagattaaagtacttcttttatggcggtgatgctgcttaaactatgagcattgtggatttattattggaatctgttgagctgtcttacaggcttggttagtattgatgaactttgccactcgtgttgggcatcttgtagcagtttcctgtgaagccgaactccttctcatgcaaaaggaatggggcacaacagaagctgaactacttctgccgagattttatttggagacgagcagcaaaataaggccttcgactctacagagataacgtctaatgcctccccacgcacaattttatctaaaaattagcatcaaccgatatataccggaagaatgcatataaactttataccccaataaaaacccccaatacacacaagctcattgtattatacttaacatatgtcatatatataaaagttatattaggggaagcattgaaaagaagtcagttcattttatgtttgagcgacaaattcactaacatatcacaggctactaaagaacagttgcagcaacaaattcgtttcaaagcttaccttggcctgagaagatgcggaagccgtcgctgcgttgcagcgaatccccgacggtgtcctgtcgtccggtccgggtcaaccaag

SEQ ID NO: 216616 - DNA, 5606 bp, Zea Mays
cctcacaatccgccccatatcataaagcccaaccccacttcccgtttttcatgcgcgtgagggggtgtggtgttcttccgttcggttagctcgtagccgccgccgtccgtagttccctctccgcgcgtggccgccggtcccgcggcttcctcctcccgtgcgtggctgtggcgccggtcccgcggcttcctcctgagcgggcctgctcttcccgtcaggcctccgcacccacggccggatctcttcctctcgtctccacggccgccttcctaggacagccgttgcccgcgcggtgcccgcagccgcctcgtcggcgcaacgctctcttcctccccagtccctccatcggaaccaccctaagcttccttagcccattcggttctaccgaaagaatccccatcctctgtcgcgtccgccacctcctctgcggcttaccagccggactcctcaagcctcccgcttagccccctcgccggtgatggccgcggccccgccggtagccggagaagatattaaagacggcgttgaggtgtgcctgttcgatgaatcagcagatgggttctcgagaactgtgcgcgccatctcggagctcgtcgacatagagcccgaaacagacttccctgaggcggaagttgagcggctctcctcctcaataacgttcctcagagaatggaggcacttctcgtatgagccaaaaagtgtaacattcactaatggcaccgagtccacttcatatagagatgacatgcacagtgtaactttaccacagttttcatctgcttctgttccccagattacacctcaggaagaccgaggggataatacggtcagctttgattttattctatatgcgggggggaatgtctgggccttggactggtgccctaggttgtgcgacaagcctgactcttctataaactgtgagtatcttgctgtttctgcgcatcctcctggttcttcttaccataaacttggcatgcccttaaccgggagaggtatcattcaagtttggtgtctgttagcaccatttgaagattcacattctcaccagccagtgaatgcattcaataatggtaagcaaagaggaaggcctagaaaaataccttgtagtgataagctggtacctgttccaaaaggaccaagggggaggccaaaaaagagatcttacgatgatcagttagaacctgttccgaaaagaccaaggggcagaccaagaaagtatccattaccagttgcaaaatttgaaggttcatctcaaaacggtgaaagtcaggatattattctttttgatcccctttctacttcaagttttattccagatgacctttcattggcttctgtcatgccaactgaaaagtctgtgcaatcaacacctaaaagaggtagagggcgacctaggaaaaacccaagtgacaaactgacagactcatctggtattgtatcagaagatgtgtgtacagccctacctccaacaactgcaatctctacaaaacctaaaagaccacgggggaggcctcgaaaatatccaattccaatgaatgatggatctgtttcaggcgctgatgttgaattagggaaagagacaacttgtcagactgcttcatttggctgcagtttggaccacactgcttgcacagagtttaatgccaagttatgtattgttgcagttgatgcagcattgccacctattgacaaactgacctgttcacctggtactgtatcaggagatgtgtgtacagccccaactctaacaactgcaatctgtacaaaacctaagagaccacgggggagacctcgaaagtatccagttcaaatcaatggtagatctgtttcaggcactgttgctgaattaggacaagagtcaacttgtcagccagtttcatttggccacactgtttgcacagagtttaatgctaatttaagtattgttccagttgatgcagcattgccaattgtcgacaaactgtgcagttcatctggtactgtagtaaaagaaagtgtgtgtaccgaaccatctccagcaactgcaactcgtaagcaaccaaagagaacacgggggatgcctcgaaagtattcagacactatgattgacctggggaaagatacaactggtcatcctgttttatttggacgcagtatggatcacactgcttgcacagagtctaactctagttttagcattgttgcagttgatgcatcatcactgtttgcatcttcatctactgcaacttgtgatgataagtcaaaaggtcagagcattagagggaaagataagaagaaaacaatttctaatgctctatattgccctgtggtttctggtgttgaatcacagagcatttgttccacagaaattcttccaaatgatcctgcagtctctgttgagaatgctttgccatctgcacagaacacggtatcaatgaatgagctttgttcggctagcttgttaaaccgtgagggtaatgcgtgtaaaagtgctctttcagatgattctgaactgcctatccacatttcacctaaatcaagtaataaaagagagtcaagtggcaggaggggaagaggaaggcctaaaacgataccactttctgctggaactggtcattttgtggcttctgttgccagtctcccaaagacaacctgtgtactgactagttcaagcaatctcacgtcgttgaacaagagtggtggcaaatttatagtaagtagcgttagttcatgtggctgtgatgttgagaaatgcagtgttcattcaggtgttttgttgtctgatgatgcaccaccagcacatggcttacaaaatacaaattgtaaggaagaatcgaataccaaaataggaaaagcgggatctagaaataagcctgttgcagttgagcacaatcattttactgatcttaatgtaaaagaacaaaaagtgcagacaactccaatgtcaggtgatcctgtgatcttggttgaaaattgtatggaaggacaaggccccagaaaggctggggggcaacttcaaaggatacctgcttcaaacaagagtagtggcgcatctgttggtggtggaacatataaaatagagacattatccacaccaatgactaaaggatcatctaaaaataatgacatggcttatggggctggtttgaatcagtctcagaatgcaattgttggttgtgaaggcatggaagttattgaaagcaacactgccaattatacttctcattgtaatgaaaatgcacgagcaaatcaagttgcacccagtttcaagaacagtgatagggtcattgatgaaacggaagctgcggaacttgggccactcaaggaaccaagggaagatgacaatttgtttacttgtgtaaactcaaactcagcttcaattacaagtgacattgctcaaccaagagttgtcttgtgtttagctcacaacggcaaagtcgcttgggacatcaaatggaagcctcctttactaagtcaacctgaacagaaatcacgacttggttttcttgcagtattgttggggaatggcgctcttgaagtgtgggaagttccatcaccatgtatgatccagaaaatatattccccctctaaggtggagggttctgaccctcgttttctaaagctccaacctgtatttaggtgtgtcaaagtgaagtgcaggaacaggcaaagcatgaatattctttttgaagccatgacctctttataatggtaaacagcattcccttgacagttgattggtcaccttctcctcctcatgatatgatattggcgggttgtcatgatggaacggttgctttatggaacttctcgatgaatttgccaacacaagattcaaaaccttttatgtgtgtcactgctgattctgttcccattagagctctctcttgggcaccatatataagtgaagaaagcacagatacctttgtcactgctggagaggatggtctaaagttctgggatttaagagatccataccatcctctttgggagctaactactgctccaagggctgtattaagtcttcattggctaaaagatggaagggggatcattatctcactggaagatggtacattgaagtttctaagcttgcctcggattgcaaatgatgttccagccactggaaggccattttccggaacaaaaactcagggtgttgcaacttatcagttgtcagaatatttgatttggagtgtccatgcttcagaacctacaggttgtgtggcttactgtggggcagatggtactgctgtgtacttccagctaaaatcgagattctgggataaggagcctgggcgtaaccgtgttccttatttcctctgtggatcattatcagaggatggagaaaatattaagattggcagcaggctgcaaacatctccattaccaaatgtgcctgtggggaccaaaaagggttcaaaaccatcccaaagtatagttcaggcgcttgctacaagcgatgtcactagcctgctgacatatcagctcaactcccccacaggaaacaatgatgccgtaaatctagaagctcatgatgatcaagatgatggacgcagcaaagagcaaggagcaggtgctgtaaatcaagaacttgatggtgaacaagatgatggacaccgtgaagaacaagcagcaggcatggtaaccacagaatttggcgatgatcaagccgatggacacagcgaagaacaaggagctggtgcaataatctcagccactcctgcaaaggaagagaatgatggaacatggaacgacaagggtgttcaatcccctaaagaccttaatgtcgtccctccgaattctgtcgctttgaatcaagtgcggtggaacatgaacaagggtagccagagatggctgtgctatggaggtgctgcaggcatcatacgatgccagagaatctgaagagccgcaatctggaatgctcttcgagaaacagaggcttgtcacacagatggtggtaggttctactctattcttttctgctacttttgaccgggtcgccgagggtggttggcttagctgtgcataggggagaaccgatgcaatagacctttgcatcttagaattgcagtccccaggttctgaatacatatggtatggaacctgggtcctgatagttgcggtagtaccagtgcatgcgaacctgagcttttgcgttccattctgtgtaagggcttgttcgtttgtctaggaatggatttggaatcgtttcagctaatcaaaacttatataacttagagaagaaatccagctagaaattgttccctaatgtggttcctaactgttaccttatgatgtgaacagaacatgatgcattcgggaggaaataataaatgccatagtgctcgagattctggtttcctgatgtggttcctggacgctgacatgctattgtactgagttgtatcgaatttcgtgatgtgatcatgtgatttatggtcgctgacactattctacacccgcttcgtctcggaacaaagttaattgaactatatcccatcacgacactcgagtcttctgagcgcttagcgtctctctcaaatagatcaggtttctttgcaagctacctgttctgagctaggccttctaaatttatgcaacaatgaccgttacgcttgttc

SEQ ID NO: 216617 - DNA, 5024 bp, Zea Mays
cctcacaatccgccccatatcataaagcccaaccccacttcccgtttttcatgcgcgtgagggggtgtggtgttcttccgttcggttagctcgtagccgccgccgtccgtagttccctctccgcgcgtggccgccggtcccgcggcttcctcctcccgtgcgtggctgtggcgccggtcccgcggcttcctcctgagcgggcctgctcttcccgtcaggcctccgcacccacggccggatctcttcctctcgtctccacggccgccttcctaggacagccgttgcccgcgcggtgcccgcagccgcctcgtcggcgcaacgctctcttcctccccagtccctccatcggaaccaccctaagcttccttagcccattcggttctaccgaaagaatccccatcctctgtcgcgtccgccacctcctctgcggcttaccagccggactcctcaagcctcccgcttagccccctcgccggtgatggccgcggccccgccggtagccggagaagatattaaagacggcgttgaggtgtgcctgttcgatgaatcagcagatgggttctcgagaactgtgcgcgccatctcggagctcgtcgacatagagcccgaaacagacttccctgaggcggaagttgagcggctctcctcctcaataacgttcctcagagaatggaggcacttctcgtatgagccaaaaagtgtaacattcactaatggcaccgagtccacttcatatagagatgacatgcacagtgtaactttaccacagttttcatctgcttctgttccccagattacacctcaggaagaccgaggggataatacggtcagctttgattttattctatatgcgggggggaatgtctgggccttggactggtgccctaggttgtgcgacaagcctgactcttctataaactgtgagtatcttgctgtttctgcgcatcctcctggttcttcttaccataaacttggcatgcccttaaccgggagaggtatcattcaagtttggtgtctgttagcaccatttgaagattcacattctcaccagccagtgaatgcattcaataatggtaagcaaagaggaaggcctagaaaaataccttgtagtgataagctggtacctgttccaaaaggaccaagggggaggccaaaaaagagatcttacgatgatcagttagaacctgttccgaaaagaccaaggggcagaccaagaaagtatccattaccagttgcaaaatttgaaggttcatctcaaaacggtgaaagtcaggatattattctttttgatcccctttctacttcaagttttattccagatgacctttcattggcttctgtcatgccaactgaaaagtctgtgcaatcaacacctaaaagaggcgctgatgttgaattagggaaagagacaacttgtcagactgcttcatttggctgcagtttggaccacactgcttgcacagagtttaatgccaagttatgtattgttgcagttgatgcagcattgccacctattgacaaactgacctgttcacctggtactgtatcaggagatgtgtgtacagccccaactctaacaactgcaatctgtacaaaacctaagagaccacgggggagacctcgaaagtatccagttcaaatcaatggtagatctgtttcaggcactgttgctgaattaggacaagagtcaacttgtcagccagtttcatttggccacactgtttgcacagagtttaatgctaatttaagtattgttccagttgatgcagcattgccaattgtcgacaaactgtgcagttcatctggtactgtagtaaaagaaagtgtgtgtaccgaaccatctccagcaactgcaactcgtaagcaaccaaagagaacacgggggatgcctcgaaagtattcagacactatgattgacctggggaaagatacaactggtcatcctgttttatttggacgcagtatggatcacactgcttgcacagagtctaactctagttttagcattgttgcagttgatgcatcatcactgtttgcatcttcatctactgcaacttgtgatgataagtcaaaaggtcagagcattagagggaaagataagaagaaaacaatttctaatgctctatattgccctgtggtttctggtgttgaatcacagagcatttgttccacagaaattcttccaaatgatcctgcagtctctgttgagaatgctttgccatctgcacagaacacggtatcaatgaatgagctttgttcggctagcttgttaaaccgtgagggtaatgcgtgtaaaagtgctctttcagatgattctgaactgcctatccacatttcacctaaatcaagtaataaaagagagtcaagtggcaggaggggaagaggaaggcctaaaacgataccactttctgctggaactggtcattttgtggcttctgttgccagtctcccaaagacaacctgtgtactgactagttcaagcaatctcacgtcgttgaacaagagtggtggcaaatttatagtaagtagcgttagttcatgtggctgtgatgttgagaaatgcagtgttcattcaggtgttttgttgtctgatgatgcaccaccagcacatggcttacaaaatacaaattgtaaggaagaatcgaataccaaaataggaaaagcgggatctagaaataagcctgttgcagttgagcacaatcattttactgatcttaatgtaaaagaacaaaaagtgcagacaactccaatgtcaggtgatcctgtgatcttggttgaaaattgtatggaaggacaaggccccagaaaggctggggggcaacttcaaaggatacctgcttcaaacaagagtagtggcgcatctgttggtggtggaacatataaaatagagacattatccacaccaatgactaaaggatcatctaaaaataatgacatggcttatggggctggtttgaatcagtctcagaatgcaattgttggttgtgaaggcatggaagttattgaaagcaacactgccaattatacttctcattgtaatgaaaatgcacgagcaaatcaagttgcacccagtttcaagaacagtgatagggtcattgatgaaacggaagctgcggaacttgggccactcaaggaaccaagggaagatgacaatttgtttacttgtgtaaactcaaactcagcttcaattacaagtgacattgctcaaccaagagttgtcttgtgtttagctcacaacggcaaagtcgcttgggacatcaaatggaagcctcctttactaagtcaacctgaacagaaatcacgacttggttttcttgcagtattgttggggaatggcgctcttgaagtgtgggaagttccatcaccatgtatgatccagaaaatatattccccctctaaggtggagggttctgaccctcgttttctaaagctccaacctgtatttaggtgtgtcaaagtgaagtgcaggaacaggcaaagttgattggtcaccttctcctcctcatgatatgatattggcgggttgtcatgatggaacggttgctttatggaacttctcgatgaatttgccaacacaagattcaaaaccttttatgtgtgtcactgctgattctgttcccattagagctctctcttgggcaccatatataagtgaagaaagcacagatacctttgtcactgctggagaggatggtctaaagttctgggatttaagagatccataccatcctctttgggagctaactactgctccaagggctgtattaagtcttcattggctaaaagatggaagggggatcattatctcactggaagatggtacattgaagtttctaagcttgcctcggattgcaaatgatgttccagccactggaaggccattttccggaacaaaaactcagggtgttgcaacttatcagttgtcagaatatttgatttggagtgtccatgcttcagaacctacaggttgtgtggcttactgtggggcagatggtactgctgtgtacttccagctaaaatcgagattctgggataaggagcctgggcgtaaccgtgttccttatttcctctgtggatcattatcagaggatggagaaaatattaagattggcagcaggctgcaaacatctccattaccaaatgtgcctgtggggaccaaaaagggttcaaaaccatcccaaagtatagttcaggcgcttgctacaagcgatgtcactagcctgctgacatatcagctcaactcccccacaggaaacaatgatgccgtaaatctagaagctcatgatgatcaagatgatggacgcagcaaagagcaaggagcaggtgctgtaaatcaagaacttgatggtgaacaagatgatggacaccgtgaagaacaagcagcaggcatggtaaccacagaatttggcgatgatcaagccgatggacacagcgaagaacaaggagctggtgcaataatctcagccactcctgcaaaggaagagaatgatggaacatggaacgacaagggtgttcaatcccctaaagaccttaatgtcgtccctccgaattctgtcgctttgaatcaagtgcggtggaacatgaacaagggtagccagagatggctgtgctatggaggtgctgcaggcatcatacgatgccagagaatctgaagagccgcaatctggaatgctcttcgagaaacagaggcttgtcacacagatggtgaacatgatgcattcgggaggaaataataaatgccatagtgctcgagattctggtttcctgatgtggttcctggacgctgacatgctattgtactgagttgtatcgaatttcgtgatgtgatcatgtgatttatggtcgctgacactattctacacccgcttcgtctcggaacaaagttaattgaactatatcccatcacgacactcgagtcttctgagcgcttagcgtctctctcaaatagatcaggtttctttgcaagctacctgttctgagctaggccttctaaatttatgcaacaatgaccgttacgcttgttc

SEQ ID NO: 216618 - DNA, 3882 bp, Zea Mays
cagtatcttgctgtttctgcgcatcctcctggttcttcttaccataaacttggcatgcccttaaccgggagaggtatcattcaagtttggtgtctgttagcaccatttgaagattcacattctcaccagccagtgaatgcattcaataatggtaagcaaagaggaaggcctagaaaaataccttgtagtgataagctggtacctgttccaaaaggaccaagggggaggccaaaaaagagatcttacgatgatcagttagaacctgttccgaaaagaccaaggggcagaccaagaaagtatccattaccagttgcaaaatttgaaggttcatctcaaaacggtgaaagtcaggatattattctttttgatcccctttctacttcaagttttattccagatgacctttcattggcttctgtcatgccaactgaaaagtctgtgcaatcaacacctaaaagaggcgctgatgttgaattagggaaagagacaacttgtcagactgcttcatttggctgcagtttggaccacactgcttgcacagagtttaatgccaagttatgtattgttgcagttgatgcagcattgccacctattgacaaactgacctgttcacctggtactgtatcaggagatgtgtgtacagccccaactctaacaactgcaatctgtacaaaacctaagagaccacgggggagacctcgaaagtatccagttcaaatcaatggtagatctgtttcaggcactgttgctgaattaggacaagagtcaacttgtcagccagtttcatttggccacactgtttgcacagagtttaatgctaatttaagtattgttccagttgatgcagcattgccaattgtcgacaaactgtgcagttcatctggtactgtagtaaaagaaagtgtgtgtaccgaaccatctccagcaactgcaactcgtaagcaaccaaagagaacacgggggatgcctcgaaagtattcagacactatgattgacctggggaaagatacaactggtcatcctgttttatttggacgcagtatggatcacactgcttgcacagagtctaactctagttttagcattgttgcagttgatgcatcatcactgtttgcatcttcatctactgcaacttgtgatgataagtcaaaagatgattctgaactgcctatccacatttcacctaaatcaagtaataaaagagagtcaagtggcaggaggggaagaggaaggcctaaaacgataccactttctgctggaactggtcattttgtggcttctgttgccagtctcccaaagacaacctgtgtactgactagttcaagcaatctcacgtcgttgaacaagagtggtggcaaatttatagtaagtagcgttagttcatgtggctgtgatgttgagaaatgcagtgttcattcaggtgttttgttgtctgatgatgcaccaccagcacatggcttacaaaatacaaattgtaaggaagaatcgaataccaaaataggaaaagcgggatctagaaataagcctgttgcagttgagcacaatcattttactgatcttaatgtaaaagaacaaaaagtgcagacaactccaatgtcaggtgatcctgtgatcttggttgaaaattgtatggaaggacaaggccccagaaaggctggggggcaacttcaaaggatacctgcttcaaacaagagtagtggcgcatctgttggtggtggaacatataaaatagagacattatccacaccaatgactaaaggatcatctaaaaataatgacatggcttatggggctggtttgaatcagtctcagaatgcaattgttggttgtgaaggcatggaagttattgaaagcaacactgccaattatacttctcattgtaatgaaaatgcacgagcaaatcaagttgcacccagtttcaagaacagtgatagggtcattgatgaaacggaagctgcggaacttgggccactcaaggaaccaagggaagatgacaatttgtttacttgtgtaaactcaaactcagcttcaattacaagtgacattgctcaaccaagagttgtcttgtgtttagctcacaacggcaaagtcgcttgggacatcaaatggaagcctcctttactaagtcaacctgaacagaaatcacgacttggttttcttgcagtattgttggggaatggcgctcttgaagtgtgggaagttccatcaccatgtatgatccagaaaatatattccccctctaaggtggagggttctgaccctcgttttctaaagctccaacctgtatttaggtgtgtcaaagtgaagtgcaggaacaggcaaagcattcccttgacagttgattggtcaccttctcctcctcatgatatgatattggcgggttgtcatgatggaacggttgctttatggaacttctcgatgaatttgccaacacaagattcaaaaccttttatgtgtgtcactgctgattctgttcccattagagctctctcttgggcaccatatataagtgaagaaagcacagatacctttgtcactgctggagaggatggtctaaagttctgggatttaagagatccataccatcctctttgggagctaactactgctccaagggctgtattaagtcttcattggctaaaagatggaagggggatcattatctcactggaagatggtacattgaagtttctaagcttgcctcggattgcaaatgatgttccagccactggaaggccattttccggaacaaaaactcagggtgttgcaacttatcagttgtcagaatatttgatttggagtgtccatgcttcagaacctacaggttgtgtggcttactgtggggcagatggtactgctgtgtacttccagctaaaatcgagattctgggataaggagcctgggcgtaaccgtgttccttatttcctctgtggatcattatcagaggatggagaaaatattaagattggcagcaggctgcaaacatctccattaccaaatgtgcctgtggggaccaaaaagggttcaaaaccatcccaaagtatagttcaggcgcttgctacaagcgatgtcactagcctgctgacatatcagctcaactcccccacaggaaacaatgatgccgtaaatctagaagctcatgatgatcaagatgatggacgcagcaaagagcaaggagcaggtgctgtaaatcaagaacttgatggtgaacaagatgatggacaccgtgaagaacaagcagcaggcatggtaaccacagaatttggcgatgatcaagccgatggacacagcgaagaacaaggagctggtgcaataatctcagccactcctgcaaaggaagagaatgatggaacatggaacgacaagggtgttcaatcccctaaagaccttaatgtcgtccctccgaattctgtcgctttgaatcaagtgcggtggaacatgaacaagggtagccagagatggctgtgctatggaggtgctgcaggcatcatacgatgccagagaatctgaagagccgcaatctggaatgctcttcgagaaacagaggcttgtcacacagatggtgaacatgatgcattcgggaggaaataataaatgccatagtgctcgagattctggtttcctgatgtggttcctggacgctgacatgctattgtactgagttgtatcgaatttcgtgatgtgatcatgtgatttatggtcgctgacactattctacacccgcttcgtctcggaacaaagttaattgaactatatcccatcacgacactcgagtcttctgagcgcttagcgtctctctcaaatagatcaggtttctttgcaagctacctgttctgagctaggccttctaaatttatgcaacaatgaccgttacgcttgttc

SEQ ID NO: 216619 - DNA, 1814 bp, Zea Mays
ccagtatcatctaaagtttgagaacttcattttcgcaagtaaattttatttctcttgggaaaatgatttttttaaaataaggttgtcaaactcgtcctaatatgttgcgtttccgtttttcctttcttgtatttggaagtgaagtggaatgaggcagcacagcctgctcctacagccgatgagatgaggtgattgaggtccgtccaggacaaaaaagcgaaacgactccttcagttccgtcccgttcgtgacgacctccggtcccgggagggggagggggagggggagggagaggcgaggtcatggcctccggcaccggctccggccagccgcaacccgcagcagctgatgctgacccgggagccggcgacaacaagctcgtcttcgagacgccgctgcagccgcagcccgtgagggaggactacgtcgagaacgccgtcaagttcctctcccacccaaaggtcaggggctcccccgtcgtctacagacgatccttcctcgagaagaagggcctcaccacacaggagatcgacgaggccctacgaagagtccctgatcctgaacccatcactacggctaccgcttctccacagcagcaggttggcagccagaatcaatcagctggggcgcaaacttatgcgccagcgcgatctatgcacccagcaaccgctggccctgtcgtccgaccccggttcagctggtaccaagcattcctcgctgcagggctcttgcttggttttggtgctagcacggctgtctttatcaagaaactgttccttcctaggctcaagtcttggatccgcaacgtcgtagcacaaggtgatggcgctgaaggcaaccaacttaagcacaggattgatgaggaaacggctgaggctgtaaaggcttctgcttcagctgtttctgctattgccaaaacaaaccagcagctgcttgcttcaaaggatgaagaaaagaagatactcgtgacattaacacaagctctagattcccaagccaaggagttaaaatccttgaccgagtcaatcaatcgtaccagggaacccataaacattaccagagacgataggttttctcagcaccgcccactggaagaccatgtccctcctgttacgaggaatggggcaattaacagttcatggagatcttctcagcaaactaacatgtatggtgtgtcacatggtgactttggttccgcagcaaggtctgcttcattcgtgccagcacctgctgaacctacagctggatcattttcaagatcttgtgccgagtgtggccattggaagaacaggaactcttatagcgtgctacggttgctcgtcacctctatcagctaccctggaggctttcctgttcttgctcttggtcgtgttgctagtgtcttgcatagtgtataatcttagtgaggtgtgttgttggtgtgtgtgtgttgtgtgtgcatggtttgagtgcgtgcttatgcagctgccttttatctctttaatgaaaaaatgacaagctctccaagaaaaaacttgaccattaactaataagattacaataactgaactttaaaagatactgacattcctttcaaactgtctatatagaggctcatattattgacaaaggtagtccttttagtgtgtgtgagcgcgtgtgcgtgtgttggttattacatcttatcagtatacatgttgctcaatctccaaatacatgcatttgtggtatgtgcatatggttaccatattttgttctatagtgttctttattgatcagttgaaagttattcaacttgatcacgctgcaaccgatttctttaatcttgtggaact

SEQ ID NO: 216620 - DNA, 2179 bp, Zea Mays
cgacgatgcactccacccacctccgccgcccgccatggcctccacccaactcacgtgcagcaggttccaactcccaagatctaggtcggacaccggcgcacaccacgtcagcgacgccaagcaccactcgttcgacctcggcaagcacctgcctctccgtcatcgcccccccccccccctccgctctctatcgcttgctctagccgatctatgtgcatggggctcaacgactggaacaaatcctcgtcgatgctcagggatggttttagggtagatggagcatcccctacatgtgtcttccatgggatggcccaactgcagatctgttcctgggatactacacaatgactacattgcatactcggagctgctcgacaggagcgtcgtcggcggtgctgtaaacatctcctagagtcctcgggcacaagaaggtcaggcggtgatgccaatgcagatcatccaatcagatccagaatgcctgccactgtatacttggagctgctcgacaggagcgccgttggcggcattgcaaacatctcctatagtcctcgggcacaacaaggtcagccaatgacgccaacgcagatcatcccatcggatccggtattcttgacgaaaatccctgaagatgggaaacccacgctgctggtgcaaacaccgccggtgatgccagtgtaggccccattgcccttggacgggatgtcactgactacaatggactcctgacatgcagttgtagcttggctcgaggcgggcatcagcgacgacaaacatcctgctcaatttgttgtatgataaatactgcgaaacaatgctggtgtttcataagatgaccgtgcagctcatgaaaatccagagggtggagtcgagcgagacgacgtggccggcgcggcgccaggtcgtggcgtgcgccgctgtttgctggtcgtggcgtgaggtcaccaaggaggtggtgaagacgctcaaggagtgcggcaggatcaccttccccatgtcccttaagcaggttggcactctctgccttttctctactttgatgatcaatcacatgtcttcacctttgcagaggcttatgattttgaagatctagaatctatggttgaagaaatagccaaagcattcaagacaaagataatgtttatatatgttgacactgctgaagaaaaccttgcaaaaaccattcctcactctttatggcattgaatcagaaaaggcctactggtccagttcttgaaagggtgggaatgtgtccaagaagacaaaggcatcgacccgccaattcttcgctacaaattaaaacagcactagggtgagatcagtgggcttgagagtagcatcatccttcaaacatgatgatgggtttctagctgatggtgtctctatagctcactggtatccttcaaaaagaaactaatcttcacatctttcaaagcatttgctagggccccttcggtgagcaatagaatacgacttgcgctaccaaagcgtccatagctgaatgcaaaccattgagatggtccaggttgaggacctccatgacacctatgttggtgtgggttgtgccgccccatcgtgaccgtcatcgattgggcctccgagtccaggagaagacctccgatgaagaaagagacatgctgcacatgcacgagggtacttgcagatagatgtcggctctatggacgaacactcgaccaagtcagatgaggagtatgagggcctagccatgcgagacatgatggctaccggtccaacaatgagcagcaagctgtgagttaaagatgaactcacctgtcctggagagcaacatccataggagtgaggcaaaatggcgggtaccaccacaacatggacccgttcctgaagatgtccaaggaggtggtagccgacaccataatgtcttgcgcgtcattgtgtcaccggccggcaacacgctgcgctggtaccggcgggtgttatgtttcttaggcgtatgtttctgtgctttgagctgtgctatagactggttgtgccaactactgattttaaaagaaaaaggtgagctgaaaatcattgttgaaaacaaacatgtaacggttcgttctcatcagttgtgccaactaccaatcatttcattgatcagaatctgtcgttgctcatgagaaccaaaagtaagacacttcttaataacattggatgcaaa

SEQ ID NO: 216621 - DNA, 2073 bp, Zea Mays
cgacgatgcactccacccacctccgccgcccgccatggcctccacccaactcacgtgcagcaggttccaactcccaagatctaggtcggacaccggcgcacaccacgtcagcgacgccaagcaccactcgttcgacctcggcaagcacctgcctctccgtcatcgcccccccccccccctccgctctctatcgcttgctctagccgatctatgtgcatggggctcaacgactggaacaaatcctcgtcgatgctcagggatggttttagggtagatggagcatcccctacatgtgtcttccatgggatggcccaactgcagatctgttcctgggatactacacaatgactacattgcatactcggagctgctcgacaggagcgtcgtcggcggtgctgtaaacatctcctagagtcctcgggcacaagaaggtcaggcggtgatgccaatgcagatcatccaatcagatccagaatgcctgccactgtatacttggagctgctcgacaggagcgccgttggcggcattgcaaacatctcctatagtcctcgggcacaacaaggtcagccaatgacgccaacgcagatcatcccatcggatccggtattcttgacgaaaatccctgaagatgggaaacccacgctgctggtgcaaacaccgccggtgatgccagtgtaggccccattgcccttggacgggatgtcactgactacaatggactcctgacatgcagttgtagcttggctcgaggcgggcatcagcgacgacaaacatcctgctcaatttgttgtatgataaatactgcgaaacaatgctggtgtttcataagatgaccgtgcagctcatgaaaatccagagggtggagtcgagcgagacgacgtggccggcgcggcgccaggtcgtggcgtgcgccgctgtttgctggtcgtggcgtgaggtcaccaaggaggtggtgaagacgctcaaggagtgcggcaggatcaccttccccatgtcccttaagcagatctagaatctatggttgaagaaatagccaaagcattcaagacaaagataatgtttatatatgttgacactgctgaagaaaaccttgcaaaaaccattcctcactctttatggcattgaatcagaaaaggcctactggtccagttcttgaaagggtgggaatgtgtccaagaagacaaaggcatcgacccgccaattcttcgctacaaattaaaacagcactagggtgagatcagtgggcttgagagtagcatcatccttcaaacatgatgatgggtttctagctgatggtgtctctatagctcactggtatccttcaaaaagaaactaatcttcacatctttcaaagcatttgctagggccccttcggtgagcaatagaatacgacttgcgctaccaaagcgtccataggttgaggacctccatgacacctatgttggtgtgggttgtgccgccccatcgtgaccgtcatcgattgggcctccgagtccaggagaagacctccgatgaagaaagagacatgctgcacatgcacgagggtacttgcagatagatgtcggctctatggacgaacactcgaccaagtcagatgaggagtatgagggcctagccatgcgagacatgatggctaccggtccaacaatgagcagcaagctgtgagttaaagatgaactcacctgtcctggagagcaacatccataggagtgaggcaaaatggcgggtaccaccacaacatggacccgttcctgaagatgtccaaggaggtggtagccgacaccataatgtcttgcgcgtcattgtgtcaccggccggcaacacgctgcgctggtaccggcgggtgttatgtttcttaggcgtatgtttctgtgctttgagctgtgctatagactggttgtgccaactactgattttaaaagaaaaaggtgagctgaaaatcattgttgaaaacaaacatgtaacggttcgttctcatcagttgtgccaactaccaatcatttcattgatcagaatctgtcgttgctcatgagaaccaaaagtaagacacttcttaataacattggatgcaaa

SEQ ID NO: 216622 - DNA, 2151 bp, Zea Mays
cgacgatgcactccacccacctccgccgcccgccatggcctccacccaactcacgtgcagcaggttccaactcccaagatctaggtcggacaccggcgcacaccacgtcagcgacgccaagcaccactcgttcgacctcggcaagcacctgcctctccgtcatcgcccccccccccccctccgctctctatcgcttgctctagccgatctatgtgcatggggctcaacgactggaacaaatcctcgtcgatgctcagggatggttttagggtagatggagcatcccctacatgtgtcttccatgggatggcccaactgcagatctgttcctgggatactacacaatgactacattgcatactcggagctgctcgacaggagcgtcgtcggcggtgctgtaaacatctcctagagtcctcgggcacaagaaggtcaggcggtgatgccaatgcagatcatccaatcagatccagaatgcctgccactgtatacttggagctgctcgacaggagcgccgttggcggcattgcaaacatctcctatagtcctcgggcacaacaaggtcagccaatgacgccaacgcagatcatcccatcggatccggtattcttgacgaaaatccctgaagatgggaaacccacgctgctggtgcaaacaccgccggtgatgccagtgtaggccccattgcccttggacgggatgtcactgactacaatggactcctgacatgcagttgtagcttggctcgaggcgggcatcagcgacgacaaacatcctgctcaatttgttgtatgataaatactgcgaaacaatgctggtgtttcataagatgaccgtgcagctcatgaaaatccagagggtggagtcgagcgagacgacgtggccggcgcggcgccaggtcgtggcgtgcgccgctgtttgctggtcgtggcgtgaggtcaccaaggaggtggtgaagacgctcaaggagtgcggcaggatcaccttccccatgtcccttaagcaggttggcactctctgccttttctctactttgatgatcaatcacatgtcttcacctttgcagaggcttatgattttgaagatctagaatctatggttgaagaaatagccaaagcattcaagacaaagataatgtttatatatgttgacactgctgaagaaaaccttgcaaaaaccattcctcactctttatggcattgaatcagaaaaggcctactggtccagttcttgaaagggtgggaatgtgtccaagaagacaaaggcatcgacccgccaattcttcgctacaaattaaaacagcactagggtgagatcagtgggcttgagagtagcatcatccttcaaacatgatgatgggtttctagctgatggtgtctctatagctcactggtatccttcaaaaagaaactaatcttcacatctttcaaagcatttgctagggccccttcggtgagcaatagaatacgacttgcgctaccaaagcgtccataggttgaggacctccatgacacctatgttggtgtgggttgtgccgccccatcgtgaccgtcatcgattgggcctccgagtccaggagaagacctccgatgaagaaagagacatgctgcacatgcacgagggtacttgcagatagatgtcggctctatggacgaacactcgaccaagtcagatgaggagtatgagggcctagccatgcgagacatgatggctaccggtccaacaatgagcagcaagctgtgagttaaagatgaactcacctgtcctggagagcaacatccataggagtgaggcaaaatggcgggtaccaccacaacatggacccgttcctgaagatgtccaaggaggtggtagccgacaccataatgtcttgcgcgtcattgtgtcaccggccggcaacacgctgcgctggtaccggcgggtgttatgtttcttaggcgtatgtttctgtgctttgagctgtgctatagactggttgtgccaactactgattttaaaagaaaaaggtgagctgaaaatcattgttgaaaacaaacatgtaacggttcgttctcatcagttgtgccaactaccaatcatttcattgatcagaatctgtcgttgctcatgagaaccaaaagtaagacacttcttaataacattggatgcaaa

SEQ ID NO: 216623 - DNA, 2222 bp, Zea Mays
cgacgatgcactccacccacctccgccgcccgccatggcctccacccaactcacgtgcagcaggttccaactcccaagatctaggtcggacaccggcgcacaccacgtcagcgacgccaagcaccactcgttcgacctcggcaagcacctgcctctccgtcatcgcccccccccccccctccgctctctatcgcttgctctagccgatctatgtgcatggggctcaacgactggaacaaatcctcgtcgatgctcagggatggttttagggtagatggagcatcccctacatgtgtcttccatgggatggcccaactgcagatctgttcctgggatactacacaatgactacattgcatactcggagctgctcgacaggagcgtcgtcggcggtgctgtaaacatctcctagagtcctcgggcacaagaaggtcaggcggtgatgccaatgcagatcatccaatcagatccagaatgcctgccactgtatacttggagctgctcgacaggagcgccgttggcggcattgcaaacatctcctatagtcctcgggcacaacaaggtcagccaatgacgccaacgcagatcatcccatcggatccggtattcttgacgaaaatccctgaagatgggaaacccacgctgctggtgcaaacaccgccggtgatgccagtgtaggccccattgcccttggacgggatgtcactgactacaatggagtacctttctttcttcgatgtcagtcgattatgtttactatggaatatggatgttctcttatatgcttggttgtagctcctgacatgcagttgtagcttggctcgaggcgggcatcagcgacgacaaacatcctgctcaatttgttgtatgataaatactgcgaaacaatgctggtgtttcataagatgaccgtgcagctcatgaaaatccagagggtggagtcgagcgagacgacgtggccggcgcggcgccaggtcgtggcgtgcgccgctgtttgctggtcgtggcgtgaggtcaccaaggaggtggtgaagacgctcaaggagtgcggcaggatcaccttccccatgtcccttaagcagatctagaatctatggttgaagaaatagccaaagcattcaagacaaagataatgtttatatatgttgacactgctgaagaaaaccttgcaaaaaccattcctcactctttatggcattgaatcagaaaaggcctactggtccagttcttgaaagggtgggaatgtgtccaagaagacaaaggcatcgacccgccaattcttcgctacaaattaaaacagcactagggtgagatcagtgggcttgagagtagcatcatccttcaaacatgatgatgggtttctagctgatggtgtctctatagctcactggtatccttcaaaaagaaacttcctggaaaaaatgtcttttgaagctaatcttgctccatacagctaatcttcacatctttcaaagcatttgctagggccccttcggtgagcaatagaatacgacttgcgctaccaaagcgtccatagctgaatgcaaaccattgagatggtccaggttgaggacctccatgacacctatgttggtgtgggttgtgccgccccatcgtgaccgtcatcgattgggcctccgagtccaggagaagacctccgatgaagaaagagacatgctgcacatgcacgagggtacttgcagatagatgtcggctctatggacgaacactcgaccaagtcagatgaggagtatgagggcctagccatgcgagacatgatggctaccggtccaacaatgagcagcaagctgtgagttaaagatgaactcacctgtcctggagagcaacatccataggagtgaggcaaaatggcgggtaccaccacaacatggacccgttcctgaagatgtccaaggaggtggtagccgacaccataatgtcttgcgcgtcattgtgtcaccggccggcaacacgctgcgctggtaccggcgggtgttatgtttcttaggcgtatgtttctgtgctttgagctgtgctatagactggttgtgccaactactgattttaaaagaaaaaggtgagctgaaaatcattgttgaaaacaaacatgtaacggttcgttctcatcagttgtgccaactaccaatcatttcattgatcagaatctgtcgttgctcatgagaaccaaaagtaagacacttcttaataacattggatgcaaa

SEQ ID NO: 216624 - DNA, 2212 bp, Zea Mays
cgacgatgcactccacccacctccgccgcccgccatggcctccacccaactcacgtgcagcaggttccaactcccaagatctaggtcggacaccggcgcacaccacgtcagcgacgccaagcaccactcgttcgacctcggcaagcacctgcctctccgtcatcgcccccccccccccctccgctctctatcgcttgctctagccgatctatgtgcatggggctcaacgactggaacaaatcctcgtcgatgctcagggatggttttagggtagatggagcatcccctacatgtgtcttccatgggatggcccaactgcagatctgttcctgggatactacacaatgactacattgcatactcggagctgctcgacaggagcgtcgtcggcggtgctgtaaacatctcctagagtcctcgggcacaagaaggtcaggcggtgatgccaatgcagatcatccaatcagatccagaatgcctgccactgtatacttggagctgctcgacaggagcgccgttggcggcattgcaaacatctcctatagtcctcgggcacaacaaggtcagccaatgacgccaacgcagatcatcccatcggatccggtattcttgacgaaaatccctgaagatgggaaacccacgctgctggtgcaaacaccgccggtgatgccagtgtaggccccattgcccttggacgggatgtcactgactacaatggagtacctttctttcttcgatgtcagtcgattatgtttactatggaatatggatgttctcttatatgcttggttgtagctcctgacatgcagttgtagcttggctcgaggcgggcatcagcgacgacaaacatcctgctcaatttgttgtatgataaatactgcgaaacaatgctggtgtttcataagatgaccgtgcagctcatgaaaatccagagggtggagtcgagcgagacgacgtggccggcgcggcgccaggtcgtggcgtgcgccgctgtttgctggtcgtggcgtgaggtcaccaaggaggtggtgaagacgctcaaggagtgcggcaggatcaccttccccatgtcccttaagcagaggcttatgattttgaagatctagaatctatggttgaagaaatagccaaagcattcaagacaaagataatgtttatatatgttgacactgctgaagaaaaccttgcaaaaaccattcctcactctttatggcattgaatcagaaaaggcctactggtccagttcttgaaagggtgggaatgtgtccaagaagacaaaggcatcgacccgccaattcttcgctacaaattaaaacagcactagggtgagatcagtgggcttgagagtagcatcatccttcaaacatgatgatgggtttctagctgatggtgtctctatagctcactggtatccttcaaaaagaaacttcctggaaaaaatgtcttttgaagctaatcttgctccatacagctaatcttcacatctttcaaagcatttgctagggccccttcggtgagcaatagaatacgacttgcgctaccaaagcgtccataggttgaggacctccatgacacctatgttggtgtgggttgtgccgccccatcgtgaccgtcatcgattgggcctccgagtccaggagaagacctccgatgaagaaagagacatgctgcacatgcacgagggtacttgcagatagatgtcggctctatggacgaacactcgaccaagtcagatgaggagtatgagggcctagccatgcgagacatgatggctaccggtccaacaatgagcagcaagctgtgagttaaagatgaactcacctgtcctggagagcaacatccataggagtgaggcaaaatggcgggtaccaccacaacatggacccgttcctgaagatgtccaaggaggtggtagccgacaccataatgtcttgcgcgtcattgtgtcaccggccggcaacacgctgcgctggtaccggcgggtgttatgtttcttaggcgtatgtttctgtgctttgagctgtgctatagactggttgtgccaactactgattttaaaagaaaaaggtgagctgaaaatcattgttgaaaacaaacatgtaacggttcgttctcatcagttgtgccaactaccaatcatttcattgatcagaatctgtcgttgctcatgagaaccaaaagtaagacacttcttaataacattggatgcaaa

SEQ ID NO: 216625 - DNA, 1060 bp, Zea Mays
cgacgatgcactccacccacctccgccgcccgccatggcctccacccaactcacgtgcagcaggttccaactcccaagatctagggtccagttcttgaaagggtgggaatgtgtccaagaagacaaaggcatcgacccgccaattcttcgctacaaattaaaacagcactagggtgagatcagtgggcttgagagtagcatcatccttcaaacatgatgatgggtttctagctgatggtgtctctatagctcactggtatccttcaaaaagaaacttcctggaaaaaatgtcttttgaagctaatcttgctccatacagctaatcttcacatctttcaaagcatttgctagggccccttcggtgagcaatagaatacgacttgcgctaccaaagcgtccataggttgaggacctccatgacacctatgttggtgtgggttgtgccgccccatcgtgaccgtcatcgattgggcctccgagtccaggagaagacctccgatgaagaaagagacatgctgcacatgcacgagggtacttgcagatagatgtcggctctatggacgaacactcgaccaagtcagatgaggagtatgagggcctagccatgcgagacatgatggctaccggtccaacaatgagcagcaagctgtgagttaaagatgaactcacctgtcctggagagcaacatccataggagtgaggcaaaatggcgggtaccaccacaacatggacccgttcctgaagatgtccaaggaggtggtagccgacaccataatgtcttgcgcgtcattgtgtcaccggccggcaacacgctgcgctggtaccggcgggtgttatgtttcttaggcgtatgtttctgtgctttgagctgtgctatagactggttgtgccaactactgattttaaaagaaaaaggtgagctgaaaatcattgttgaaaacaaacatgtaacggttcgttctcatcagttgtgccaactaccaatcatttcattgatcagaatctgtcgttgctcatgagaaccaaaagtaagacacttcttaataacattggatgcaaa

SEQ ID NO: 216626 - DNA, 2119 bp, Zea Mays
cgacgatgcactccacccacctccgccgcccgccatggcctccacccaactcacgtgcagcaggttccaactcccaagatctaggtcggacaccggcgcacaccacgtcagcgacgccaagcaccactcgttcgacctcggcaagcacctgcctctccgtcatcgcccccccccccccctccgctctctatcgcttgctctagccgatctatgtgcatggggctcaacgactggaacaaatcctcgtcgatgctcagggatggttttagggtagatggagcatcccctacatgtgtcttccatgggatggcccaactgcagatctgttcctgggatactacacaatgactacattgcatactcggagctgctcgacaggagcgtcgtcggcggtgctgtaaacatctcctagagtcctcgggcacaagaaggtcaggcggtgatgccaatgcagatcatccaatcagatccagaatgcctgccactgtatacttggagctgctcgacaggagcgccgttggcggcattgcaaacatctcctatagtcctcgggcacaacaaggtcagccaatgacgccaacgcagatcatcccatcggatccggtattcttgacgaaaatccctgaagatgggaaacccacgctgctggtgcaaacaccgccggtgatgccagtctcctgacatgcagttgtagcttggctcgaggcgggcatcagcgacgacaaacatcctgctcaatttgttgtatgataaatactgcgaaacaatgctggtgtttcataagatgaccgtgcagctcatgaaaatccagagggtggagtcgagcgagacgacgtggccggcgcggcgccaggtcgtggcgtgcgccgctgtttgctggtcgtggcgtgaggtcaccaaggaggtggtgaagacgctcaaggagtgcggcaggatcaccttccccatgtcccttaagcagaggcttatgattttgaagatctagaatctatggttgaagaaatagccaaagcattcaagacaaagataatgtttatatatgttgacactgctgaagaaaaccttgcaaaaaccattcctcactctttatggcattgaatcagaaaaggcctactggtccagttcttgaaagggtgggaatgtgtccaagaagacaaaggcatcgacccgccaattcttcgctacaaattaaaacagcactagggtgagatcagtgggcttgagagtagcatcatccttcaaacatgatgatgggtttctagctgatggtgtctctatagctcactggtatccttcaaaaagaaacttcctggaaaaaatgtcttttgaagctaatcttgctccatacagctaatcttcacatctttcaaagcatttgctagggccccttcggtgagcaatagaatacgacttgcgctaccaaagcgtccatagctgaatgcaaaccattgagatggtccaggttgaggacctccatgacacctatgttggtgtgggttgtgccgccccatcgtgaccgtcatcgattgggcctccgagtccaggagaagacctccgatgaagaaagagacatgctgcacatgcacgagggtacttgcagatagatgtcggctctatggacgaacactcgaccaagtcagatgaggagtatgagggcctagccatgcgagacatgatggctaccggtccaacaatgagcagcaagctgtgagttaaagatgaactcacctgtcctggagagcaacatccataggagtgaggcaaaatggcgggtaccaccacaacatggacccgttcctgaagatgtccaaggaggtggtagccgacaccataatgtcttgcgcgtcattgtgtcaccggccggcaacacgctgcgctggtaccggcgggtgttatgtttcttaggcgtatgtttctgtgctttgagctgtgctatagactggttgtgccaactactgattttaaaagaaaaaggtgagctgaaaatcattgttgaaaacaaacatgtaacggttcgttctcatcagttgtgccaactaccaatcatttcattgatcagaatctgtcgttgctcatgagaaccaaaagtaagacacttcttaataacattggatgcaaa

SEQ ID NO: 216627 - DNA, 2158 bp, Zea Mays
cgctaccgacgatgcactccacccacctccgccgcccgccatggcctccacccaactcacgtgcagcaggttccaactcccaagatctaggtcggacaccggcgcacaccacgtcagcgacgccaagcaccactcgttcgacctcggcaagcacctgcctctccgtcatcgcccccccccccccctccgctctctatcgcttgctctagccgatctatgtgcatggggctcaacgactggaacaaatcctcgtcgatgctcagggatggttttagggtagatggagcatcccctacatgtgtcttccatgggatggcccaactgcagatctgttcctgggatactacacaatgactacattgcatactcggagctgctcgacaggagcgtcgtcggcggtgctgtaaacatctcctagagtcctcgggcacaagaaggtcaggcggtgatgccaatgcagatcatccaatcagatccagaatgcctgccactgtatacttggagctgctcgacaggagcgccgttggcggcattgcaaacatctcctatagtcctcgggcacaacaaggtcagccaatgacgccaacgcagatcatcccatcggatccggtattcttgacgaaaatccctgaagatgggaaacccacgctgctggtgcaaacaccgccggtgatgccagtgtaggccccattgcccttggacgggatgtcactgactacaatggactcctgacatgcagttgtagcttggctcgaggcgggcatcagcgacgacaaacatcctgctcaatttgttgtatgataaatactgcgaaacaatgctggtgtttcataagatgaccgtgcagctcatgaaaatccagagggtggagtcgagcgagacgacgtggccggcgcggcgccaggtcgtggcgtgcgccgctgtttgctggtcgtggcgtgaggtcaccaaggaggtggtgaagacgctcaaggagtgcggcaggatcaccttccccatgtcccttaagcaggtcttcacctttgcagaggcttatgattttgaagatctagaatctatggttgaagaaatagccaaagcattcaagacaaagataatgtttatatatgttgacactgctgaagaaaaccttgcaaaaaccattcctcactctttatggcattgaatcagaaaaggcctactggtccagttcttgaaagggtgggaatgtgtccaagaagacaaaggcatcgacccgccaattcttcgctacaaattaaaacagcactagggtgagatcagtgggcttgagagtagcatcatccttcaaacatgatgatgggtttctagctgatggtgtctctatagctcactggtatccttcaaaaagaaacttcctggaaaaaatgtcttttgaagctaatcttgctccatacagctaatcttcacatctttcaaagcatttgctagggccccttcggtgagcaatagaatacgacttgcgctaccaaagcgtccataggttgaggacctccatgacacctatgttggtgtgggttgtgccgccccatcgtgaccgtcatcgattgggcctccgagtccaggagaagacctccgatgaagaaagagacatgctgcacatgcacgagggtacttgcagatagatgtcggctctatggacgaacactcgaccaagtcagatgaggagtatgagggcctagccatgcgagacatgatggctaccggtccaacaatgagcagcaagctgtgagttaaagatgaactcacctgtcctggagagcaacatccataggagtgaggcaaaatggcgggtaccaccacaacatggacccgttcctgaagatgtccaaggaggtggtagccgacaccataatgtcttgcgcgtcattgtgtcaccggccggcaacacgctgcgctggtaccggcgggtgttatgtttcttaggcgtatgtttctgtgctttgagctgtgctatagactggttgtgccaactactgattttaaaagaaaaaggtgagctgaaaatcattgttgaaaacaaacatgtaacggttcgttctcatcagttgtgccaactaccaatcatttcattgatcagaatctgtcgttgctcatgagaaccaaaagtaagacacttcttaataacattggatgcaaa

SEQ ID NO: 216628 - DNA, 2929 bp, Zea Mays
gttcgctaccgacgatgcactccacccacctccgccgcccgccatggcctccacccaactcacgtgcagcaggttccaactcccaagatctaggtcggacaccggcgcacaccacgtcagcgacgccaagcaccactcgttcgacctcggcaagcacctgcctctccgtcatcgcccccccccccccctccgctctctatcgcttgctctagccgatctatgtgcatggggctcaacgactggaacaaatcctcgtcgatgctcagggatggttttagggtagatggagcatcccctacatgtgtcttccatgggatggcccaactgcagatctgttcctgggatactacacaatgactacattgcatactcggagctgctcgacaggagcgtcgtcggcggtgctgtaaacatctcctagagtcctcgggcacaagaaggtcaggcggtgatgccaatgcagatcatccaatcagatccagaatgcctgccactgtatacttggagctgctcgacaggagcgccgttggcggcattgcaaacatctcctatagtcctcgggcacaacaaggtcagccaatgacgccaacgcagatcatcccatcggatccggtattcttgacgaaaatccctgaagatgggaaacccacgctgctggtgcaaacaccgccggtgatgccagtgtaggccccattgcccttggacgggatgtcactgactacaatggactcctgacatgcagttgtagcttggctcgaggcgggcatcagcgacgacaaacatcctgctcaatttgttgtatgataaatactgcgaaacaatgctggtgtttcataagatgaccgtgcagctcatgaaaatccagagggtggagtcgagcgagacgacgtggccggcgcggcgccaggtcgtggcgtgcgccgctgtttgctggtcgtggcgtgaggtcaccaaggaggtggtgaagacgctcaaggagtgcggcaggatcaccttccccatgtcccttaagcaggttggcactctctgccttttctctactttgatgatcaatcacatgtcttcacctttgcagaggcttatgattttgaagatctagaatctatggttgaagaaatagccaaagcattcaagacaaagataatgtttatatatgttgacactgctgaagaaaaccttgcaaaaaccattcctcactctttatggcattgaatcagaaaaggcctactggtccagttcttgaaagggtgggaatgtgtccaagaagacaaaggcatcgacccgccaattcttcgctacaaattaaaacagcactagggtgagatcagtgggcttgagagtagcatcatccttcaaacatgatgatgggtttctagctgatggtgtctctatagctcactggtatccttcaaaaagaaagtatggtgttgttttataagctctcatgtttatgactaaggttgagatttgtgaagattcagaaataattagctacatgcccttgcgtagcttacaatgcacaattagctagcttcattgttttaacttctctgcaatatgaacatgcaaattttaaccacctcatttgtttttaataagctgaaacaaattgttggttattattcccccttgtttggtcgccctcatttaagttgtggcttagatattcctactcagagagttggtacatgttttttatgcttatctttttcatttatcaaccatatgtgtgtttgatgttttttctatgcttagacctaaacaaaacattcttggtagccacatctaaaacattcatttcaagttctacattaattcatttatattccatcaacttttaaaatacaacacttagtttgtttgaaaagaaatagtttttgtgaaatcttcaaacaaggcttgacaatgatttattcatcgacaatgcatctgagccctctttgcattgtaagctcctacaatgaagttatacaaaagtcttatctattcattttggtttaagctggttgagcactttttacaatatctggtcaacacatctaggatgactcttcacatctgtcaattcaaattctcttcaaaacagctaatattgctccatattgtcttttgaagcttcctggaaaaaatgtcttttgaagctaatcttgctccatacagctaatcttcacatctttcaaagcatttgctagggccccttcggtgagcaatagaatacgacttgcgctaccaaagcgtccatagctgaatgcaaaccattgagatggtccaggttgaggacctccatgacacctatgttggtgtgggttgtgccgccccatcgtgaccgtcatcgattgggcctccgagtccaggagaagacctccgatgaagaaagagacatgctgcacatgcacgagggtacttgcagatagatgtcggctctatggacgaacactcgaccaagtcagatgaggagtatgagggcctagccatgcgagacatgatggctaccggtccaacaatgagcagcaagctgtgagttaaagatgaactcacctgtcctggagagcaacatccataggagtgaggcaaaatggcgggtaccaccacaacatggacccgttcctgaagatgtccaaggaggtggtagccgacaccataatgtcttgcgcgtcattgtgtcaccggccggcaacacgctgcgctggtaccggcgggtgttatgtttcttaggcgtatgtttctgtgctttgagctgtgctatagactggttgtgccaactactgattttaaaagaaaaaggtgagctgaaaatcattgttgaaaacaaacatgtaacggttcgttctcatcagttgtgccaactaccaatcatttcattgatcagaatctgtcgttgctcatgagaaccaaaagtaagacacttcttaataacattggatgcaaa

SEQ ID NO: 216629 - DNA, 2192 bp, Zea Mays
cgcgttcgctaccgacgatgcactccacccacctccgccgcccgccatggcctccacccaactcacgtgcagcaggttccaactcccaagatctaggtcggacaccggcgcacaccacgtcagcgacgccaagcaccactcgttcgacctcggcaagcacctgcctctccgtcatcgcccccccccccccctccgctctctatcgcttgctctagccgatctatgtgcatggggctcaacgactggaacaaatcctcgtcgatgctcagggatggttttagggtagatggagcatcccctacatgtgtcttccatgggatggcccaactgcagatctgttcctgggatactacacaatgactacattgcatactcggagctgctcgacaggagcgtcgtcggcggtgctgtaaacatctcctagagtcctcgggcacaagaaggtcaggcggtgatgccaatgcagatcatccaatcagatccagaatgcctgccactgtatacttggagctgctcgacaggagcgccgttggcggcattgcaaacatctcctatagtcctcgggcacaacaaggtcagccaatgacgccaacgcagatcatcccatcggatccggtattcttgacgaaaatccctgaagatgggaaacccacgctgctggtgcaaacaccgccggtgatgccagtgtaggccccattgcccttggacgggatgtcactgactacaatggactcctgacatgcagttgtagcttggctcgaggcgggcatcagcgacgacaaacatcctgctcaatttgttgtatgataaatactgcgaaacaatgctggtgtttcataagatgaccgtgcagctcatgaaaatccagagggtggagtcgagcgagacgacgtggccggcgcggcgccaggtcgtggcgtgcgccgctgtttgctggtcgtggcgtgaggtcaccaaggaggtggtgaagacgctcaaggagtgcggcaggatcaccttccccatgtcccttaagcaggtcttcacctttgcagaggcttatgattttgaagatctagaatctatggttgaagaaatagccaaagcattcaagacaaagataatgtttatatatgttgacactgctgaagaaaaccttgcaaaaaccattcctcactctttatggcattgaatcagaaaaggcctactggtccagttcttgaaagggtgggaatgtgtccaagaagacaaaggcatcgacccgccaattcttcgctacaaattaaaacagcactagggtgagatcagtgggcttgagagtagcatcatccttcaaacatgatgatgggtttctagctgatggtgtctctatagctcactggtatccttcaaaaagaaacttcctggaaaaaatgtcttttgaagctaatcttgctccatacagctaatcttcacatctttcaaagcatttgctagggccccttcggtgagcaatagaatacgacttgcgctaccaaagcgtccatagctgaatgcaaaccattgagatggtccaggttgaggacctccatgacacctatgttggtgtgggttgtgccgccccatcgtgaccgtcatcgattgggcctccgagtccaggagaagacctccgatgaagaaagagacatgctgcacatgcacgagggtacttgcagatagatgtcggctctatggacgaacactcgaccaagtcagatgaggagtatgagggcctagccatgcgagacatgatggctaccggtccaacaatgagcagcaagctgtgagttaaagatgaactcacctgtcctggagagcaacatccataggagtgaggcaaaatggcgggtaccaccacaacatggacccgttcctgaagatgtccaaggaggtggtagccgacaccataatgtcttgcgcgtcattgtgtcaccggccggcaacacgctgcgctggtaccggcgggtgttatgtttcttaggcgtatgtttctgtgctttgagctgtgctatagactggttgtgccaactactgattttaaaagaaaaaggtgagctgaaaatcattgttgaaaacaaacatgtaacggttcgttctcatcagttgtgccaactaccaatcatttcattgatcagaatctgtcgttgctcatgagaaccaaaagtaagacacttcttaataacattggatgcaaa

SEQ ID NO: 216630 - DNA, 2131 bp, Zea Mays
cgcgttcgctaccgacgatgcactccacccacctccgccgcccgccatggcctccacccaactcacgtgcagcaggttccaactcccaagatctaggtcggacaccggcgcacaccacgtcagcgacgccaagcaccactcgttcgacctcggcaagcacctgcctctccgtcatcgcccccccccccccctccgctctctatcgcttgctctagccgatctatgtgcatggggctcaacgactggaacaaatcctcgtcgatgctcagggatggttttagggtagatggagcatcccctacatgtgtcttccatgggatggcccaactgcagatctgttcctgggatactacacaatgactacattgcatactcggagctgctcgacaggagcgtcgtcggcggtgctgtaaacatctcctagagtcctcgggcacaagaaggtcaggcggtgatgccaatgcagatcatccaatcagatccagaatgcctgccactgtatacttggagctgctcgacaggagcgccgttggcggcattgcaaacatctcctatagtcctcgggcacaacaaggtcagccaatgacgccaacgcagatcatcccatcggatccggtattcttgacgaaaatccctgaagatgggaaacccacgctgctggtgcaaacaccgccggtgatgccagtgtaggccccattgcccttggacgggatgtcactgactacaatggactcctgacatgcagttgtagcttggctcgaggcgggcatcagcgacgacaaacatcctgctcaatttgttgtatgataaatactgcgaaacaatgctggtgtttcataagatgaccgtgcagctcatgaaaatccagagggtggagtcgagcgagacgacgtggccggcgcggcgccaggtcgtggcgtgcgccgctgtttgctggtcgtggcgtgaggtcaccaaggaggtggtgaagacgctcaaggagtgcggcaggatcaccttccccatgtcccttaagcagaggcttatgattttgaagatctagaatctatggttgaagaaatagccaaagcattcaagacaaagataatgtttatatatgttgacactgctgaagaaaaccttgcaaaaaccattcctcactctttatggcattgaatcagaaaaggcctactggtccagttcttgaaagggtgggaatgtgtccaagaagacaaaggcatcgacccgccaattcttcgctacaaattaaaacagcactagggtgagatcagtgggcttgagagtagcatcatccttcaaacatgatgatgggtttctagctgatggtgtctctatagctcactggtatccttcaaaaagaaactaatcttcacatctttcaaagcatttgctagggccccttcggtgagcaatagaatacgacttgcgctaccaaagcgtccatagctgaatgcaaaccattgagatggtccaggttgaggacctccatgacacctatgttggtgtgggttgtgccgccccatcgtgaccgtcatcgattgggcctccgagtccaggagaagacctccgatgaagaaagagacatgctgcacatgcacgagggtacttgcagatagatgtcggctctatggacgaacactcgaccaagtcagatgaggagtatgagggcctagccatgcgagacatgatggctaccggtccaacaatgagcagcaagctgtgagttaaagatgaactcacctgtcctggagagcaacatccataggagtgaggcaaaatggcgggtaccaccacaacatggacccgttcctgaagatgtccaaggaggtggtagccgacaccataatgtcttgcgcgtcattgtgtcaccggccggcaacacgctgcgctggtaccggcgggtgttatgtttcttaggcgtatgtttctgtgctttgagctgtgctatagactggttgtgccaactactgattttaaaagaaaaaggtgagctgaaaatcattgttgaaaacaaacatgtaacggttcgttctcatcagttgtgccaactaccaatcatttcattgatcagaatctgtcgttgctcatgagaaccaaaagtaagacacttcttaataacattggatgcaaa

SEQ ID NO: 216631 - DNA, 2163 bp, Zea Mays
cgcgttcgctaccgacgatgcactccacccacctccgccgcccgccatggcctccacccaactcacgtgcagcaggttccaactcccaagatctaggtcggacaccggcgcacaccacgtcagcgacgccaagcaccactcgttcgacctcggcaagcacctgcctctccgtcatcgcccccccccccccctccgctctctatcgcttgctctagccgatctatgtgcatggggctcaacgactggaacaaatcctcgtcgatgctcagggatggttttagggtagatggagcatcccctacatgtgtcttccatgggatggcccaactgcagatctgttcctgggatactacacaatgactacattgcatactcggagctgctcgacaggagcgtcgtcggcggtgctgtaaacatctcctagagtcctcgggcacaagaaggtcaggcggtgatgccaatgcagatcatccaatcagatccagaatgcctgccactgtatacttggagctgctcgacaggagcgccgttggcggcattgcaaacatctcctatagtcctcgggcacaacaaggtcagccaatgacgccaacgcagatcatcccatcggatccggtattcttgacgaaaatccctgaagatgggaaacccacgctgctggtgcaaacaccgccggtgatgccagtctcctgacatgcagttgtagcttggctcgaggcgggcatcagcgacgacaaacatcctgctcaatttgttgtatgataaatactgcgaaacaatgctggtgtttcataagatgaccgtgcagctcatgaaaatccagagggtggagtcgagcgagacgacgtggccggcgcggcgccaggtcgtggcgtgcgccgctgtttgctggtcgtggcgtgaggtcaccaaggaggtggtgaagacgctcaaggagtgcggcaggatcaccttccccatgtcccttaagcaggttggcactctctgccttttctctactttgatgatcaatcacatgtcttcacctttgcagaggcttatgattttgaagatctagaatctatggttgaagaaatagccaaagcattcaagacaaagataatgtttatatatgttgacactgctgaagaaaaccttgcaaaaaccattcctcactctttatggcattgaatcagaaaaggcctactggtccagttcttgaaagggtgggaatgtgtccaagaagacaaaggcatcgacccgccaattcttcgctacaaattaaaacagcactagggtgagatcagtgggcttgagagtagcatcatccttcaaacatgatgatgggtttctagctgatggtgtctctatagctcactggtatccttcaaaaagaaacttcctggaaaaaatgtcttttgaagctaatcttgctccatacagctaatcttcacatctttcaaagcatttgctagggccccttcggtgagcaatagaatacgacttgcgctaccaaagcgtccataggttgaggacctccatgacacctatgttggtgtgggttgtgccgccccatcgtgaccgtcatcgattgggcctccgagtccaggagaagacctccgatgaagaaagagacatgctgcacatgcacgagggtacttgcagatagatgtcggctctatggacgaacactcgaccaagtcagatgaggagtatgagggcctagccatgcgagacatgatggctaccggtccaacaatgagcagcaagctgtgagttaaagatgaactcacctgtcctggagagcaacatccataggagtgaggcaaaatggcgggtaccaccacaacatggacccgttcctgaagatgtccaaggaggtggtagccgacaccataatgtcttgcgcgtcattgtgtcaccggccggcaacacgctgcgctggtaccggcgggtgttatgtttcttaggcgtatgtttctgtgctttgagctgtgctatagactggttgtgccaactactgattttaaaagaaaaaggtgagctgaaaatcattgttgaaaacaaacatgtaacggttcgttctcatcagttgtgccaactaccaatcatttcattgatcagaatctgtcgttgctcatgagaaccaaaagtaagacacttcttaataacattggatgcaaa

SEQ ID NO: 216632 - DNA, 2180 bp, Zea Mays
tgccgcgttcgctaccgacgatgcactccacccacctccgccgcccgccatggcctccacccaactcacgtgcagcaggttccaactcccaagatctaggtcggacaccggcgcacaccacgtcagcgacgccaagcaccactcgttcgacctcggcaagcacctgcctctccgtcatcgcccccccccccccctccgctctctatcgcttgctctagccgatctatgtgcatggggctcaacgactggaacaaatcctcgtcgatgctcagggatggttttagggtagatggagcatcccctacatgtgtcttccatgggatggcccaactgcagatctgttcctgggatactacacaatgactacattgcatactcggagctgctcgacaggagcgtcgtcggcggtgctgtaaacatctcctagagtcctcgggcacaagaaggtcaggcggtgatgccaatgcagatcatccaatcagatccagaatgcctgccactgtatacttggagctgctcgacaggagcgccgttggcggcattgcaaacatctcctatagtcctcgggcacaacaaggtcagccaatgacgccaacgcagatcatcccatcggatccggtattcttgacgaaaatccctgaagatgggaaacccacgctgctggtgcaaacaccgccggtgatgccagtttgtagcttggctcgaggcgggcatcagcgacgacaaacatcctgctcaatttgttgtatgataaatactgcgaaacaatgctggtgtttcataagatgaccgtgcagctcatgaaaatccagagggtggagtcgagcgagacgacgtggccggcgcggcgccaggtcgtggcgtgcgccgctgtttgctggtcgtggcgtgaggtcaccaaggaggtggtgaagacgctcaaggagtgcggcaggatcaccttccccatgtcccttaagcaggttggcactctctgccttttctctactttgatgatcaatcacatgtcttcacctttgcagaggcttatgattttgaagatctagaatctatggttgaagaaatagccaaagcattcaagacaaagataatgtttatatatgttgacactgctgaagaaaaccttgcaaaaaccattcctcactctttatggcattgaatcagaaaaggcctactggtccagttcttgaaagggtgggaatgtgtccaagaagacaaaggcatcgacccgccaattcttcgctacaaattaaaacagcactagggtgagatcagtgggcttgagagtagcatcatccttcaaacatgatgatgggtttctagctgatggtgtctctatagctcactggtatccttcaaaaagaaacttcctggaaaaaatgtcttttgaagctaatcttgctccatacagctaatcttcacatctttcaaagcatttgctagggccccttcggtgagcaatagaatacgacttgcgctaccaaagcgtccatagctgaatgcaaaccattgagatggtccaggttgaggacctccatgacacctatgttggtgtgggttgtgccgccccatcgtgaccgtcatcgattgggcctccgagtccaggagaagacctccgatgaagaaagagacatgctgcacatgcacgagggtacttgcagatagatgtcggctctatggacgaacactcgaccaagtcagatgaggagtatgagggcctagccatgcgagacatgatggctaccggtccaacaatgagcagcaagctgtgagttaaagatgaactcacctgtcctggagagcaacatccataggagtgaggcaaaatggcgggtaccaccacaacatggacccgttcctgaagatgtccaaggaggtggtagccgacaccataatgtcttgcgcgtcattgtgtcaccggccggcaacacgctgcgctggtaccggcgggtgttatgtttcttaggcgtatgtttctgtgctttgagctgtgctatagactggttgtgccaactactgattttaaaagaaaaaggtgagctgaaaatcattgttgaaaacaaacatgtaacggttcgttctcatcagttgtgccaactaccaatcatttcattgatcagaatctgtcgttgctcatgagaaccaaaagtaagacacttcttaataacattggatgcaaa

SEQ ID NO: 216633 - DNA, 2913 bp, Zea Mays
ccagcctgccgcgttcgctaccgacgatgcactccacccacctccgccgcccgccatggcctccacccaactcacgtgcagcaggttccaactcccaagatctaggtcggacaccggcgcacaccacgtcagcgacgccaagcaccactcgttcgacctcggcaagcacctgcctctccgtcatcgcccccccccccccctccgctctctatcgcttgctctagccgatctatgtgcatggggctcaacgactggaacaaatcctcgtcgatgctcagggatggttttagggtagatggagcatcccctacatgtgtcttccatgggatggcccaactgcagatctgttcctgggatactacacaatgactacattgcatactcggagctgctcgacaggagcgtcgtcggcggtgctgtaaacatctcctagagtcctcgggcacaagaaggtcaggcggtgatgccaatgcagatcatccaatcagatccagaatgcctgccactgtatacttggagctgctcgacaggagcgccgttggcggcattgcaaacatctcctatagtcctcgggcacaacaaggtcagccaatgacgccaacgcagatcatcccatcggatccggtattcttgacgaaaatccctgaagatgggaaacccacgctgctggtgcaaacaccgccggtgatgccagtgtaggccccattgcccttggacgggatgtcactgactacaatggactcctgacatgcagttgtagcttggctcgaggcgggcatcagcgacgacaaacatcctgctcaatttgttgtatgataaatactgcgaaacaatgctggtgtttcataagatgaccgtgcagctcatgaaaatccagagggtggagtcgagcgagacgacgtggccggcgcggcgccaggtcgtggcgtgcgccgctgtttgctggtcgtggcgtgaggtcaccaaggaggtggtgaagacgctcaaggagtgcggcaggatcaccttccccatgtcccttaagcaggttggcactctctgccttttctctactttgatgatcaatcacatgtcttcacctttgcagaggcttatgattttgaagatctagaatctatggttgaagaaatagccaaagcattcaagacaaagataatgtttatatatgttgacactgctgaagaaaaccttgcaaaaaccattcctcactctttatggcattgaatcagaaaaggcctactggtccagttcttgaaagggtgggaatgtgtccaagaagacaaaggcatcgacccgccaattcttcgctacaaattaaaacagcactagggtgagatcagtgggcttgagagtagcatcatccttcaaacatgatgatgggtttctagctgatggtgtctctatagctcactggtatccttcaaaaagaaagtatggtgttgttttataagctctcatgtttatgactaaggttgagatttgtgaagattcagaaataattagctacatgcccttgcgtagcttacaatgcacaattagctagcttcattgttttaacttctctgcaatatgaacatgcaaattttaaccacctcatttgtttttaataagctgaaacaaattgttggttattattcccccttgtttggtcgccctcatttaagttgtggcttagatattcctactcagagagttggtacatgttttttatgcttatctttttcatttatcaaccatatgtgtgtttgatgttttttctatgcttagacctaaacaaaacattcttggtagccacatctaaaacattcatttcaagttctacattaattcatttatattccatcaacttttaaaatacaacacttagtttgtttgaaaagaaatagtttttgtgaaatcttcaaacaaggcttgacaatgatttattcatcgacaatgcatctgagccctctttgcattgtaagctcctacaatgaagttatacaaaagtcttatctattcattttggtttaagctggttgagcactttttacaatatctggtcaacacatctaggatgactcttcacatctgtcaattcaaattctcttcaaaacagctaatattgctccatattgtcttttgaagcttcctggaaaaaatgtcttttgaagctaatcttgctccatacagctaatcttcacatctttcaaagcatttgctagggccccttcggtgagcaatagaatacgacttgcgctaccaaagcgtccataggttgaggacctccatgacacctatgttggtgtgggttgtgccgccccatcgtgaccgtcatcgattgggcctccgagtccaggagaagacctccgatgaagaaagagacatgctgcacatgcacgagggtacttgcagatagatgtcggctctatggacgaacactcgaccaagtcagatgaggagtatgagggcctagccatgcgagacatgatggctaccggtccaacaatgagcagcaagctgtgagttaaagatgaactcacctgtcctggagagcaacatccataggagtgaggcaaaatggcgggtaccaccacaacatggacccgttcctgaagatgtccaaggaggtggtagccgacaccataatgtcttgcgcgtcattgtgtcaccggccggcaacacgctgcgctggtaccggcgggtgttatgtttcttaggcgtatgtttctgtgctttgagctgtgctatagactggttgtgccaactactgattttaaaagaaaaaggtgagctgaaaatcattgttgaaaacaaacatgtaacggttcgttctcatcagttgtgccaactaccaatcatttcattgatcagaatctgtcgttgctcatgagaaccaaaagtaagacacttcttaataacattggatgcaaa

SEQ ID NO: 216634 - DNA, 2884 bp, Zea Mays
atccagcctgccgcgttcgctaccgacgatgcactccacccacctccgccgcccgccatggcctccacccaactcacgtgcagcaggttccaactcccaagatctaggtcggacaccggcgcacaccacgtcagcgacgccaagcaccactcgttcgacctcggcaagcacctgcctctccgtcatcgcccccccccccccctccgctctctatcgcttgctctagccgatctatgtgcatggggctcaacgactggaacaaatcctcgtcgatgctcagggatggttttagggtagatggagcatcccctacatgtgtcttccatgggatggcccaactgcagatctgttcctgggatactacacaatgactacattgcatactcggagctgctcgacaggagcgtcgtcggcggtgctgtaaacatctcctagagtcctcgggcacaagaaggtcaggcggtgatgccaatgcagatcatccaatcagatccagaatgcctgccactgtatacttggagctgctcgacaggagcgccgttggcggcattgcaaacatctcctatagtcctcgggcacaacaaggtcagccaatgacgccaacgcagatcatcccatcggatccggtattcttgacgaaaatccctgaagatgggaaacccacgctgctggtgcaaacaccgccggtgatgccagtttgtagcttggctcgaggcgggcatcagcgacgacaaacatcctgctcaatttgttgtatgataaatactgcgaaacaatgctggtgtttcataagatgaccgtgcagctcatgaaaatccagagggtggagtcgagcgagacgacgtggccggcgcggcgccaggtcgtggcgtgcgccgctgtttgctggtcgtggcgtgaggtcaccaaggaggtggtgaagacgctcaaggagtgcggcaggatcaccttccccatgtcccttaagcaggttggcactctctgccttttctctactttgatgatcaatcacatgtcttcacctttgcagaggcttatgattttgaagatctagaatctatggttgaagaaatagccaaagcattcaagacaaagataatgtttatatatgttgacactgctgaagaaaaccttgcaaaaaccattcctcactctttatggcattgaatcagaaaaggcctactggtccagttcttgaaagggtgggaatgtgtccaagaagacaaaggcatcgacccgccaattcttcgctacaaattaaaacagcactagggtgagatcagtgggcttgagagtagcatcatccttcaaacatgatgatgggtttctagctgatggtgtctctatagctcactggtatccttcaaaaagaaagtatggtgttgttttataagctctcatgtttatgactaaggttgagatttgtgaagattcagaaataattagctacatgcccttgcgtagcttacaatgcacaattagctagcttcattgttttaacttctctgcaatatgaacatgcaaattttaaccacctcatttgtttttaataagctgaaacaaattgttggttattattcccccttgtttggtcgccctcatttaagttgtggcttagatattcctactcagagagttggtacatgttttttatgcttatctttttcatttatcaaccatatgtgtgtttgatgttttttctatgcttagacctaaacaaaacattcttggtagccacatctaaaacattcatttcaagttctacattaattcatttatattccatcaacttttaaaatacaacacttagtttgtttgaaaagaaatagtttttgtgaaatcttcaaacaaggcttgacaatgatttattcatcgacaatgcatctgagccctctttgcattgtaagctcctacaatgaagttatacaaaagtcttatctattcattttggtttaagctggttgagcactttttacaatatctggtcaacacatctaggatgactcttcacatctgtcaattcaaattctcttcaaaacagctaatattgctccatattgtcttttgaagcttcctggaaaaaatgtcttttgaagctaatcttgctccatacagctaatcttcacatctttcaaagcatttgctagggccccttcggtgagcaatagaatacgacttgcgctaccaaagcgtccatagctgaatgcaaaccattgagatggtccaggttgaggacctccatgacacctatgttggtgtgggttgtgccgccccatcgtgaccgtcatcgattgggcctccgagtccaggagaagacctccgatgaagaaagagacatgctgcacatgcacgagggtacttgcagatagatgtcggctctatggacgaacactcgaccaagtcagatgaggagtatgagggcctagccatgcgagacatgatggctaccggtccaacaatgagcagcaagctgtgagttaaagatgaactcacctgtcctggagagcaacatccataggagtgaggcaaaatggcgggtaccaccacaacatggacccgttcctgaagatgtccaaggaggtggtagccgacaccataatgtcttgcgcgtcattgtgtcaccggccggcaacacgctgcgctggtaccggcgggtgttatgtttcttaggcgtatgtttctgtgctttgagctgtgctatagactggttgtgccaactactgattttaaaagaaaaaggtgagctgaaaatcattgttgaaaacaaacatgtaacggttcgttctcatcagttgtgccaactaccaatcatttcattgatcagaatctgtcgttgctcatgagaaccaaaagtaagacacttcttaataacattggatgcaaa

SEQ ID NO: 216635 - DNA, 1421 bp, Zea Mays
gttttttttataaagattattgaactggtggtggaagagtttaagtgctaaatgtgacatacagttggattacgatctcatggattagatggtttgcttgcacgcttgcacagaaggactacttgcatagccgtcgttgccatgagtaaattgctggaggggatagtctaatgtgctaactgagccggctaacactcctttatgcattactgaggcctcgctagggtttaagcatttaggtaaccaaataaactcaatatgtctaggatggtagccagccagccaaccaaagatgccgaaagttcctctgttgtgaataatatagggctcagagcagagagcagagagcagccacaagttgggcggatagcacacacttgttcacgggatcgaccggatcagatgccgtcgtcctcgtccgcctccggcgtaggcctagggcggcggcggcctcccattgcagcaggggggcctagaagaagcgatagcagatggtggtgggcgagattaatggagaagaactatagtgatgctgagagttatcgcgcaaggaggccggaagagaggctgatcaacgattacctgctgcttgagtccgccgcacggaaggtcgccaccggcctcgcgtatctgttgctgacgtggtccaccgttgtcctccttggtggtttcgtctccgcgctcaagctcatcgacttttggtgtctggctgccattagtacgtcatttgcagtcaagttcttcagctgatactacggatcccatgcgaatcaaacaagctggagacggctgacgaggagcagcaagaagaagaggaattcctggtcgccttgctatcacttgccgtggtgatatgtgacggcatggtcgacgaacatggcttcagctgtgctgcgccccctcaagacatggtgccgctggtgagaaagcttaaggacataatacaggctaacaacacaaccacggtcgaatgcctgcggacagtgaagcttacctgcaagctggtcgtttcaatggcacagctcaagcccatgtgcatcaaagatttcacagagcacaatttcatggatgtactcttggagtctttgaagacgttgtcagatctcgataactgcctcgtattatttgaggtcgataatcattatcaggtgacaaagactgataagccactggtttcacttgtgaagaaagctcatcaactcttctaaaaagcaacgagaacaacccggtaatgtgtatgtgtacgcgtgcatgtgtgcgtgcacgcgcgcattgtcaagtctgcatatcaatccaatagtgcgctgcgtgaaatgatgtgaaactcagcctgataagataaggcgcaaaacgccattgcttacggtattcaaccatccactgtatgtttcctgtatgaagtgtgcatcccaccccccccc

SEQ ID NO: 216636 - DNA, 3603 bp, Zea Mays
tccggtcttcctttcccaactcggtcgacgcgttcgccacggctgcgcagtcctcctcctcgcctccgatcccctcccttcgacgatgcgagcacacccgctcatcctcttcgtacctgcaccgccacctcatcctcttcctcgccgcgccgacacccaccgcgctctctccctcccgcggcgacgcccttcgccaacgagaaccgcacgccgtcgtctcccacgggcactgtcgcacgctgggccacgctgcagtcggtggcgccgccacaccttcttcctccatgtgccgtcgccgccctattcttcttcgagatgcagccgctagcgctgccctcctcccagctccccttcatggccgcgtgcagggactatgtgccagtgttagtttttggtaccagtctacaggtctttcatttctacattcaaaggtgagaatcaatcatgttcggctccctttaaaaaagtaatgtttcccaatccttcatagtaaaactaaacacacattgtaaagacatttgtcgtacgagatcttttatagaggtgtgttttaacccaaaggcaggctgtggagatcaattccagatattgccttcttgttgtgtctcagttgattttttttagcattgaacgtaacttacagtttgacataacaagcggtgaatgtaacactacagtttaactcaacaagccattggctgtagctcacaatcagcttggctgaactgccaaaaaaaatacaagcagtccattacagttcaacttaacaagagcagttctgttggtaaagccgatgcaaataagtaccaattgttagttaggaagggaaaagtgtcagcagtcaatggctgattaaaaaactaaatgtctttgaatttgttgggccgtgtgcctagtgcctggcctattaactggcttgttcgctgcggctttaatccgactgcgactgcggcttctacagtattttgtctctaggaattgcagctgcaatagtattttgcagctgcaacagtgctcccgcatgggcagccgaacaagctaaacatgtacatatatacttattataccagtgaggtgtgtgtagagtagtgtactctgtactcttccagaaaactttacatggtaccggaaccgggaccagcggcgacggtgtagtggtgaggaggcagaggagtgccttcggcctcgacggaagaaggccgccgatggagaagaagaccagctgggagcgtggcgcggcgtcgcggtcgtgcacgaggaggaggagcctgcacttgccggagggagaagaagcatgtagcacggtgcggtgctgcagtcgtgcgtgagtaggttcttattattgttttctatcctgctggatatgtagtcatgacagttaaattatgtacaactatgattacaaacgggaatacaagctaggagttgagaccacaatccttatgaaaagttacactgtaagtatgtcgtcctgcttgcatttcttccatgttccttttctcactgtaagcttagtttttgtgatcagcttccagatagaagagttattaaagtagacactaaacgattccaacctcctgaatctctttttactcctgtaacacttccatttatatttatacataatggtattgtcaacagtacacatagtttccatcagtttgttaatagtgcacctttagattgaatgagcttcttgcagagcaccaaggattaggcattgaaatgtgtggataaaaatattagaggaccacacatcattattatgcaacattgtctatgcacatgaacataattgtatcggtagtaagccgccagcatgtttgaaagttaaaaatgtgaattaagaacgaattatcgtatcctgctatacttatgcaacctaccaagaattagggcattgtagaaaccatataaagtattgagatcaatttgaatttgtctgcctcatgattttttgatacctgacctttatgaaggtagaggacaacattaaggatgatcatagactaccaacattcttcttcagattaaatgttaaattcagtaatttaatttgtttcagtaatacaagattagaccatccctgcacatctgcctatctgcctggcaaaatattatcgtcgcttccaagattgagaatatggctgcgtttggaaagccttagattctagcattgggtaacatgtctattatcccacattatctaagtttaactagatactcatattttatgaaaaaaactgcactgaaaaatcacgaggtgctagatgttgcgctagcagcagcatcatagcacatcttgtctattccagttacaaatgtgcatattgtagaatatttttgtaacatactgctgctcccttccattcgttttggttttggcaattttctatgcacgtgtcgctcatccatggtacctcttttgtactaagatcattgtgacatttaacatgtttacatcatctcttactcgacacatactcactggactaatgttcttgtccctccttttgctttccttagcagatggcggaggttctaataagtaaccttatgattggaaattgcagtgatcggttgtgtgtacgtgtctcccgtctgtgaaaaatttatgatcccgaggatgagtataagcttttccatgctcatatggtcctcatcgacgaggaggctggcagtgctcatgctcaaatataccctccactcactgacgttttcaaacctctgataaaggagggcaatgtctacaatgtctcctacattcagatcaagaaagctaataggatgtacaagcatgttgacaacgatatcatgatcggtttcacaaaatggatcctatgctgcctcaacaaacccgcggtttgaacacgtgacagatgacggcttagcttctgtggatggacatcttggtcgcttttgtagatggaatgtttggttggcttttgtagacagaattaggctgcacttgtgattgtgtaacgcttatgagcatggttgtgtggactgtgtcggccaaagtatacctcccaatgccttgtatatatcacatgcttagctgtctatccccaactaggtcgcctgataatagacttcgatcatgtcatgctattctataacaattttcgctgtaacttgcctaatcgtcatactatggtacacgcttaaatttggtgctgcaactttattgtggattataaaagagagaaaaatacagcataaagttataatgtcaaattgccacagctcactgttaagacttatttgatctagtgaaacctagttatctattagtaaaaattaattactgacaagtatacaggtgcatcatgaaaaccaaagattaagtgtgatcaggtagagctagagcaaatttgagggggtgtacttgtcttgcgggtgcatagctttttagtatgaaggtgcagatgaggtgaaaaattgatcataatcactgtttttcatttttgctgtgggtgcgctcgcgccacagttttatacatagtagctccgcccctgaatgagataaataattaaatcttagtttttctgaagagtatagtgcacattactatgccactaactaaaccctacattttgaac

SEQ ID NO: 216637 - DNA, 3399 bp, Zea Mays
cttcctttcccaactcggtcgacgcgttcgccacggctgcgcagtcctcctcctcgcctccgatcccctcccttcgacgatgcgagcacacccgctcatcctcttcgtacctgcaccgccacctcatcctcttcctcgccgcgccgacacccaccgcgctctctccctcccgcggcgacgcccttcgccaacgagaaccgcacgccgtcgtctcccacgggcactgtcgcacgctgggccacgctgcagtcggtggcgccgccacaccttcttcctccatgtgccgtcgccgccctattcttcttcgagatgcagccgctagcgctgccctcctcccagctccccttcatggccgcgtgcaggtggaccgctccccaccccgtcgccttcctcctcgtactgcccccaagaacgccctaggttactttttcttagatttgccttttggtttcaagtatgtttctctgatgccctagctgtctggtggattaaatttaattattgagctgcaactttcaccaattggtttggagaaagacaatagaggcttgggttcttttagttaagaaaaattgcgtccgtgttcagttataacataagattgtttattgttctctgtaatctcacatttctttttctatatatgaatagggactatgtgccagtgttagtttttggtaccagtctacaggtctttcatttctacattcaaaggtgagaatcaatcatgttcggctccctttaaaaaagtaatgtttcccaatccttcatagtaaaactaaacacacattgtaaagacatttgtcgtacgagatcttttatagaggtgtgttttaacccaaaggcaggctgtggagatcaattccagatattgccttcttgttgtgtctcagttgattttttttagcattgaacgtaacttacagtttgacataacaagcggtgaatgtaacactacagtttaactcaacaagccattggctgtagctcacaatcagcttggctgaactgccaaaaaaaatacaagcagtccattacagttcaacttaacaagagcagttctgttggtaaagccgatgcaaataagtaccaattgttagttaggaagggaaaagtgtcagcagtcaatggctgattaaaaaactaaatgtctttgaatttgttgggccgtgtgcctagtgcctggcctattaactggcttgttcgctgcggctttaatccgactgcgactgcggcttctacagtattttgtctctaggaattgcagctgcaatagtattttgcagctgcaacagtgctcccgcatgggcagccgaacaagctaaacatgtacatatatacttattataccagtgaggtgtgtgtagagtagtgtactctgtactcttccagaaaactttacatggtaccggaaccgggaccagcggcgacggtgtagtggtgaggaggcagaggagtgccttcggcctcgacggaagaaggccgccgatggagaagaagaccagctgggagcgtggcgcggcgtcgcggtcgtgcacgaggaggaggagcctgcacttgccggagggagaagaagcatgtagcacggtgcggtgctgcagtcgtgcgtgagagttgagaccacaatccttatgaaaagttacactgtaagtatgtcgtcctgcttgcatttcttccatgttccttttctcactgtaagcttagtttttgtgatcagcttccagatagaagagttattaaagtagacactaaacgattccaacctcctgaatctctttttactcctgtaacacttccatttatatttatacataatggtattgtcaacagtacacatagtttccatcagtttgttaatagtgcacctttagattgaatgagcttcttgcagagcaccaaggattaggcattgaaatgtgtggataaaaatattagaggaccacacatcattattatgcaacattgtctatgcacatgaacataattgtatcggtagtaagccgccagcatgtttgaaagttaaaaatgtgaattaagaacgaattatcgtatcctgctatacttatgcaacctaccaagaattagggcattgtagaaaccatataaagtattgagatcaatttgaatttgtctgcctcatgattttttgatacctgacctttatgaaggtagaggacaacattaaggatgatcatagactaccaacattcttcttcagattaaatgttaaattcagtaatttaatttgtttcagtaatacaagattagaccatccctgcacatctgcctatctgcctggcaaaatattatcgtcgcttccaagattgagaatatggctgcgtttggaaagccttagattctagcattggtgatcggttgtgtgtacgtgtctcccgtctgtgaaaaatttatgatcccgaggatgagtataagcttttccatgctcatatggtcctcatcgacgaggaggctggcagtgctcatgctcaaatataccctccactcactgacgttttcaaacctctgataaaggagggcaatgtctacaatgtctcctacattcagatcaagaaagctaataggatgtacaagcatgttgacaacgatatcatgatcggtttcacaaaatggatcctatgctgcctcaacaaacccgcggtttgaacacgtgacagatgacggcttagcttctgtggatggacatcttggtcgcttttgtagatggaatgtttggttggcttttgtagacagaattaggctgcacttgtgattgtgtaacgcttatgagcatggttgtgtggactgtgtcggccaaagtatacctcccaatgccttgtatatatcacatgcttagctgtctatccccaactaggtcgcctgataatagacttcgatcatgtcatgctattctataacaattttcgctgtaacttgcctaatcgtcatactatggtacacgcttaaatttggtgctgcaactttattgtggattataaaagagagaaaaatacagcataaagttataatgtcaaattgccacagctcactgttaagacttatttgatctagtgaaacctagttatctattagtaaaaattaattactgacaagtatacaggtgcatcatgaaaaccaaagattaagtgtgatcaggtagagctagagcaaatttgagggggtgtacttgtcttgcgggtgcatagctttttagtatgaaggtgcagatgaggtgaaaaattgatcataatcactgtttttcatttttgctgtgggtgcgctcgcgccacagttttatacatagtagctccgcccctgaatgagataaataattaaatcttagtttttctgaagagtatagtgcacattactatgccactaactaaaccctacattttgaac

SEQ ID NO: 216638 - DNA, 3129 bp, Zea Mays
cttcctttcccaactcggtcgacgcgttcgccacggctgcgcagtcctcctcctcgcctccgatcccctcccttcgacgatgcgagcacacccgctcatcctcttcgtacctgcaccgccacctcatcctcttcctcgccgcgccgacacccaccgcgctctctccctcccgcggcgacgcccttcgccaacgagaaccgcacgccgtcgtctcccacgggcactgtcgcacgctgggccacgctgcagtcggtggcgccgccacaccttcttcctccatgtgccgtcgccgccctattcttcttcgagatgcagccgctagcgctgccctcctcccagctccccttcatggccgcgtgcagggactatgtgccagtgttagtttttggtaccagtctacaggtctttcatttctacattcaaagagtagtgtactctgtactcttccagaaaactttacatggtaccggaaccgggaccagcggcgacggtgtagtggtgaggaggcagaggagtgccttcggcctcgacggaagaaggccgccgatggagaagaagaccagctgggagcgtggcgcggcgtcgcggtcgtgcacgaggaggaggagcctgcacttgccggagggagaagaagcatgtagcacggtgcggtgctgcagtcgtgcgtgagtaggttcttattattgttttctatcctgctggatatgtagtcatgacagttaaattatgtacaactatgattacaaacgggaatacaagctaggagttgagaccacaatccttatgaaaagttacactgtaagtatgtcgtcctgcttgcatttcttccatgttccttttctcactgtaagcttagtttttgtgatcagcttccagatagaagagttattaaagtagacactaaacgattccaacctcctgaatctctttttactcctgtaacacttccatttatatttatacataatggtattgtcaacagtacacatagtttccatcagtttgttaatagtgcacctttagattgaatgagcttcttgcagagcaccaaggattaggcattgaaatgtgtggataaaaatattagaggaccacacatcattattatgcaacattgtctatgcacatgaacataattgtatcggtagtaagccgccagcatgtttgaaagttaaaaatgtgaattaagaacgaattatcgtatcctgctatacttatgcaacctaccaagaattagggcattgtagaaaccatataaagtattgagatcaatttgaatttgtctgcctcatgattttttgatacctgacctttatgaaggtagaggacaacattaaggatgatcatagactaccaacattcttcttcagattaaatgttaaattcagtaatttaatttgtttcaggtgagccttcttcacatattgagcaacaataatcatcttcgtggtcatggtggtgatgaccatgatgcgcctagaaatgcatgtgtgaaatattcaatatatgtcaccatttctattttcagtaatacaagattagaccatccctgcacatctgcctatctgcctggcaaaatattatcgtcgcttccaagattgagaatatggctgcgtttggaaagccttagattctagcattgggtaacatgtctattatcccacattatctaagtttaactagatactcatattttatgaaaaaaactgcactgaaaaatcacgaggtgctagatgttgcgctagcagcagcatcatagcacatcttgtctattccagttacaaatgtgcatattgtagaatatttttgtaacatactgctgctcccttccattcgttttggttttggcaattttctatgcacgtgtcgctcatccatggtacctcttttgtactaagatcattgtgacatttaacatgtttacatcatctcttactcgacacatactcactggactaatgttcttgtccctccttttgctttccttagcagatggcggaggttctaataagtaaccttatgattggaaattgcagtgatcggttgtgtgtacgtgtctcccgtctgtgaaaaatttatgatcccgaggatgagtataagcttttccatgctcatatggtcctcatcgacgaggaggtacgcgacctgcttactacatgaagcatgctgcataccagatcaaagaaattttaatatggggctggcagtgctcatgctcaaatataccctccactcactgacgttttcaaacctctgataaaggagggcaatgtctacaatgtctcctacattcagatcaagaaagctaataggatgtacaagcatgttgacaacgatatcatgatcggtttcacaaaatggatcctatgctgcctcaacaaacccgcggtttgaacacgtgacagatgacggcttagcttctgtggatggacatcttggtcgcttttgtagatggaatgtttggttggcttttgtagacagaattaggctgcacttgtgattgtgtaacgcttatgagcatggttgtgtggactgtgtcggccaaagtatacctcccaatgccttgtatatatcacatgcttagctgtctatccccaactaggtcgcctgataatagacttcgatcatgtcatgctattctataacaattttcgctgtaacttgcctaatcgtcatactatggtacacgcttaaatttggtgctgcaactttattgtggattataaaagagagaaaaatacagcataaagttataatgtcaaattgccacagctcactgttaagacttatttgatctagtgaaacctagttatctattagtaaaaattaattactgacaagtatacaggtgcatcatgaaaaccaaagattaagtgtgatcaggtagagctagagcaaatttgagggggtgtacttgtcttgcgggtgcatagctttttagtatgaaggtgcagatgaggtgaaaaattgatcataatcactgtttttcatttttgctgtgggtgcgctcgcgccacagttttatacatagtagctccgcccctgaatgagataaataattaaatcttagtttttctgaagagtatagtgcacattactatgccactaactaaaccctacattttgaac

SEQ ID NO: 216639 - DNA, 2982 bp, Zea Mays
cttcctttcccaactcggtcgacgcgttcgccacggctgcgcagtcctcctcctcgcctccgatcccctcccttcgacgatgcgagcacacccgctcatcctcttcgtacctgcaccgccacctcatcctcttcctcgccgcgccgacacccaccgcgctctctccctcccgcggcgacgcccttcgccaacgagaaccgcacgccgtcgtctcccacgggcactgtcgcacgctgggccacgctgcagtcggtggcgccgccacaccttcttcctccatgtgccgtcgccgccctattcttcttcgagatgcagccgctagcgctgccctcctcccagctccccttcatggccgcgtgcagggactatgtgccagtgttagtttttggtaccagtctacaggtctttcatttctacattcaaaggtgagaatcaatcatgttcggctccctttaaaaaagtaatgtttcccaatccttcatagtaaaactaaacacacattgtaaagacatttgtcgtacgagatcttttatagaggtgtgttttaacccaaaggcaggctgtggagatcaattccagatattgccttcttgttgtgtctcagttgattttttttagcattgaacgtaacttacagtttgacataacaagcggtgaatgtaacactacagtttaactcaacaagccattggctgtagctcacaatcagcttggctgaactgccaaaaaaaatacaagcagtccattacagttcaacttaacaagagcagttctgttggtaaagccgatgcaaataagtaccaattgttagttaggaagggaaaagtgtcagcagtcaatggctgattaaaaaactaaatgtctttgaatttgttgggccgtgtgcctagtgcctggcctattaactggcttgttcgctgcggctttaatccgactgcgactgcggcttctacagtattttgtctctaggaattgcagctgcaatagtattttgcagctgcaacagtgctcccgcatgggcagccgaacaagctaaacatgtacatatatacttattataccagtgaggtgtgtgtagagtagtgtactctgtactcttccagaaaactttacatggtaccggaaccgggaccagcggcgacggtgtagtggtgaggaggcagaggagtgccttcggcctcgacggaagaaggccgccgatggagaagaagaccagctgggagcgtggcgcggcgtcgcggtcgtgcacgaggaggaggagcctgcacttgccggagggagaagaagcatgtagcacggtgcggtgctgcagtcgtgcgtgagtgagccttcttcacatattgagcaacaataatcatcttcgtggtcatggtggtgatgaccatgatgcgcctagaaatgcatgtgtgaaatattcaatatatgtcaccatttctattttcagtaatacaagattagaccatccctgcacatctgcctatctgcctggcaaaatattatcgtcgcttccaagattgagaatatggctgcgtttggaaagccttagattctagcattgggtaacatgtctattatcccacattatctaagtttaactagatactcatattttatgaaaaaaactgcactgaaaaatcacgaggtgctagatgttgcgctagcagcagcatcatagcacatcttgtctattccagttacaaatgtgcatattgtagaatatttttgtaacatactgctgctcccttccattcgttttggttttggcaattttctatgcacgtgtcgctcatccatggtacctcttttgtactaagatcattgtgacatttaacatgtttacatcatctcttactcgacacatactcactggactaatgttcttgtccctccttttgctttccttagcagatggcggaggttctaataagtaaccttatgattggaaattgcagtgatcggttgtgtgtacgtgtctcccgtctgtgaaaaatttatgatcccgaggatgagtataagcttttccatgctcatatggtcctcatcgacgaggaggctggcagtgctcatgctcaaatataccctccactcactgacgttttcaaacctctgataaaggagggcaatgtctacaatgtctcctacattcagatcaagaaagctaataggatgtacaagcatgttgacaacgatatcatgatcggtttcacaaaatggatcctatgctgcctcaacaaacccgcggtttgaacacgtgacagatgacggcttagcttctgtggatggacatcttggtcgcttttgtagatggaatgtttggttggcttttgtagacagaattaggctgcacttgtgattgtgtaacgcttatgagcatggttgtgtggactgtgtcggccaaagtatacctcccaatgccttgtatatatcacatgcttagctgtctatccccaactaggtcgcctgataatagacttcgatcatgtcatgctattctataacaattttcgctgtaacttgcctaatcgtcatactatggtacacgcttaaatttggtgctgcaactttattgtggattataaaagagagaaaaatacagcataaagttataatgtcaaattgccacagctcactgttaagacttatttgatctagtgaaacctagttatctattagtaaaaattaattactgacaagtatacaggtgcatcatgaaaaccaaagattaagtgtgatcaggtagagctagagcaaatttgagggggtgtacttgtcttgcgggtgcatagctttttagtatgaaggtgcagatgaggtgaaaaattgatcataatcactgtttttcatttttgctgtgggtgcgctcgcgccacagttttatacatagtagctccgcccctgaatgagataaataattaaatcttagtttttctgaagagtatagtgcacattactatgccactaactaaaccctacattttgaac

SEQ ID NO: 216640 - DNA, 1447 bp, Zea Mays
cttcctttcccaactcggtcgacgcgttcgccacggctgcgcagtcctcctcctcgcctccgatcccctcccttcgacgatgcgagcacacccgctcatcctcttcgtacctgcaccgccacctcatcctcttcctcgccgcgccgacacccaccgcgctctctccctcccgcggcgacgcccttcgccaacgagaaccgcacgccgtcgtctcccacgggcactgtcgcacgctgggccacgctgcagtcggtggcgccgccacaccttcttcctccatgtgccgtcgccgccctattcttcttcgagatgcagccgctagcgctgccctcctcccagctccccttcatggccgcgtgcagggactatgtgccagtgttagtttttggtaccagtctacaggtctttcatttctacattcaaagagtagtgtactctgtactcttccagaaaactttacatggtaccggaaccgggaccagcggcgacggtgtagtggtgaggaggcagaggagtgccttcggcctcgacggaagaaggccgccgatggagaagaagaccagctgggagcgtggcgcggcgtcgcggtcgtgcacgaggaggaggagcctgcacttgccggagggagaagaagcatgtagcacggtgcggtgctgcagtcgtgcgtgagtaggttcttattattgttttctatcctgctggatatgtagtcatgacagttaaattatgtacaactatgattacaaacgggaatacaagctaggagttgagaccacaatccttatgaaaagttacactgtaagtatgtcgtcctgcttgcatttcttccatgttccttttctcactgtaagcttagtttttgtgatcagcttccagatagaagagttattaaagtagacactaaacgattccaacctcctgaatctctttttactcctgtaacacttccatttatatttatacataatggtattgtcaacagtacacatagtttccatcagtttgttaatagtgcacctttagattgaatgagcttcttgcagagcaccaaggattaggcattgaaatgtgtggataaaaatattagaggaccacacatcattattatgcaacattgtctatgcacatgaacataattgtatcggtagtaagccgccagcatgtttgaaagttaaaaatgtgaattaagaacgaattatcgtatcctgctatacttatgcaacctaccaagaattagggcattgtagaaaccatataaagtattgagatcaatttgaatttgtctgcctcatgattttttgatacctgacctttatgaaggtagaggacaacattaaggatgatcatagactaccaacattcttcttcagattaaatgttaaattcagtaatttaatttgtttcagaatcaccaccttagttattccccaagaaaaagtatacatta

SEQ ID NO: 216641 - DNA, 2601 bp, Zea Mays
tattgttctgccactgccgcggccgtaccccgccccgcatgctgcccggaatcagcgcctccgccgccgcagcccttccagaaatctccatcccgaatcctccgcgcccccgcctgcccccgcgcatcccgcagcccccgcccccgcgcatcccgcagccttggcgtcgtggccgccgcctctgctccctcctccatcccgcgcaacaacgacgaccgtcggggcctcgcctggcagatcaagcggggaatccacccgccaggcgtctccctgacagtggtagacggtggcggcgatgggggccgagagcgaggatgccccttccccatcctctaccctcccttgcgattccagcattggtgcccgcatccccgccgtccgaagcatggcgctcttcgtctcctccctcgccgccgccctctcccacctctccctcccatcgacctccaaccccaagcctcacccagcctcgctcctgcgcctgcgctccacctaccgccgcgctgttagcctcgcggtggccggagcaagaacggcaataggatgaagctgctgctgtccaacccctacggcttcagcagcccccgacatcgtgtgtcgggatctgggactccagcggcaaggcgaccactatgccgcacgggcgcggtgcaggagctcctccagcggcgccgcaactgcctctgagccctcatggtccagctcgagtgctcgacgcacccgctccgcacccgcccttgtcccccaggtgtcggcgtgcgggattcggtaacggtgttggagctcatccagtggcgccgcaaccgcctccgatccctcaaggtttggctcaaggctgatggccaggtcgaccgtctcctccatgcgcaggggaagaggaaggagctggagcagacggtgaatagcttctctgatttctccctctccggtcctgttgcaaagagccacaaactggttaggatgtcttggatcatcagacagatcagcatgacttgcaagcagctagctactgtttacagatgtcctctacttgccaaaaaataacaaaggggttctcgttcttgaaagctgcatagatagcacctcaacttggccactaaaacaactaagtttttttatggacatgtctgatgtttttctcaataattgtgcaaattttcctttcataattttcgtcgtcggggggcaggaaccgggcggtgtacgtgctggcgcagtgcacgctggacatgccgccggaccactgccgggcctcctcgatggagccatggcagagagcggcgacggaaggtcagcggcgacaagatggacgtggcggtcttcggggcgcggtgcaccctgcggtatgagatggacctgcagttcttcaatgtcactggcaacagcaagatgctgtccctatatttttacagatatttttaataatgacctcagtggaccctatgcatttcttgagccaccttttgttcaaagatcccttctatataagatacaggcaaggagaaaaaatagattaatcggtctcgaagcttctgatacactcagttctcacatgtcgcatgaaatggacctcactagaaaccaaacacccttgaatcgcagtcacccacgtcgccaacaggagtgacttcctcaccctgctccacgccctgccgccgcagagcgggagcggcggctgcgacggccgcggtgctggggaggaggatgcctccgcgctcgccaactccctcgacgcgctttgcaaggcctgcaagcctgagtttcatcgccacccccatgtgagcaatccgggacaccgcggagatgcctcgtgaggaaagcggtacggcgaggcagagcagcgtcggtggtcgtggaaggatggagcaacaaccccacatgttttgttctaatgacacagtggcgccaaggttccagactgtggcgggactgggctctgcagccgctgcaaaggagagtgcttcgtcttcaagcaactctcgaaggagacggccaccaggtcacacaaggccgccaagaacatggccaccggatacacttcggggctgtccaccaatggacctactgcaacaagtactcctccacccgcgtgcctgcataaaatggcaggggttctaccaacaatcaacacacatgtgaagcgaagctgggacgtgcatgtatgtggatccacgacacgtgcatctgtaggaaccctgattttggaaagtgctgagagaggtggcatctagaggatgtcatgtcgaacgtgtgaagtttttttagaaatatgtatatttgtgtgaagctttttagaaacttggctccattttattttctatgttcctctcggctttgtttcctatcctttccaatgacttgctatgcatttgcactgtatttggcatgtctaaaactgctacacaaaacttgatatatattttgtctaaaaatactatatccttgttatgcttgattgatctttattttgtctgctcttctattcttgtgtgggtctatcaagaatgaggcaattagataaagatatatgctttgtcagtattagctgagtctttgagcgtagcaggaaaagtcttggcacatcattgttttagttattat

SEQ ID NO: 216642 - DNA, 3712 bp, Zea Mays
ctgccgcggccgtaccccgccccgcatgctgcccggaatcagcgcctccgccgccgcagcccttccagaaatctccatcccgaatcctccgcgcccccgcctgcccccgcgcatcccgcagcccccgcccccgcgcatcccgcagccttggcgtcgtggccgccgcctctgctccctcctccatcccgcgcaacaacgacgaccgtcggggcctcgcctggcagatcaagcggggaatccacccgccaggcgtctccctgacagtggtagacggtggcggcgatgggggccgagagcgaggatgccccttccccatcctctaccctcccttgcgattccagcattggtgcccgcatccccgccgtccgaagcatggcgctcttcgtctcctccctcgccgccgccctctcccacctctccctcccatcgacctccaaccccaagcctcacccagcctcgctcctgcgcctgcgctccacctaccgccgcgctgttagcctcgcggtggccggagcaagaacggcaataggatgaagctgctgctgtccaacccctacggcttcagcagcccccgacatcgtgtgtcgggatctgggactccagcggcaaggcgaccactatgccgcacgggcgcggtgcaggagctcctccagcggcgccgcaactgcctctgagccctcatggtccagctcgagtgctcgacgcacccgctccgcacccgcccttgtcccccaggtgtcggcgtgcgggattcggtaacggtgttggagctcatccagtggcgccgcaaccgcctccgatccctcaaggtttggctcaaggctgatggccaggtcgaccgtctcctccatgcgcaggggaagaggaaggagctggagcagacggtgaatagcttctctgatttctccctctccggtcctgttgcaaagagccacaaactggttaggatgtcttggatcatcagacagatcagcatgacttgcaagcagctagctactgtttacagatgtcctctacttgccaaaaaataacaaaggggttctcgttcttgaaagctgcatagatagcacctcaacttggccactaaaacaactaagtttttttatggacatgtctgatgtttttctcaataattgtgcaaattttcctttcataattttcgtcgtcggggggcaggaaccgggcggtgtacgtgctggcgcagtgcacgctggacatgccgccggaccactgccgggcctcctcgatggagccatggcagagagcggcgacggaaggtcagcggcgacaagatggacgtggcggtcttcggggcgcggtgcaccctgcggtatgagatggacctgcagttcttcaatgtcactggcaacagcaagatgctgtccctatatttttacagatatttttaataatgacctcagtggaccctatgcatttcttgagccaccttttgttcaaagatcccttctatataagatacaggcaaggagaaaaaatagattaatcggtctcgaagcttctgatacactcagttctcacatgtcgcatgaaatggacctcactagaaaccaaacacccttgaatcgcagtcacccacgtcgccaacaggagtgacttcctcaccctgctccacgccctgccgccgcagagcgggagcggcggctgcgacggccgcggtgctggggaggaggatgcctccgcgctcgccaactccctcgacgcgctttgcaaggcctgcaagcctgagtaagcaagagaacaaaacccgcgggactgtgaacaagcgcagaaagaaatacgaatgcaacaagtcctacattctgttctccttttttggggggccaaaacgttgaggtctcaactcactcgtgcaagcagtttcatcgccacccccatgtgagcaatccgggacaccgcggagatgcctcgtgaggaaagcggtacggcgaggcagagcagcgtcggtggtcgtggaaggatggagcaacaaccccacatgttttgttctaatgacacagtggcgccaaggttccagactgtggcgggactgggctctgcagccgctgcaaaggagagtgcttcgtcttcaagcaactctcgaaggagacggccaccaggtcacacaaggccgccaagaacatggccaccggatacacttcggggctgtccaccaatggacctactgcaacaagtactcctccacccgcgtgcctgcataaaatggcaggggttctaccaacaatcaacacacatgtgaagcgaagctgggacgtgcatgtatgtggatccacgacacgtgcatctgtaggaaccctgattttggtatggtttctacactcaaattcatcagtatgatataaggcaatctgctggctggtatttaagagtggccctctcttcatatcatcgaaaggtaaaactattagtggcacacgttggttttttcctttgtttccaacatgtaacattatattaggggtatgtgcagtttagggtaagtaatatactcctttgtgctcagtaagtaattgatagaaggtagaagaaggtagaaacatatgtgcagtttagagtttacctctttatgatttctgggtagccacaatattttcacattgcaattcaagtccttagtaccctggtaatcaaactaacatgtcagagcatcaggcaaattcattgtgcacctgcctattgtatgctaaagaaatcagtttttttgcatgtgttagttgtctcctaacctgctgcattttcaatttttgtgttctgtgttttgtaatttgggagcaccttcaccattgtgttattagagctaggcaccttcaccattgtgttattgatgatctttcttggtctgaatggagtttttgcacctattcacatgccagagagtttatgcattgtcctccttttttggatacactttctgttaaaaaatgctacacagttgcattctacttaccttgtgattttgatggagctctgttgttgtgcttctttgacatttgtcggtcctttgagcattaggtctgcatcatgcattatgttgttatctattgatctatatatcccatattgtggagatcactaaaatcttagtaatttaagttctgttcaaactttcaattccatcgtccgtgaaaaattgataagtatgaatgtgttgacttgactccattttatcttctccttatttgagcttgtattcttattttttaatacattgctgccctgcactgagatttctattgtaaataaacaaagtgctatttaaattttgatttattccttacgaatgtctgttggtttcaggaaagtgctgagagaggtggcatctagaggatgtcatgtcgaacgtgtgaagtttttttagaaatatgtatatttgtgtgaagctttttagaaacttggctccattttattttctatgttcctctcggctttgtttcctatcctttccaatgacttgctatgcatttgcactgtatttggcatgtctaaaactgctacacaaaacttgatatatattttgtctaaaaatactatatccttgttatgcttgattgatctttattttgtctgctcttctattcttgtgtgggtctatcaagaatgaggcaattagataaagatatatgctttgtcagtattagctgagtctttgagcgtagcaggaaaagtcttggcacatcattgttttagttattat

SEQ ID NO: 216643 - DNA, 3705 bp, Zea Mays
ctgccgcggccgtaccccgccccgcatgctgcccggaatcagcgcctccgccgccgcagcccttccagaaatctccatcccgaatcctccgcgcccccgcctgcccccgcgcatcccgcagcccccgcccccgcgcatcccgcagccttggcgtcgtggccgccgcctctgctccctcctccatcccgcgcaacaacgacgaccgtcggggcctcgcctggcagatcaagcggggaatccacccgccaggcgtctccctgacagtggtagacggtggcggcgatgggggccgagagcgaggatgccccttccccatcctctaccctcccttgcgattccagcattggtgcccgcatccccgccgtccgaagcatggcgctcttcgtctcctccctcgccgccgccctctcccacctctccctcccatcgacctccaaccccaagcctcacccagcctcgctcctgcgcctgcgctccacctaccgccgcgctgttagcctcgcggtggccggagcaagaacggcaataggatgaagctgctgctgtccaacccctacggcttcagcagcccccgacatcgtgtgtcgggatctgggactccagcggcaaggcgaccactatgccgcacgggcgcggtgcaggagctcctccagcggcgccgcaactgcctctgagccctcatggtccagctcgagtgctcgacgcacccgctccgcacccgcccttgtcccccaggtgtcggcgtgcgggattcggtaacggtgttggagctcatccagtggcgccgcaaccgcctccgatccctcaaggtttggctcaaggctgatggccaggtcgaccgtctcctccatgcgcaggggaagaggaaggagctggagcagacggtgaatagcttctctgatttctccctctccggtcctgttgcaaagagccacaaactggttaggatgtcttggatcatcagacagatcagcatgacttgcaagcagctagctactgtttacagatgtcctctacttgccaaaaaataacaaaggggttctcgttcttgaaagctgcatagatagcacctcaacttggccactaaaacaactaagtttttttatggacatgtctgatgtttttctcaataattgtgcaaattttcctttcataattttcgtcgtcggggggcaggaaccgggcggtgtacgtgctggcgcagtgcacgctggacatgccgccggaccactgccgggcctcctcgatggagccatggcagagagcggcgacggaaggtcagcggcgacaagatggacgtggcggtcttcggggcgcggtgcaccctgcggtatgagatggacctgcagttcttcaatgtcactggcaacagcaagatgctgtccctatatttttacagatatttttaataatgacctcagtggaccctatgcatttcttgagccaccttttgttcaaagatcccttctatataagatacaggcaaggagaaaaaatagattaatcggtctcgaagcttctgatacactcagttctcacatgtcgcatgaaatggacctcactagaaaccaaacacccttgaatcgcagtcacccacgtcgccaacaggagtgacttcctcaccctgctccacgccctgccgccgcagagcgggagcggcggctgcgacggccgcggtgctggggaggaggatgcctccgcgctcgccaactccctcgacgcgctttgcaaggcctgcaagcctgagtaagcaagagaacaaaacccgcgggactgtgaacaagcgcagaaagaaatacgaatgcaacaagtcctacattctgttctccttttttggggggccaaaacgttgaggtctcaactcactcgtgcaagcagtttcatcgccacccccatgtgagcaatccgggacaccgcggagatgcctcgtgaggaaagcggtacggcgaggcagagcagcgtcggtggtcgtggaaggatggagcaacaaccccacatgttttgttctaattggcgccaaggttccagactgtggcgggactgggctctgcagccgctgcaaaggagagtgcttcgtcttcaagcaactctcgaaggagacggccaccaggtcacacaaggccgccaagaacatggccaccggatacacttcggggctgtccaccaatggacctactgcaacaagtactcctccacccgcgtgcctgcataaaatggcaggggttctaccaacaatcaacacacatgtgaagcgaagctgggacgtgcatgtatgtggatccacgacacgtgcatctgtaggaaccctgattttggtatggtttctacactcaaattcatcagtatgatataaggcaatctgctggctggtatttaagagtggccctctcttcatatcatcgaaaggtaaaactattagtggcacacgttggttttttcctttgtttccaacatgtaacattatattaggggtatgtgcagtttagggtaagtaatatactcctttgtgctcagtaagtaattgatagaaggtagaagaaggtagaaacatatgtgcagtttagagtttacctctttatgatttctgggtagccacaatattttcacattgcaattcaagtccttagtaccctggtaatcaaactaacatgtcagagcatcaggcaaattcattgtgcacctgcctattgtatgctaaagaaatcagtttttttgcatgtgttagttgtctcctaacctgctgcattttcaatttttgtgttctgtgttttgtaatttgggagcaccttcaccattgtgttattagagctaggcaccttcaccattgtgttattgatgatctttcttggtctgaatggagtttttgcacctattcacatgccagagagtttatgcattgtcctccttttttggatacactttctgttaaaaaatgctacacagttgcattctacttaccttgtgattttgatggagctctgttgttgtgcttctttgacatttgtcggtcctttgagcattaggtctgcatcatgcattatgttgttatctattgatctatatatcccatattgtggagatcactaaaatcttagtaatttaagttctgttcaaactttcaattccatcgtccgtgaaaaattgataagtatgaatgtgttgacttgactccattttatcttctccttatttgagcttgtattcttattttttaatacattgctgccctgcactgagatttctattgtaaataaacaaagtgctatttaaattttgatttattccttacgaatgtctgttggtttcaggaaagtgctgagagaggtggcatctagaggatgtcatgtcgaacgtgtgaagtttttttagaaatatgtatatttgtgtgaagctttttagaaacttggctccattttattttctatgttcctctcggctttgtttcctatcctttccaatgacttgctatgcatttgcactgtatttggcatgtctaaaactgctacacaaaacttgatatatattttgtctaaaaatactatatccttgttatgcttgattgatctttattttgtctgctcttctattcttgtgtgggtctatcaagaatgaggcaattagataaagatatatgctttgtcagtattagctgagtctttgagcgtagcaggaaaagtcttggcacatcattgttttagttattat

SEQ ID NO: 216644 - DNA, 2592 bp, Zea Mays
ctgccgcggccgtaccccgccccgcatgctgcccggaatcagcgcctccgccgccgcagcccttccagaaatctccatcccgaatcctccgcgcccccgcctgcccccgcgcatcccgcagcccccgcccccgcgcatcccgcagccttggcgtcgtggccgccgcctctgctccctcctccatcccgcgcaacaacgacgaccgtcggggcctcgcctggcagatcaagcggggaatccacccgccaggcgtctccctgacagtggtagacggtggcggcgatgggggccgagagcgaggatgccccttccccatcctctaccctcccttgcgattccagcattggtgcccgcatccccgccgtccgaagcatggcgctcttcgtctcctccctcgccgccgccctctcccacctctccctcccatcgacctccaaccccaagcctcacccagcctcgctcctgcgcctgcgctccacctaccgccgcgctgttagcctcgcggtggccggagcaagaacggcaataggatgaagctgctgctgtccaacccctacggcttcagcagcccccgacatcgtgtgtcgggatctgggactccagcggcaaggcgaccactatgccgcacgggcgcggtgcaggagctcctccagcggcgccgcaactgcctctgagccctcatggtccagctcgagtgctcgacgcacccgctccgcacccgcccttgtcccccaggtgtcggcgtgcgggattcggtaacggtgttggagctcatccagtggcgccgcaaccgcctccgatccctcaaggtttggctcaaggctgatggccaggtcgaccgtctcctccatgcgcaggggaagaggaaggagctggagcagacggtgaatagcttctctgatttctccctctccggtcctgttgcaaagagccacaaactggaaccgggcggtgtacgtgctggcgcagtgcacgctggacatgccgccggaccactgccgggcctcctcgatggagccatggcagagagcggcgacggaaggtcagcggcgacaagatggacgtggcggtcttcggggcgcggtgcaccctgcggtatgagatggacctgcagttcttcaatgtcactggcaacagcaagatgctgtccctatatttttacagatatttttaataatgacctcagtggaccctatgcatttcttgagccaccttttgttcaaagatcccttctatataagatacaggcaaggagaaaaaatagattaatcggtctcgaagcttctgatacactcagttctcacatgtcgcatgaaatggacctcactagaaaccaaacacccttgaatcgcagtcacccacgtcgccaacaggagtgacttcctcaccctgctccacgccctgccgccgcagagcgggagcggcggctgcgacggccgcggtgctggggaggaggatgcctccgcgctcgccaactccctcgacgcgctttgcaaggcctgcaagcctgagtaagcaagagaacaaaacccgcgggactgtgaacaagcgcagaaagaaatacgaatgcaacaagtcctacattctgttctccttttttggggggccaaaacgttgaggtctcaactcactcgtgcaagcagtttcatcgccacccccatgtgagcaatccgggacaccgcggagatgcctcgtgaggaaagcggtacggcgaggcagagcagcgtcggtggtcgtggaaggatggagcaacaaccccacatgttttgttctaatttgttggtctcatgtaggacacagtggcgccaaggttccagactgtggcgggactgggctctgcagccgctgcaaaggagagtgcttcgtcttcaagcaactctcgaaggagacggccaccaggtcacacaaggccgccaagaacatggccaccggatacacttcggggctgtccaccaatggacctactgcaacaagtactcctccacccgcgtgcctgcataaaatggcaggggttctaccaacaatcaacacacatgtgaagcgaagctgggacgtgcatgtatgtggatccacgacacgtgcatctgtaggaaccctgattttggtatggtttctacactcaaattcatcagtatgatataaggcaatctgctggctggtatttaagagtggccctctcttcatatcatcgaaaggaaagtgctgagagaggtggcatctagaggatgtcatgtcgaacgtgtgaagtttttttagaaatatgtatatttgtgtgaagctttttagaaacttggctccattttattttctatgttcctctcggctttgtttcctatcctttccaatgacttgctatgcatttgcactgtatttggcatgtctaaaactgctacacaaaacttgatatatattttgtctaaaaatactatatccttgttatgcttgattgatctttattttgtctgctcttctattcttgtgtgggtctatcaagaatgaggcaattagataaagatatatgctttgtcagtattagctgagtctttgagcgtagcaggaaaagtcttggcacatcattgttttagttattat

SEQ ID NO: 216645 - DNA, 2772 bp, Zea Mays
ctgccgcggccgtaccccgccccgcatgctgcccggaatcagcgcctccgccgccgcagcccttccagaaatctccatcccgaatcctccgcgcccccgcctgcccccgcgcatcccgcagcccccgcccccgcgcatcccgcagccttggcgtcgtggccgccgcctctgctccctcctccatcccgcgcaacaacgacgaccgtcggggcctcgcctggcagatcaagcggggaatccacccgccaggcgtctccctgacagtggtagacggtggcggcgatgggggccgagagcgaggatgccccttccccatcctctaccctcccttgcgattccagcattggtgcccgcatccccgccgtccgaagcatggcgctcttcgtctcctccctcgccgccgccctctcccacctctccctcccatcgacctccaaccccaagcctcacccagcctcgctcctgcgcctgcgctccacctaccgccgcgctgttagcctcgcggtggccggagcaagaacggcaataggatgaagctgctgctgtccaacccctacggcttcagcagcccccgacatcgtgtgtcgggatctgggactccagcggcaaggcgaccactatgccgcacgggcgcggtgcaggagctcctccagcggcgccgcaactgcctctgagccctcatggtccagctcgagtgctcgacgcacccgctccgcacccgcccttgtcccccaggtgtcggcgtgcgggattcggtaacggtgttggagctcatccagtggcgccgcaaccgcctccgatccctcaaggtttggctcaaggctgatggccaggtcgaccgtctcctccatgcgcaggggaagaggaaggagctggagcagacggtgaatagcttctctgatttctccctctccggtcctgttgcaaagagccacaaactggttaggatgtcttggatcatcagacagatcagcatgacttgcaagcagctagctactgtttacagatgtcctctacttgccaaaaaataacaaaggggttctcgttcttgaaagctgcatagatagcacctcaacttggccactaaaacaactaagtttttttatggacatgtctgatgtttttctcaataattgtgcaaattttcctttcataattttcgtcgtcggggggcaggaaccgggcggtgtacgtgctggcgcagtgcacgctggacatgccgccggaccactgccgggcctcctcgatggagccatggcagagagcggcgacggaaggtcagcggcgacaagatggacgtggcggtcttcggggcgcggtgcaccctgcggtatgagatggacctgcagttcttcaatgtcactggcaacagcaagatgctgtccctatatttttacagatatttttaataatgacctcagtggaccctatgcatttcttgagccaccttttgttcaaagatcccttctatataagatacaggcaaggagaaaaaatagcattctccgatatatcgagtgggatgatgcttggtggacgtgtacatactaatattaatcggtctcgaagcttctgatacactcagttctcacatgtcgcatgaaatggacctcactagaaaccaaacacccttgaatcgcagtcacccacgtcgccaacaggagtgacttcctcaccctgctccacgccctgccgccgcagagcgggagcggcggctgcgacggccgcggtgctggggaggaggatgcctccgcgctcgccaactccctcgacgcgctttgcaaggcctgcaagcctgagtaagcaagagaacaaaacccgcgggactgtgaacaagcgcagaaagaaatacgaatgcaacaagtcctacattctgttctccttttttggggggccaaaacgttgaggtctcaactcactcgtgcaagcagtttcatcgccacccccatgtgagcaatccgggacaccgcggagatgcctcgtgaggaaagcggtacggcgaggcagagcagcgtcggtggtcgtggaaggatggagcaacaaccccacatgttttgttctaatgacacagtggcgccaaggttccagactgtggcgggactgggctctgcagccgctgcaaaggagagtgcttcgtcttcaagcaactctcgaaggagacggccaccaggtcacacaaggccgccaagaacatggccaccggatacacttcggggctgtccaccaatggacctactgcaacaagtactcctccacccgcgtgcctgcataaaatggcaggggttctaccaacaatcaacacacatgtgaagcgaagctgggacgtgcatgtatgtggatccacgacacgtgcatctgtaggaaccctgattttggaaagtgctgagagaggtggcatctagaggatgtcatgtcgaacgtgtgaagtttttttagaaatatgtatatttgtgtgaagctttttagaaacttggctccattttattttctatgttcctctcggctttgtttcctatcctttccaatgacttgctatgcatttgcactgtatttggcatgtctaaaactgctacacaaaacttgatatatattttgtctaaaaatactatatccttgttatgcttgattgatctttattttgtctgctcttctattcttgtgtgggtctatcaagaatgaggcaattagataaagatatatgctttgtcagtattagctgagtctttgagcgtagcaggaaaagtcttggcacatcattgttttagttattat

SEQ ID NO: 216646 - DNA, 4001 bp, Zea Mays
ctgccgcggccgtaccccgccccgcatgctgcccggaatcagcgcctccgccgccgcagcccttccagaaatctccatcccgaatcctccgcgcccccgcctgcccccgcgcatcccgcagcccccgcccccgcgcatcccgcagccttggcgtcgtggccgccgcctctgctccctcctccatcccgcgcaacaacgacgaccgtcggggcctcgcctggcagatcaagcggggaatccacccgccaggcgtctccctgacagtggtagacggtggcggcgatgggggccgagagcgaggatgccccttccccatcctctaccctcccttgcgattccagcattggtgcccgcatccccgccgtccgaagcatggcgctcttcgtctcctccctcgccgccgccctctcccacctctccctcccatcgacctccaaccccaagcctcacccagcctcgctcctgcgcctgcgctccacctaccgccgcgctgttagcctcgcggtggccggagcaagaacggcaataggatgaagctgctgctgtccaacccctacggcttcagcagcccccgacatcgtgtgtcgggatctgggactccagcggcaaggcgaccactatgccgcacgggcgcggtgcaggagctcctccagcggcgccgcaactgcctctgagccctcatggtccagctcgagtgctcgacgcacccgctccgcacccgcccttgtcccccaggtgtcggcgtgcgggattcggtaacggtgttggagctcatccagtggcgccgcaaccgcctccgatccctcaaggtttggctcaaggctgatggccaggtcgaccgtctcctccatgcgcaggggaagaggaaggagctggagcagacggtgaatagcttctctgatttctccctctccggtcctgttgcaaagagccacaaactggttaggatgtcttggatcatcagacagatcagcatgacttgcaagcagctagctactgtttacagatgtcctctacttgccaaaaaataacaaaggggttctcgttcttgaaagctgcatagatagcacctcaacttggccactaaaacaactaagtttttttatggacatgtctgatgtttttctcaataattgtgcaaattttcctttcataattttcgtcgtcggggggcaggaaccgggcggtgtacgtgctggcgcagtgcacgctggacatgccgccggaccactgccgggcctcctcgatggagccatggcagagagcggcgacggaaggtcagcggcgacaagatggacgtggcggtcttcggggcgcggtgcaccctgcggtatgagatggacctgcagttcttcaatgtcactggcaacagcaagatgctgtccctatatttttacagatatttttaataatgacctcagtggaccctatgcatttcttgagccaccttttgttcaaagatcccttctatataagatacaggcaaggagaaaaaatagattaatcggtctcgaagcttctgatacactcagttctcacatgtcgcatgaaatggacctcactagaaaccaaacacccttgaatcgcagtcacccacgtcgccaacaggagtgacttcctcaccctgctccacgccctgccgccgcagagcgggagcggcggctgcgacggccgcggtgctggggaggaggatgcctccgcgctcgccaactccctcgacgcgctttgcaaggcctgcaagcctgagtttcatcgccacccccatgtgagcaatccgggacaccgcggagatgcctcgtgaggaaagcggtacggcgaggcagagcagcgtcggtggtcgtggaaggatggagcaacaaccccacatgttttgttctaatggtccataagtttgcaccacacaaccatttggttttatctgttgtcatttgaccttgatggaaaggagtgagatgaactatggaggaattctgatattatggatttccatttaacttcatcgtacttgcaagccatgcaatatgctattgttgttattgccctttataatctgtgattggactatactgtgtatttaaagcggtatgccacttcttctaaatactatccaaccacagattgttattgccctttatatcaaatgatttttatattgataattagtacttcattggttcttcatttaattggaattcaaacaaggatttcggtaaatatgagtgtcaacttttgctttgcattcttctgtatagtacaacacacattgtttcttgcatttggaagttgttggtctcatgtaggacacagtggcgccaaggttccagactgtggcgggactgggctctgcagccgctgcaaaggagagtgcttcgtcttcaagcaactctcgaaggagacggccaccaggtcacacaaggccgccaagaacatggccaccggatacacttcggggctgtccaccaatggacctactgcaacaagtactcctccacccgcgtgcctgcataaaatggcaggggttctaccaacaatcaacacacatgtgaagcgaagctgggacgtgcatgtatgtggatccacgacacgtgcatctgtaggaaccctgattttggtatggtttctacactcaaattcatcagtatgatataaggcaatctgctggctggtatttaagagtggccctctcttcatatcatcgaaaggtaaaactattagtggcacacgttggttttttcctttgtttccaacatgtaacattatattaggggtatgtgcagtttagggtaagtaatatactcctttgtgctcagtaagtaattgatagaaggtagaagaaggtagaaacatatgtgcagtttagagtttacctctttatgatttctgggtagccacaatattttcacattgcaattcaagtccttagtaccctggtaatcaaactaacatgtcagagcatcaggcaaattcattgtgcacctgcctattgtatgctaaagaaatcagtttttttgcatgtgttagttgtctcctaacctgctgcattttcaatttttgtgttctgtgttttgtaatttgggagcaccttcaccattgtgttattagagctaggcaccttcaccattgtgttattgatgatctttcttggtctgaatggagtttttgcacctattcacatgccagagagtttatgcattgtcctccttttttggatacactttctgttaaaaaatgctacacagttgcattctacttaccttgtgattttgatggagctctgttgttgtgcttctttgacatttgtcggtcctttgagcattaggtctgcatcatgcattatgttgttatctattgatctatatatcccatattgtggagatcactaaaatcttagtaatttaagttctgttcaaactttcaattccatcgtccgtgaaaaattgataagtatgaatgtgttgacttgactccattttatcttctccttatttgagcttgtattcttattttttaatacattgctgccctgcactgagatttctattgtaaataaacaaagtgctatttaaattttgatttattccttacgaatgtctgttggtttcaggaaagtgctgagagaggtggcatctagaggatgtcatgtcgaacgtgtgaagtttttttagaaatatgtatatttgtgtgaagctttttagaaacttggctccattttattttctatgttcctctcggctttgtttcctatcctttccaatgacttgctatgcatttgcactgtatttggcatgtctaaaactgctacacaaaacttgatatatattttgtctaaaaatactatatccttgttatgcttgattgatctttattttgtctgctcttctattcttgtgtgggtctatcaagaatgaggcaattagataaagatatatgctttgtcagtattagctgagtctttgagcgtagcaggaaaagtcttggcacatcattgttttagttattat

SEQ ID NO: 216647 - DNA, 3669 bp, Zea Mays
ctgccgcggccgtaccccgccccgcatgctgcccggaatcagcgcctccgccgccgcagcccttccagaaatctccatcccgaatcctccgcgcccccgcctgcccccgcgcatcccgcagcccccgcccccgcgcatcccgcagccttggcgtcgtggccgccgcctctgctccctcctccatcccgcgcaacaacgacgaccgtcggggcctcgcctggcagatcaagcggggaatccacccgccaggcgtctccctgacagtggtagacggtggcggcgatgggggccgagagcgaggatgccccttccccatcctctaccctcccttgcgattccagcattggtgcccgcatccccgccgtccgaagcatggcgctcttcgtctcctccctcgccgccgccctctcccacctctccctcccatcgacctccaaccccaagcctcacccagcctcgctcctgcgcctgcgctccacctaccgccgcgctgttagcctcgcggtggccggagcaagaacggcaataggatgaagctgctgctgtccaacccctacggcttcagcagcccccgacatcgtgtgtcgggatctgggactccagcggcaaggcgaccactatgccgcacgggcgcggtgcaggagctcctccagcggcgccgcaactgcctctgagccctcatggtccagctcgagtgctcgacgcacccgctccgcacccgcccttgtcccccaggtgtcggcgtgcgggattcggtaacggtgttggagctcatccagtggcgccgcaaccgcctccgatccctcaaggtttggctcaaggctgatggccaggtcgaccgtctcctccatgcgcaggggaagaggaaggagctggagcagacggtgaatagcttctctgatttctccctctccggtcctgttgcaaagagccacaaactggttaggatgtcttggatcatcagacagatcagcatgacttgcaagcagctagctactgtttacagatgtcctctacttgccaaaaaataacaaaggggttctcgttcttgaaagctgcatagatagcacctcaacttggccactaaaacaactaagtttttttatggacatgtctgatgtttttctcaataattgtgcaaattttcctttcataattttcgtcgtcggggggcaggaaccgggcggtgtacgtgctggcgcagtgcacgctggacatgccgccggaccactgccgggcctcctcgatggagccatggcagagagcggcgacggaaggtcagcggcgacaagatggacgtggcggtcttcggggcgcggtgcaccctgcggtatgagatggacctgcagttcttcaatgtcactggcaacagcaagatgctgtccctatatttttacagatatttttaataatgacctcagtggaccctatgcatttcttgagccaccttttgttcaaagatcccttctatataagatacaggcaaggagaaaaaatagattaatcggtctcgaagcttctgatacactcagttctcacatgtcgcatgaaatggacctcactagaaaccaaacacccttgaatcgcagtcacccacgtcgccaacaggagtgacttcctcaccctgctccacgccctgccgccgcagagcgggagcggcggctgcgacggccgcggtgctggggaggaggatgcctccgcgctcgccaactccctcgacgcgctttgcaaggcctgcaagcctgaggtgcgtgtactcactccttcactcgtgcgcaacttgttccttctccaacgtgttccagaacaccacagcatgcctctgtccacatacttcattggttcttcatttaattggaattcaaacaaggatttcggtaaatatgagtgtcaacttttgctttgcattcttctgtatagtacaacacacattgtttcttgcatttggaagttgttggtctcatgtaggacacagtggcgccaaggttccagactgtggcgggactgggctctgcagccgctgcaaaggagagtgcttcgtcttcaagcaactctcgaaggagacggccaccaggtcacacaaggccgccaagaacatggccaccggatacacttcggggctgtccaccaatggacctactgcaacaagtactcctccacccgcgtgcctgcataaaatggcaggggttctaccaacaatcaacacacatgtgaagcgaagctgggacgtgcatgtatgtggatccacgacacgtgcatctgtaggaaccctgattttggtatggtttctacactcaaattcatcagtatgatataaggcaatctgctggctggtatttaagagtggccctctcttcatatcatcgaaaggtaaaactattagtggcacacgttggttttttcctttgtttccaacatgtaacattatattaggggtatgtgcagtttagggtaagtaatatactcctttgtgctcagtaagtaattgatagaaggtagaagaaggtagaaacatatgtgcagtttagagtttacctctttatgatttctgggtagccacaatattttcacattgcaattcaagtccttagtaccctggtaatcaaactaacatgtcagagcatcaggcaaattcattgtgcacctgcctattgtatgctaaagaaatcagtttttttgcatgtgttagttgtctcctaacctgctgcattttcaatttttgtgttctgtgttttgtaatttgggagcaccttcaccattgtgttattagagctaggcaccttcaccattgtgttattgatgatctttcttggtctgaatggagtttttgcacctattcacatgccagagagtttatgcattgtcctccttttttggatacactttctgttaaaaaatgctacacagttgcattctacttaccttgtgattttgatggagctctgttgttgtgcttctttgacatttgtcggtcctttgagcattaggtctgcatcatgcattatgttgttatctattgatctatatatcccatattgtggagatcactaaaatcttagtaatttaagttctgttcaaactttcaattccatcgtccgtgaaaaattgataagtatgaatgtgttgacttgactccattttatcttctccttatttgagcttgtattcttattttttaatacattgctgccctgcactgagatttctattgtaaataaacaaagtgctatttaaattttgatttattccttacgaatgtctgttggtttcaggaaagtgctgagagaggtggcatctagaggatgtcatgtcgaacgtgtgaagtttttttagaaatatgtatatttgtgtgaagctttttagaaacttggctccattttattttctatgttcctctcggctttgtttcctatcctttccaatgacttgctatgcatttgcactgtatttggcatgtctaaaactgctacacaaaacttgatatatattttgtctaaaaatactatatccttgttatgcttgattgatctttattttgtctgctcttctattcttgtgtgggtctatcaagaatgaggcaattagataaagatatatgctttgtcagtattagctgagtctttgagcgtagcaggaaaagtcttggcacatcattgttttagttattat

SEQ ID NO: 216648 - DNA, 2228 bp, Zea Mays
aaaccctggttctaccacgcgactaactgagccgccgacgccaggcctccacgccgcatccgcgtgaccgcgcctccgagctccatagccccgggccgccggcgccgggccatcgtgatctcgtccgcctcccagcatcgaccggacctgcccgcagcccgcgcccaggccatcgcgccgccgacccgagcttcgccaggcgcctaggccgctcgcccgcccggccggcaggacgactgggcgagctcctccccgcggaggcggggacggcggacccgcccccaggccgagtcgccgagctccgtcccgcgcgggcgcccccctgcccagtcccagccgccccgctcctgtcccggccaggctcagctccgccctgttccggcctctgtacagcatccaggcacgacgacgcgagacgagatggcaggcctcgaacggcctcgccgccgccctccgccagaccccgtcgccgtgctccggggccaccgcgccgcagtcaacgacgcctgcttccacccctccctccccctcctcttctccggccagggcagggatgggacttgtaaatgttgggcgattgaagaagctgggctttcaaggaagccactacttacaatcaaaacaagtacataccatttctgcaagatgtcactggtgaagtcttcttttacacatgccactgaatctggctctagcagctcagctagtgacgtggaaccacaaatagtgccaactgaaaatgcagaatgccatggtgtaaaccctacaataggcccccaagaacatgatcaatgcactacctctaatgggcataatatgctggcaattgctggtcaagaatcctctcaggttgagctttgggacattacaagtgctagaaagatcgtaaccttgccccaaacatgtagtgccaatgcgacagatcatcctactaagaaaaagggactatgcatggctgtgcaagctttcatcccccatgaatccgcaggctacgtaaatattttgtcaagttatgaagatggaagcactctttggtgggatgtacgaaagcctggattacctttatcttcagtgaagtatcattcagaatcaggtgtgcagctttatccattgctattgatggattttgcaatggtggaatctcaggaggtgctgatgataaagtagtcatgttcacgctcgaccatccaaagggcacatttattcttaggaaagaaatagaactcgagcgaccgggtattgctggcacagcaattcgtccagacaacaagatcgctgcaaccgctggctgggatcacaggattcgagtgtacaactacaacaaaggaaatgctctagccgtgttgaagtatcacagtgcttcgtgcaatgcagtgaccttctcatctgactgcaagctcatggcttcctgctcggcggataccacggttgcgctgtgggacctctatcccccaaaaccccaaagcaaagcggacatcacagaaacagacgaggcctcctgctagctcatgtagtttgggccttcctgataccttctggcagaattttggagcttccgtgcaatgaaaatctgaacttgtcgcaacagtgcaagcgatttattctttttcgtcaaagaaaagagtaagttatgatgtgccttccacagggaaacgcaaacgtatgcatgcaactgttgttaggaacggttctcttgatttctttatttttcattgaaattctactcggtttcgtggaacagttgtagtgtctcaagagcatgaaattgatttaaaggcaaggcagttgaagaactgactctttgaatactcagatgattgatttgaacaaatttctgcaaatttccagtacactgtacacctacatttgctactgttcgatccaatggcagtactgaaccgggatgcagttcttgctgttgtgcatgtccaggaaagagggtatcgtatcccaatgttccatgtagttggggggttctattgctagaaaagaacattagtccttgctgactcggtgactccaatgcgatgcgagcccatgaacgacggtcctaaccttcacgcgcaacagccgcaatcgccgctcgttctagttctttggcgtcggccagccacggccgcctcaacgccgccgtatcttcaacgtcacttgcggcatccgacgacggagccgaggtgccatcgaaggtgccgtcgaacggcgcctcgcagaaggccatcgcggccacg

SEQ ID NO: 216649 - DNA, 3269 bp, Zea Mays
cgttccagcggtatgacatgatcccacagaacgctttgagagtagcagaggaaggaggaacgaggaagggtttatagtttggattatatgattggatgatcggatggtggatcctctttcccaccaagtcaaggtttgtgaattcgggagtgctagaatcttgatcttccacaagagaatgtctccagaagcaatggataggcttctagaaaaagataaagtgccaaacccatgctatagagtatagactgaggtactgattttccttatctgatgaaccatctgcttggtgctgtgacgatctctaggatatgcgacttgttaaaatgattttgattgcttcgttggttacattagttctactattaccatgcattaatggccttcctgactatcatttggttatctcatgtttctgagaataaaagataaccattgctgtaaagtactaacgttgttgtgcgcttaatctgcatttgtatttgtttgccttattacacttgcttgcctttatcttgtgttttctatgtataagtgtgcaattttggcatttttgtttatctgttactgttgttctctacctacccacgttagataaatgattcacacggcactgtacaggattcaacactggcatgattctaattgaactttacctattactagcatcctaagtgatcccttcatttgtttgtttcagtttcaacattggaaggctcaactaaatataccagttccggatacacactacaggacaaaggtgcacagcacccgatagcgcgctgccttttttagtgtagaactagaaaaccaacgcacaacacaaaccagagagttctccatggacgtcggtggcggcgccaccggcacacgctgccgagaccccaccgctgacccctcgtcccagttcttcgttgacgctggccatccatacgcagtcgctgcagccactgcgctcacctcccaccgcaccaagtccaagtggtcccacctctcttcggtccccgtcccctcccccttcctggcctccgccgccgccggcgtgctcctcctcctccgccaccgaccgcacaccgcgctccgcttccatgccttcgccatccgccgcctccttccctcccgctcccctccccctctcgtcttctctgccgccgcagcccacgtcgcggcggcctcccgccttcggggccctgccctctccatccttgcctctgcctcccgccactgctcaccggcccagatcttcaatgccctcgctgccacctaccgctgctttgcctccgccccattcatcttcgacctcctcctcctcgcctaccttcgctcccgccgcgacgtcctcgctgcggcctccgtcgcccgccgcatcctcgctgccggcgcacggccgctcccctccactgcggcagctcttcttcgttcactcccttccgccaccgcggccctcgacatgtatcatcaaatctacacgcatccaagtccacggagcaatcacctcctcctgccgactgttcacaccttcaattccctcctccttgctttccaccgcgaaggcaagtgtgatgaattcaagattgtgctccaggaaatggacaaatattcctgcaagcacaacgtgtgcacctacagcatcaggatgtctgggtactgcaatggcgggcatgtggataaggcgcgaacactatgggatgagatgattcaggaagggatccagcctgatataactgcgtacaacacaatgattagtgggtattgccattctggggaggtaggggtggcagaggagatgtttaaaaatatgttgatgggtgggattgattcaagtgccacgacgttcgaatggttggtcagagggcattgtatggcacgggatgtcgaggcagcaatgcttgtgcgtgcagacatgaaaaggaaggggtttgggttggcgccagaggttgttgaggaattgctggatggattatgtcaaaatgggagggttgaggatggcttgagtgttttgcgagaggagatgaagagggaagaatttgtgccaacccggaggagttacgaggtgttgattatggggttttgtgatggagggaaggtggaggtggcaatcagactccaagcagagatggctggaaaaggattcactgctggcagcgaggtgtactatgcatttattagtgcttatgagaagtctgaaaattatgagatggtcgagaagttgaggaaggaaatgtcggcgatgggcacttagagcatgtctagcagctcaccaataattcatccctaataaaatggtattggtggtcaccaatagtgctttttttggaatattggggagactctatagtagattaccaataatctttcccaatacatgggacccacatgtcagaatagaggatgtgggaggaagaagatgacgacagttgttgtggtcccaacacctatagagggagatgcaactccccttttatttgaggggagatgggagatttgttttggtgaccaccaaaaaaagggagagctattggggagctgttggagcaatggaattgcctcatctcccccaatatgacagttttatggggatgagggatggtattggagagctactggatgctctatcggatctgatatttggcttggatattgcacagtgatgcatggatatcaacctcacctaattgcagttgagaactatgagtggtgcaacaaattctgaattggttgaaggagttctctcctagcactatcctggagacggatgttggagaaatatgactgctggatctgcaataggataatgtcttttagtcgatcccttttgtgcttgtttggtgaacttgtgtccccaatctgttgaactctgtaaacatttgctttccataaaagcagagatattctccttaaaaactcagtccagaatggtgatatatgaatgatccctgagagtttataaggtacaaccgtacaagtccaggtgctagagacttctcaatttgctggaaaatgctgtagtattttgtgttgacttgctgtttgatatatgctcagtacctcactgtaaaatgtggttctcttgtttgcctcttaacaaaatcctgagaaatgacatgagaacaaattgagaattagtagatcagtacttaactgcaaaacttttgtagttggaattaatttccagtctctagcaaagtagcaatagctgagagagctaaacttgagctattgtgtaatcgaaaatggaggcaccattgcagccaaacttatgaactaac

SEQ ID NO: 216650 - DNA, 3601 bp, Zea Mays
  misc_feature (1)..(1): n is a, c, g, or t
nagcgttccagcggtatgacatgatcccacagaacgctttgagagtagcagaggaaggaggaacgaggaagggtttatagtttggattatatgattggatgatcggatggttagtagtttggattggaagattggatcacatcgcgtagtccacctctcctctccagtttccacgagaaaaaaagtactggcatattaatttcagatttttagtaccacttatgtcattaacattagcaatgtcatgtatcaaatccgccgttcagtcattcagtgctctgttcaagtgtaagtgttcagtaccaatttttaatcatgttcagtattactacatcgtggttcatgatgttcacttggaaaatgttgacctttttttttgttctttgataggtggatcctctttcccaccaagtcaaggtttgtgaattcgggagtgctagaatcttgatcttccacaagagaatgtctccagaagcaatggataggcttctagaaaaagataaagtgccaaacccatgctatagagtatagactgaggtactgattttccttatctgatgaaccatctgcttggtgctgtgacgatctctaggatatgcgacttgttaaaatgattttgattgcttcgttggttacattagttctactattaccatgcattaatggccttcctgactatcatttggttatctcatgtttctgagaataaaagataaccattgctgtaaagtactaacgttgttgtgcgcttaatctgcatttgtatttgtttgccttattacacttgcttgcctttatcttgtgttttctatgtataagtgtgcaattttggcatttttgtttatctgttactgttgttctctacctacccacgttagataaatgattcacacggcactgtacaggattcaacactggcatgattctaattgaactttacctattactagcatcctaagtgatcccttcatttgtttgtttcagtttcaacattggaaggctcaactaaatataccagttccggatacacactacaggacaaaggtgcacagcacccgatagcgcgctgccttttttagtgtagaactagaaaaccaacgcacaacacaaaccagagagttctccatggacgtcggtggcggcgccaccggcacacgctgccgagaccccaccgctgacccctcgtcccagttcttcgttgacgctggccatccatacgcagtcgctgcagccactgcgctcacctcccaccgcaccaagtccaagtggtcccacctctcttcggtccccgtcccctcccccttcctggcctccgccgccgccggcgtgctcctcctcctccgccaccgaccgcacaccgcgctccgcttccatgccttcgccatccgccgcctccttccctcccgctcccctccccctctcgtcttctctgccgccgcagcccacgtcgcggcggcctcccgccttcggggccctgccctctccatccttgcctctgcctcccgccactgctcaccggcccagatcttcaatgccctcgctgccacctaccgctgctttgcctccgccccattcatcttcgacctcctcctcctcgcctaccttcgctcccgccgcgacgtcctcgctgcggcctccgtcgcccgccgcatcctcgctgccggcgcacggccgctcccctccactgcggcagctcttcttcgttcactcccttccgccaccgcggccctcgacatgtatcatcaaatctacacgcatccaagtccacggagcaatcacctcctcctgccgactgttcacaccttcaattccctcctccttgctttccaccgcgaaggcaagtgtgatgaattcaagattgtgctccaggaaatggacaaatattcctgcaagcacaacgtgtgcacctacagcatcaggatgtctgggtactgcaatggcgggcatgtggataaggcgcgaacactatgggatgagatgattcaggaagggatccagcctgatataactgcgtacaacacaatgattagtgggtattgccattctggggaggtaggggtggcagaggagatgtttaaaaatatgttgatgggtgggattgattcaagtgccacgacgttcgaatggttggtcagagggcattgtatggcacgggatgtcgaggcagcaatgcttgtgcgtgcagacatgaaaaggaaggggtttgggttggcgccagaggttgttgaggaattgctggatggattatgtcaaaatgggagggttgaggatggcttgagtgttttgcgagaggagatgaagagggaagaatttgtgccaacccggaggagttacgaggtgttgattatggggttttgtgatggagggaaggtggaggtggcaatcagactccaagcagagatggctggaaaaggattcactgctggcagcgaggtgtactatgcatttattagtgcttatgagaagtctgaaaattatgagatggtcgagaagttgaggaaggaaatgtcggcgatgggcacttagagcatgtctagcagctcaccaataattcatccctaataaaatggtattggtggtcaccaatagtgctttttttggaatattggggagactctatagtagattaccaataatctttcccaatacatgggacccacatgtcagaatagaggatgtgggaggaagaagatgacgacagttgttgtggtcccaacacctatagagggagatgcaactccccttttatttgaggggagatgggagatttgttttggtgaccaccaaaaaaagggagagctattggggagctgttggagcaatggaattgcctcatctcccccaatatgacagttttatggggatgagggatggtattggagagctactggatgctctatcggatctgatatttggcttggatattgcacagtgatgcatggatatcaacctcacctaattgcagttgagaactatggtgagaggtgtgtaaagcttgtttgcttcaaaccgatggtaacaactgagtggtgcaacaaattctgaattggttgaaggagttctctcctagcactatcctggagacggatgttggagaaatatgactgctggatctgcaataggataatgtcttttagtcgatcccttttgtgcttgtttggtgaacttgtgtccccaatctgttgaactctgtaaacatttgctttccataaaagcagagatattctccttaaaaactcagtccagaatggtgatatatgaatgatccctgagagtttataaggtacaaccgtacaagtccaggtgctagagacttctcaatttgctggaaaatgctgtagtattttgtgttgacttgctgtttgatatatgctcagtacctcactgtaaaatgtggttctcttgtttgcctcttaacaaaatcctgagaaatgacatgagaacaaattgagaattagtagatcagtacttaactgcaaaacttttgtagttggaattaatttccagtctctagcaaagtagcaatagctgagagagctaaacttgagctattgtgtaatcgaaaatggaggcaccattgcagccaaacttatgaactaac

SEQ ID NO: 216651 - DNA, 3586 bp, Zea Mays
  misc_feature (1)..(1): n is a, c, g, or t
nagcgttccagcggtatgacatgatcccacagaacgctttgagagtagcagaggaaggaggaacgaggaagggtttatagtttggattatatgattggatgatcggatggttagtagtttggattggaagattggatcacatcgcgtagtccacctctcctctccagtttccacgagaaaaaaagtactggcatattaatttcagatttttagtaccacttatgtcattaacattagcaatggtaaattcctcttattttgttaacgtatctctcaacatgcttatttatatttatttgctgcagaacatattaaatctttgcttaattttgaattgttcgctgtaaattagaacttatatgtgcatatacatgtagtcatgtatcaaatccgccgttcagtcattcagtgctctgttcaagtgtggatcctctttcccaccaagtcaaggtttgtgaattcgggagtgctagaatcttgatcttccacaagagaatgtctccagaagcaatggataggcttctagaaaaagataaagtgccaaacccatgctatagagtatagactgaggtactgattttccttatctgatgaaccatctgcttggtgctgtgacgatctctaggatatgcgacttgttaaaatgattttgattgcttcgttggttacattagttctactattaccatgcattaatggccttcctgactatcatttggttatctcatgtttctgagaataaaagataaccattgctgtaaagtactaacgttgttgtgcgcttaatctgcatttgtatttgtttgccttattacacttgcttgcctttatcttgtgttttctatgtataagtgtgcaattttggcatttttgtttatctgttactgttgttctctacctacccacgttagataaatgattcacacggcactgtacaggattcaacactggcatgattctaattgaactttacctattactagcatcctaagtgatcccttcatttgtttgtttcagtttcaacattggaaggctcaactaaatataccagttccggatacacactacaggacaaaggtgcacagcacccgatagcgcgctgccttttttagtgtagaactagaaaaccaacgcacaacacaaaccagagagttctccatggacgtcggtggcggcgccaccggcacacgctgccgagaccccaccgctgacccctcgtcccagttcttcgttgacgctggccatccatacgcagtcgctgcagccactgcgctcacctcccaccgcaccaagtccaagtggtcccacctctcttcggtccccgtcccctcccccttcctggcctccgccgccgccggcgtgctcctcctcctccgccaccgaccgcacaccgcgctccgcttccatgccttcgccatccgccgcctccttccctcccgctcccctccccctctcgtcttctctgccgccgcagcccacgtcgcggcggcctcccgccttcggggccctgccctctccatccttgcctctgcctcccgccactgctcaccggcccagatcttcaatgccctcgctgccacctaccgctgctttgcctccgccccattcatcttcgacctcctcctcctcgcctaccttcgctcccgccgcgacgtcctcgctgcggcctccgtcgcccgccgcatcctcgctgccggcgcacggccgctcccctccactgcggcagctcttcttcgttcactcccttccgccaccgcggccctcgacatgtatcatcaaatctacacgcatccaagtccacggagcaatcacctcctcctgccgactgttcacaccttcaattccctcctccttgctttccaccgcgaaggcaagtgtgatgaattcaagattgtgctccaggaaatggacaaatattcctgcaagcacaacgtgtgcacctacagcatcaggatgtctgggtactgcaatggcgggcatgtggataaggcgcgaacactatgggatgagatgattcaggaagggatccagcctgatataactgcgtacaacacaatgattagtgggtattgccattctggggaggtaggggtggcagaggagatgtttaaaaatatgttgatgggtgggattgattcaagtgccacgacgttcgaatggttggtcagagggcattgtatggcacgggatgtcgaggcagcaatgcttgtgcgtgcagacatgaaaaggaaggggtttgggttggcgccagaggttgttgaggaattgctggatggattatgtcaaaatgggagggttgaggatggcttgagtgttttgcgagaggagatgaagagggaagaatttgtgccaacccggaggagttacgaggtgttgattatggggttttgtgatggagggaaggtggaggtggcaatcagactccaagcagagatggctggaaaaggattcactgctggcagcgaggtgtactatgcatttattagtgcttatgagaagtctgaaaattatgagatggtcgagaagttgaggaaggaaatgtcggcgatgggcacttagagcatgtctagcagctcaccaataattcatccctaataaaatggtattggtggtcaccaatagtgctttttttggaatattggggagactctatagtagattaccaataatctttcccaatacatgggacccacatgtcagaatagaggatgtgggaggaagaagatgacgacagttgttgtggtcccaacacctatagagggagatgcaactccccttttatttgaggggagatgggagatttgttttggtgaccaccaaaaaaagggagagctattggggagctgttggagcaatggaattgcctcatctcccccaatatgacagttttatggggatgagggatggtattggagagctactggatgctctatcggatctgatatttggcttggatattgcacagtgatgcatggatatcaacctcacctaattgcagttgagaactatgagtggtgcaacaaattctgaattggttgaaggagttctctcctagcactatcctggagacggatgttggagaaatatgactgctggatctgcaataggataatgtcttttagtcgatcccttttgtgcttgtttggtgaacttgtgtccccaatctgttgaactctgtaaacatttgctttccataaaagcagagatattctccttaaaaactcagtccagaatggtgatatatgaatgatccctgagagtttataaggtacaaccgtacaagtccaggtgctagagacttctcaatttgctggaaaatgctgtagtattttgtgttgacttgctgtttgatatatgctcagtacctcactgtaaaatgtggttctcttgtttgcctcttaacaaaatcctgagaaatgacatgagaacaaattgagaattagtagatcagtacttaactgcaaaacttttgtagttggaattaatttccagtctctagcaaagtagcaatagctgagagagctaaacttgagctattgtgtaatcgaaaatggaggcaccattgcagccaaacttatgaactaac

SEQ ID NO: 216652 - DNA, 2948 bp, Zea Mays
  misc_feature (1)..(1): n is a, c, g, or t
nagcgttccagcggtatgacatgatcccacagaacgctttgagagtagcagaggaaggaggaacgaggaagggtttatagtttggattatatgattggatgatcggatggttagtagtttggattggaagattggatcacatcgcgtagtccacctctcctctccagtttccacgagaaaaaaagtggatcctctttcccaccaagtcaaggtttgtgaattcgggagtgctagaatcttgatcttccacaagagaatgtctccagaagcaatggataggcttctagaaaaagataaagtgccaaacccatgctatagagtatagactgagtttcaacattggaaggctcaactaaatataccagttccggatacacactacaggacaaaggtgcacagcacccgatagcgcgctgccttttttagtgtagaactagaaaaccaacgcacaacacaaaccagagagttctccatggacgtcggtggcggcgccaccggcacacgctgccgagaccccaccgctgacccctcgtcccagttcttcgttgacgctggccatccatacgcagtcgctgcagccactgcgctcacctcccaccgcaccaagtccaagtggtcccacctctcttcggtccccgtcccctcccccttcctggcctccgccgccgccggcgtgctcctcctcctccgccaccgaccgcacaccgcgctccgcttccatgccttcgccatccgccgcctccttccctcccgctcccctccccctctcgtcttctctgccgccgcagcccacgtcgcggcggcctcccgccttcggggccctgccctctccatccttgcctctgcctcccgccactgctcaccggcccagatcttcaatgccctcgctgccacctaccgctgctttgcctccgccccattcatcttcgacctcctcctcctcgcctaccttcgctcccgccgcgacgtcctcgctgcggcctccgtcgcccgccgcatcctcgctgccggcgcacggccgctcccctccactgcggcagctcttcttcgttcactcccttccgccaccgcggccctcgacatgtatcatcaaatctacacgcatccaagtccacggagcaatcacctcctcctgccgactgttcacaccttcaattccctcctccttgctttccaccgcgaaggcaagtgtgatgaattcaagattgtgctccaggaaatggacaaatattcctgcaagcacaacgtgtgcacctacagcatcaggatgtctgggtactgcaatggcgggcatgtggataaggcgcgaacactatgggatgagatgattcaggaagggatccagcctgatataactgcgtacaacacaatgattagtgggtattgccattctggggaggtaggggtggcagaggagatgtttaaaaatatgttgatgggtgggattgattcaagtgccacgacgttcgaatggttggtcagagggcattgtatggcacgggatgtcgaggcagcaatgcttgtgcgtgcagacatgaaaaggaaggggtttgggttggcgccagaggttgttgaggaattgctggatggattatgtcaaaatgggagggttgaggatggcttgagtgttttgcgagaggagatgaagagggaagaatttgtgccaacccggaggagttacgaggtgttgattatggggttttgtgatggagggaaggtggaggtggcaatcagactccaagcagagatggctggaaaaggattcactgctggcagcgaggtgtactatgcatttattagtgcttatgagaagtctgaaaattatgagatggtcgagaagttgaggaaggaaatgtcggcgatgggcacttagagcatgtctagcagctcaccaataattcatccctaataaaatggtattggtggtcaccaatagtgctttttttggaatattggggagactctatagtagattaccaataatctttcccaatacatgggacccacatgtcagaatagaggatgtgggaggaagaagatgacgacagttgttgtggtcccaacacctatagagggagatgcaactccccttttatttgaggggagatgggagatttgttttggtgaccaccaaaaaaagggagagctattggggagctgttggagcaatggaattgcctcatctcccccaatatgacagttttatggggatgagggatggtattggagagctactggatgctctatcggatctgatatttggcttggatattgcacagtgatgcatggatatcaacctcacctaattgcagttgagaactatggtgagaggtgtgtaaagcttgtttgcttcaaaccgatggtaacaactgagtggtgcaacaaattctgaattggttgaaggagttctctcctagcactatcctggagacggatgttggagaaatatgactgctggatctgcaataggataatgtcttttagtcgatcccttttgtgcttgtttggtgaacttgtgtccccaatctgttgaactctgtaaacatttgctttccataaaagcagagatattctccttaaaaactcagtccagaatggtgatatatgaatgatccctgagagtttataaggtacaaccgtacaagtccaggtgctagagacttctcaatttgctggaaaatgctgtagtattttgtgttgacttgctgtttgatatatgctcagtacctcactgtaaaatgtggttctcttgtttgcctcttaacaaaatcctgagaaatgacatgagaacaaattgagaattagtagatcagtacttaactgcaaaacttttgtagttggaattaatttccagtctctagcaaagtagcaatagctgagagagctaaacttgagctattgtgtaatcgaaaatggaggcaccattgcagccaaacttatgaactaac

SEQ ID NO: 216653 - DNA, 3348 bp, Zea Mays
  misc_feature (1)..(2): n is a, c, g, or t
nnagcgttccagcggtatgacatgatcccacagaacgctttgagagtagcagaggaaggaggaacgaggaagggtttatagtttggattatatgattggatgatcggatggttagtagtttggattggaagattggatcacatcgcgtagtccacctctcctctccagtttccacgagaaaaaaagtggatcctctttcccaccaagtcaaggtttgtgaattcgggagtgctagaatcttgatcttccacaagagaatgtctccagaagcaatggataggcttctagaaaaagataaagtgccaaacccatgctatagagtatagactgaggtactgattttccttatctgatgaaccatctgcttggtgctgtgacgatctctaggatatgcgacttgttaaaatgattttgattgcttcgttggttacattagttctactattaccatgcattaatggccttcctgactatcatttggttatctcatgtttctgagaataaaagataaccattgctgtaaagtactaacgttgttgtgcgcttaatctgcatttgtatttgtttgccttattacacttgcttgcctttatcttgtgttttctatgtataagtgtgcaattttggcatttttgtttatctgttactgttgttctctacctacccacgttagataaatgattcacacggcactgtacaggattcaacactggcatgattctaattgaactttacctattactagcatcctaagtgatcccttcatttgtttgtttcagtttcaacattggaaggctcaactaaatataccagttccggatacacactacaggacaaaggtgcacagcacccgatagcgcgctgccttttttagtgtagaactagaaaaccaacgcacaacacaaaccagagagttctccatggacgtcggtggcggcgccaccggcacacgctgccgagaccccaccgctgacccctcgtcccagttcttcgttgacgctggccatccatacgcagtcgctgcagccactgcgctcacctcccaccgcaccaagtccaagtggtcccacctctcttcggtccccgtcccctcccccttcctggcctccgccgccgccggcgtgctcctcctcctccgccaccgaccgcacaccgcgctccgcttccatgccttcgccatccgccgcctccttccctcccgctcccctccccctctcgtcttctctgccgccgcagcccacgtcgcggcggcctcccgccttcggggccctgccctctccatccttgcctctgcctcccgccactgctcaccggcccagatcttcaatgccctcgctgccacctaccgctgctttgcctccgccccattcatcttcgacctcctcctcctcgcctaccttcgctcccgccgcgacgtcctcgctgcggcctccgtcgcccgccgcatcctcgctgccggcgcacggccgctcccctccactgcggcagctcttcttcgttcactcccttccgccaccgcggccctcgacatgtatcatcaaatctacacgcatccaagtccacggagcaatcacctcctcctgccgactgttcacaccttcaattccctcctccttgctttccaccgcgaaggcaagtgtgatgaattcaagattgtgctccaggaaatggacaaatattcctgcaagcacaacgtgtgcacctacagcatcaggatgtctgggtactgcaatggcgggcatgtggataaggcgcgaacactatgggatgagatgattcaggaagggatccagcctgatataactgcgtacaacacaatgattagtgggtattgccattctggggaggtaggggtggcagaggagatgtttaaaaatatgttgatgggtgggattgattcaagtgccacgacgttcgaatggttggtcagagggcattgtatggcacgggatgtcgaggcagcaatgcttgtgcgtgcagacatgaaaaggaaggggtttgggttggcgccagaggttgttgaggaattgctggatggattatgtcaaaatgggagggttgaggatggcttgagtgttttgcgagaggagatgaagagggaagaatttgtgccaacccggaggagttacgaggtgttgattatggggttttgtgatggagggaaggtggaggtggcaatcagactccaagcagagatggctggaaaaggattcactgctggcagcgaggtgtactatgcatttattagtgcttatgagaagtctgaaaattatgagatggtcgagaagttgaggaaggaaatgtcggcgatgggcacttagagcatgtctagcagctcaccaataattcatccctaataaaatggtattggtggtcaccaatagtgctttttttggaatattggggagactctatagtagattaccaataatctttcccaatacatgggacccacatgtcagaatagaggatgtgggaggaagaagatgacgacagttgttgtggtcccaacacctatagagggagatgcaactccccttttatttgaggggagatgggagatttgttttggtgaccaccaaaaaaagggagagctattggggagctgttggagcaatggaattgcctcatctcccccaatatgacagttttatggggatgagggatggtattggagagctactggatgctctatcggatctgatatttggcttggatattgcacagtgatgcatggatatcaacctcacctaattgcagttgagaactatgagtggtgcaacaaattctgaattggttgaaggagttctctcctagcactatcctggagacggatgttggagaaatatgactgctggatctgcaataggataatgtcttttagtcgatcccttttgtgcttgtttggtgaacttgtgtccccaatctgttgaactctgtaaacatttgctttccataaaagcagagatattctccttaaaaactcagtccagaatggtgatatatgaatgatccctgagagtttataaggtacaaccgtacaagtccaggtgctagagacttctcaatttgctggaaaatgctgtagtattttgtgttgacttgctgtttgatatatgctcagtacctcactgtaaaatgtggttctcttgtttgcctcttaacaaaatcctgagaaatgacatgagaacaaattgagaattagtagatcagtacttaactgcaaaacttttgtagttggaattaatttccagtctctagcaaagtagcaatagctgagagagctaaacttgagctattgtgtaatcgaaaatggaggcaccattgcagccaaacttatgaactaac

SEQ ID NO: 216654 - DNA, 680 bp, Zea Mays
ctctccccctgaccctctccctaggcactctgcccactggtgtcgatctggaggcgacgatcgatatagacactgggttgtcgttgataatctgcccagattgtagggacgtgagggtgtttgctgccactaccaagtttgggtctaatgagggaaagagatatttcaagtgtcctaggaagacttatggacatggaacatgtactaggtattggttcgaggaagaatatgtggtgttctttcattataacggatatctaccaatgacttcctcgatcgttgcagcagcttcgacaatagaagttcctaagattgtgagaagaattgttagcttagagaaaaatctgaatgaggtgaaggacaaagttggcaacaacagggaaggaatgggaagctgcatttgtcttgtgtgcggatgtgtgaatgtaacactattcctgttgttggccatcgttttgcttgtagttgtagtgctcaagtaggcaaggctgatgaagtatgggcatttctgttgaagttgtgtgttgaagaacacaatgtattgaatctgttgtatttgcatttgctatgaagtatgggcctttatgggcattccatgacatttgtcagtggtcataagaaacatccagtatgtaacccagaactatatatatcatgtccatgaattatgggcatcagta

SEQ ID NO: 216655 - DNA, 1238 bp, Zea Mays
cggggaaaaaattcccgtcgtctccactccaccagtccacctgcatcctccctctctctctcccgctcccgtgctctctccctctccccaggatccgaattgccagcgcaccagtcgagctcgcgggacctcgccggcgccggcgatggcctcctcccttttggccggacggggagggggccaccaccacaactggggggagacgcgcgccccgctcgagcccataccccccaaccctagtcccagccagccccacccgcgcgccgacgggtccaagtccaagccgcgggcggcggccggctacgtgaagttccgcccggcgtccctgggccaccgcgaggcccgcgcgctccgggaccgcctcgcggtggagctcggccaggtccgcgccctcctctcccgcatcgacacctggcagcagcagggcccgccgccgcgcgcggtgctccgcggggcgatgcggaagcggtgcggccagatcctcagcaggctgcgcaaggacaagcgcagcgtgtggttcaacgcgcccgtcgaggtggagcgcctcggcctccacgactaccatgccgtcatcaagcgccccatggatctcggcaccgtcaaggagggcctcgccgccgggaggagagtgaggaacctgtgaagagcactacagtggctgagcaggtggatgagtatgttgatattggggatgaaatgccagcagccacttaccaatccatggagatcgagaaggacgctgaaggttctgagtcgaggagctcaggggacagtgcctcaggagctggcaatgctcattctttgacttaggggaggttggtaacaataggatttgaaaatctgaatgatccgagttcgtgtgcaggtaattgtaagtgtgtagctgtttctgagacatgggtgtctgcttaggctttgattacgttagtagtagataacaaactggctttgtgggtgtctgacagcagtacagcaccatgtgtatgtaagctggaggtggaaggtactggtgtgttaaaagtagctgatcgaccttctcgtatgaagggggccagggctagtgtctgtgttcttaatggtagggttgatcgaccttctcgtaattgatgctttgtgcatgacattaaagtatggttttataagtaacaatgcagtatcatttgttgggtgatgacttttgatgtaagagttatttctgcattttggataggattacgcaagataaatttcaacgacca

SEQ ID NO: 216656 - DNA, 1769 bp, Zea Mays
cggggaaaaaattcccgtcgtctccactccaccagtccacctgcatcctccctctctctctcccgctcccgtgctctctccctctccccaggatccgaattgccagcgcaccagtcgagctcgcgggacctcgccggcgccggcgatggcctcctcccttttggccggacggggagggggccaccaccacaactggggggagacgcgcgccccgctcgagcccataccccccaaccctagtcccagccagccccacccgcgcgccgacgggtccaagtccaagccgcgggcggcggccggctacgtgaagttccgcccggcgtccctgggccaccgcgaggcccgcgcgctccgggaccgcctcgcggtggagctcggccaggtccgcgccctcctctcccgcatcgacacctggcagcagcagggcccgccgccgcgcgcggtgctccgcggggcgatgcggaagcggtgcggccagatcctcagcaggctgcgcaaggacaagcgcagcgtgtggttcaacgcgcccgtcgaggtggagcgcctcggcctccacgactaccatgccgtcatcaagcgccccatggatctcggcaccgtcaaggagggcctcgccgccgggaggtacgcctcgcacgacgacttcgcggccgacgtccgcctcaccttcaccaacgcgctgcggtacaacccggtcggccacgaggttcacacgttcgctggcgccctcctcgcctacttcgagaggatgtacaaggaggcgctcgtttgtttagaggaagagcgcaagcgccttgagccgccgaggccagtggcggctgagctgccacctccgccggcagttgagcctgtcgaggcgaaggctaagacgagagcagggaatgtgaggatgcggaagcccaaggcgagggagcctaacaagagggagatgagcctggaggagaagaacatgctcaggctggggctggtgagcctgcccgaagagaagatgcacaatgtgcttcagatcgtgcgcaagaggaacaacaacccggagatgcttggggatgagatcgagcttgatattgatgagatggatgttgagacacagtgggagcttgatcgtttcgttactaacttcaacaaggcgctcaagaagtcccagcgtgctgcgatgttgaatggtggcgttgctgatgtaaccagtactgctgtggctgaggatgacactgcacctgtgggcgatgtgcctacattggttggcaatgacgatgcggagagtgaggaacctgtgaagagcactacagtggctgagcaggtggatgagtatgttgatattggggatgaaatgccagcagccacttaccaatccatggagatcgagaaggacgctgaaggttctgagtcgaggagctcaggggacagtgcctcaggagctggcaatgctcattctttgacttaggggaggttggtaacaataggatttgaaaatctgaatgatccgagttcgtgtgcagcagtacagcaccatgtgtatgtaagctggaggtggaaggtactggtgtgttaaaagtagctgatcgaccttctcgtatgaagggggccagggctagtgtctgtgttcttaatggtagggttgatcgaccttctcgtaattgatgctttgtgcatgacattaaagtatggttttataagtaacaatgcagtatcatttgttgggtgatgacttttgatgtaagagttatttctgcattttggataggattacgcaagataaatttcaacgacca

SEQ ID NO: 216657 - DNA, 1794 bp, Zea Mays
ccactccaccagtccacctgcatcctccctctctctctcccgctcccgtgctctctccctctccccaggatccgaattgccagcgcaccagtcgagctcgcgggacctcgccggcgccggcgatggcctcctcccttttggccggacggggagggggccaccaccacaactggggggagacgcgcgccccgctcgagcccataccccccaaccctagtcccagccagccccacccgcgcgccgacgggtccaagtccaagccgcgggcggcggccggctacgtgaagttccgcccggcgtccctgggccaccgcgaggcccgcgcgctccgggaccgcctcgcggtggagctcggccaggtccgcgccctcctctcccgcatcgacacctggcagcagcagggcccgccgccgcgcgcggtgctccgcggggcgatgcggaagcggtgcggccagatcctcagcaggctgcgcaaggacaagcgcagcgtgtggttcaacgcgcccgtcgaggtggagcgcctcggcctccacgactaccatgccgtcatcaagcgccccatggatctcggcaccgtcaaggagggcctcgccgccgggaggtacgcctcgcacgacgacttcgcggccgacgtccgcctcaccttcaccaacgcgctgcggtacaacccggtcggccacgaggttcacacgttcgctggcgccctcctcgcctacttcgagaggatgtacaaggaggcgctcgtttgtttagaggaagagcgcaagcgccttgagccgccgaggccagtggcggctgagctgccacctccgccggcagttgagcctgtcgaggcgaaggctaagacgagagcagggaatgtgaggatgcggaagcccaaggcgagggagcctaacaagagggagatgagcctggaggagaagaacatgctcaggctggggctggtgagcctgcccgaagagaagatgcacaatgtgcttcagatcgtgcgcaagaggaacaacaacccggagatgcttggggatgagatcgagcttgatattgatgagatggatgttgagacacagtgggagcttgatcgtttcgttactaacttcaacaaggcgctcaagaagtcccagcgtgctgcgatgttgaatggtggcgttgctgatgtaaccagtactgctgtggctgaggatgacactgcacctgtgggcgatgtgcctacattggttggcaatgacgatgcggagagtgaggaacctgtgaagagcactacagtggctgagcaggtggatgagtatgttgatattggggatgaaatgccagcagccacttaccaatccatggagatcgagaaggacgctgaaggtacgactggctctggtggttctggcagtggctcttcatcgtccagtggttctgagtcgaggagctcaggggacagtgcctcaggagctggcaatgctcattctttgacttaggggaggttggtaacaataggatttgaaaatctgaatgatccgagttcgtgtgcagcagtacagcaccatgtgtatgtaagctggaggtggaaggtactggtgtgttaaaagtagctgatcgaccttctcgtatgaagggggccagggctagtgtctgtgttcttaatggtagggttgatcgaccttctcgtaattgatgctttgtgcatgacattaaagtatggttttataagtaacaatgcagtatcatttgttgggtgatgacttttgatgtaagagttatttctgcattttggataggattacgcaagataaatttcaacgacca

SEQ ID NO: 216658 - DNA, 2839 bp, Zea Mays
ccactccaccagtccacctgcatcctccctctctctctcccgctcccgtgctctctccctctccccaggatccgaattgccagcgcaccagtcgagctcgcgggacctcgccggcgccggcgatggcctcctcccttttggccggacggggagggggccaccaccacaactggggggagacgcgcgccccgctcgagcccataccccccaaccctagtcccagccagccccacccgcgcgccgacgggtccaagtccaagccgcgggcggcggccggctacgtgaagttccgcccggcgtccctgggccaccgcgaggcccgcgcgctccgggaccgcctcgcggtggagctcggccaggtccgcgccctcctctcccgcatcgacacctggcagcagcagggcccgccgccgcgcgcggtgctccgcggggcgatgcggaagcggtgcggccagatcctcagcaggctgcgcaaggacaagcgcagcgtgtggttcaacgcgcccgtcgaggtggagcgcctcggcctccacgactaccatgccgtcatcaagcgccccatggatctcggcaccgtcaaggagggcctcgccgccgggaggtacgcctcgcacgacgacttcgcggccgacgtccgcctcaccttcaccaacgcgctgcggtacaacccggtcggccacgaggttcacacgttcgctggcgccctcctcgcctacttcgagaggatgtacaaggaggcgctcgtttgtttagaggaagagcgcaagcgccttgagccgccgaggccagtggcggctgagctgccacctccgccggcagttgagcctgtcgaggcgaaggctaagacgagagcagggaatgtgaggatgcggaagcccaaggcgagggagcctaacaagagggagatgagcctggaggagaagaacatgctcaggctggggctggtgagcctgcccgaagagaagatgcacaatgtgcttcagatcgtgcgcaagaggaacaacaacccggagatgcttggggatgagatcgagcttgatattgatgagatggatgttgagacacagtgggagcttgatcgtttcgttactaacttcaacaaggcgctcaagaagtcccagcgtgctgcgatgttgaatggtggcgttgctgatgtaaccagtactgctgtggctgaggatgacactgcacctgtgggcgatgtgcctacattggttggcaatgacgatgcggagagtgaggaacctgtgaagagcactacagtggctgagcaggtggatgagtatgttgatattggggatgaaatgccagcagccacttaccaatccatggagatcgagaaggacgctgaaggttctttggctagaacattctttcagattcaaaataaggcatcatcatgttcttttgcataacgcatactatgcagttgcttgatcaaaaagtgatgatagtggtacaatacaaaaaaacagatggaacggaaacacaaagaaaggatgagcatggatggtggacctgttgactcattgcggccgcgggcccgcagttgccttcagttgagttctgctacggtttggtctggtgcggccagtcgttaaatgcttctttctagatccactgacaggcccacaacagaaccaaattagtaaagcaacactgcatagtgccaaatctgtcgtctaaagtaaataagctacaatctgattttgttataaccatgcctgttgcataaccatgtctttgcgaaaaatctgattttgttatccatcataattctaagaagtaccagttgctcttccatttgagttattttctcagacatggctattgcatcctcatcacttatcttaccttcgctttcgtttggttccaccttaagtaggtcaatttcttctttcagcacactcttactttgtctttggtctaaaatacaaatttcaataccaaactgagttgtaagttattcatataatataacaaaaaatataaatgtttgtgcgataagcatataggtaatttaaaaagaaaatatcatattcgtaattcagcaaaacgtcctacaaaaatcaactaagtgattcaacccaaaatatgcaactaacttaattcttcctagcaccaaagcattagactttgcaaccaagatgatagatttttagaacgggggaagtgaaaagatgcatagttgtccaaaggaaaaacaatggacctcagtatgtaaatgaagggaaatgttatcttcaatacaactctcatgattcattagtgcatacaccagtcgacgtttggttatttttgaaggattttagaaataaataagaccctcacaacgccaactttaatatggtctggaactcagcaacttgctaccgtgggtgtactcggcgtcatgaccgcatcccccggacagcatatacgatgtcaaaatagagcagggtgccagagacattgaggcgtacgcggatgacgatgccaaaatcgttgtgcggctagcaggcgacgtcgccgacactatgggttcgacggctgagatgggtggaggcatgaggcagcggcggcgggtgaagcgcggctccggtgacggactgatgggagaggacgacaacaaccttggacggacttacgctcaatcgaagatggagagcttgaaaccctagctaagaatacgcgctattggggaagaaaaggccatgatgtgttcaacgaacctgcacaaattgtggagacggacgagagcgcaacaggaaagtggccgcatggtcgctggtccccggcgtcgtggacgccgacgctggagatgcaaggccctttgagagccccttttgggagacgacgg

SEQ ID NO: 216659 - DNA, 4088 bp, Zea Mays
aagagctcggtacatagccaagcaaacaggctgcaaacgctcacgaaaccacgcgtttggtggggtcggcgaggctggtgcggtggtgcacgccggtaactctcctcgccgtccaaagaagctataaattccacccaatcgccgccccgcacgcaccacaccgccccgaccatcaccgacaccagcgcctaagccccccccaaacggcaggagacagcagcaggccggaggtctcctccttctacgcatccactgagttccttcctgcgcaaagtaaatccccagttctttcggccgctgccaagttttcgaggtgggtctcgtgattttctttccaccatgcatgaattcgccctccgcgtcgcgtgattgcagcccgctttgcggggagacatgaaaagatgggaccttttttgaccctgcctccatagactggttggcttcacgggcgcgattccgcttcggttcaccgggttgcgtggcgatttttggaattatctagaggaccgagcatgtgggctattacctgatttttttggtgacgaattgatagttttgatttccctaatttcgcagtgttgctagccccgccagagttttcttctcccccgcagtcgaattgggcgagaagttgatgggaccgggggcacactggaaggttgtgtgagatcgcgaaggggaccgtgaaatcctgagagggctgcggtgattcggctgctcggctgtatgaactgtttcgtgaacctgggactcaactcgaactcgaaccactacgtcgcctgcctcctcatcttcctgctgcatttctccccccagttaaatccatccaattctaattcaactagtagttgtgaaggagaagaacagagctgcacagatggcgagcaacagtaagtcctgcttcttccccgggagctcttccagttttgggcttatagttgacagatggatgtttgttccaatttgaaaatatatcttaaatcgacgtgaattattaaagctgctcggctgaagaagaaccgattggatgacttgggatcactagtatttgttttcctacatgatacgttatcgggttattgattaggtatttatttggtggatctgatgccagttcgtggcaaaattgaaaattttcaacttaactttctgatcgtgtggttttgaaaaatcgttcttttgataacaagaaaaattcggggttctgatggtagttgggaggcacgcatgggccatgaaccatgaagtcccatattcaattgttggtgaagaaaggcaaaaataaataaataaataaatatactacaactctgcaagttgtttacatttcacacttgttataccaacatctcacgcaagaggccaagagaggaccgaccacttggaagcttctcggatttgaccccaccatgtggatttgtgaactcttgtgcctcattttgtagtactggggaccttcgttcactaagataattgttctcacaaccctaccactgttgtacgataaggaaaacggaacaatttagcttatagacttataccgattgctacaaaacctgactaccgaaaagtatatgccatcaagtgctgtgatgtttttgttaagtgcttaattccatgcatgttcgatccacagcggtatcatgctcatgaacacgggtaggcaaatgtatattggctagtggatataaccgtctacttgttcactatagtccaatgctgcaatttgcgtgtatttgttagggtttctcggaatataatttgctttttgtcattgtcgcacattcatgggtaacacttttgggtgtctcattgtgcctgctagcattaggcgacagaagcttggtgactaatgaagttgggctgcttagtgttctgaagacgtgaagcgtatctgatagaagggtttgctaaagaggtttcttccacaatcctacagagtaccagtgttaccatggcaaacattagtcatgagacatggcacactcattccttttagtttggagttggagcccatcttgtcaaaacatgatctacaagagtgtaccaatcaccatgctctgtcttttttttttacaaaaaagataaatctgcggttaatacagacaaagaacattgcacaggcccaaatttagttgttgagaggataactgaatcttaaactgtcctgtcttatttcaccatcattgttctgagacaggggaacatgcctcactactaaccctctattgtggaggggggtagaggagggttgatgtgagaagaacaggagatcagcaatttcacaacttggctcatgtggtgaaaatgcgagaaagccacacacaccatccgctattgttattggtggtgggtttgcaggtcttgctgctgctgatgcgctcagaaatgcatccttccaggttattcttctggaatctcgtgatagaattggtggcagagttcacactgactactcttttgggtttccagtcgatttgggagcatcttggcttcatggcgtttgtgaagaaaatcccttggcaccaataattggaaggcttggacttccactgtaccgcacaagtggagacgattctgtgctgtttgatcatgatctggagagctatgcactctatgacactaatggacgtcaagtaccacaggagttggtagaaaagattgggaaggtgtttgagaccatactggaagagactggcaaattgagggaaggaaccaatgaagatatgtctatcgcaaaagccattgcaattgttatggatagaaatccacagttgaggcaagaagggattgctcatgaagttcttcagtggtatttgtgccgtatggagggttggtttgccactgacgcagattcaatttcactacagggctgggatcaggaggtgctgcttccaggtggccatggcctcatggttcgtggatatcgtccagttataaatactcttgcaaaaggcttagatatacgcctcaaccataaggttttggaaattgttcgccaccggaacagggtagaggttactgtaagcagtggccaaacattcgttgcggacgctgcagtggtcactgttccgttgggtgtcctgaaagtgaaaaccatcagatttgagccgaggctgccagagtggaaagaagaggcaatcagagaactgacggttggagttgagaacaaaattgttctgcacttcggccaggttttctggcctaacgtggagttcctcggcgtcgtttcctctagcacgtatggttgcagctatttcctgaaccttcacaaggcaacaggccaccctgtccttgtttacatgcctgctggccgacttgctcgtgacattgagaagatgtcagatgaggctgctgcgcagtttgccttttctcagttgaagaagatccttcccaatgcagctgagccgatgaattacttggtgtcgcactggggctcggacgagaacacacttggctcctacacgttcgatggggtgaacaaaccccgcgacctgtacgagaagctgcgcatccccgtggacaacctgttcttcgcaggagaggccacgagtgtcaagtacacgggcacggtgcacggcgccttctccactggtgttatggcagccgaggagtgcaagatgcgagttctggagcggttcagggagcttgacatgctggagatgtgccaccctgccatgggcgacgaaagccctgtctccgtcccgttgctcatctctcggctctaagcagacgagaggttgtctatgggattgattggcacctgacagtacgctggacgtcccactgattgccggagggaaagctggcagtacagggagaaagaaactccccttgcttctccctcttcggcatgaggaatgtgctggcattacttgtgtggcgtttcatgttaaaacctatattgtgtattgtggccttgtgggtctgtgtgtgttcagggttatcatgtcatcttggtagaaaaggatgccccgtatgtattatgaacactagtaataataatacatatatgtaacttaactgtttggagtattgagttatttggcatgtaacacgtcagctgcttaccgttaggggtagtaata

SEQ ID NO: 216660 - DNA, 3760 bp, Zea Mays
aagagctcggtacatagccaagcaaacaggctgcaaacgctcacgaaaccacgcgtttggtggggtcggcgaggctggtgcggtggtgcacgccggtaactctcctcgccgtccaaagaagctataaattccacccaatcgccgccccgcacgcaccacaccgccccgaccatcaccgacaccagcgcctaagccccccccaaacggcaggagacagcagcaggccggaggtctcctccttctacgcatccactgagttccttcctgcgcaaagtaaatccccagttctttcggccgctgccaagttttcgagtgttgctagccccgccagagttttcttctcccccgcagtcgaattgggcgagaagttgatgggaccgggggcacactggaaggttgtgtgagatcgcgaaggggaccgtgaaatcctgagagggctgcggtgattcggctgctcggctgtatgaactgtttcgtgaacctgggactcaactcgaactcgaaccactacgtcgcctgcctcctcatcttcctgctgcatttctccccccagttaaatccatccaattctaattcaactagtagttgtgaaggagaagaacagagctgcacagatggcgagcaacagtaagtcctgcttcttccccgggagctcttccagttttgggcttatagttgacagatggatgtttgttccaatttgaaaatatatcttaaatcgacgtgaattattaaagctgctcggctgaagaagaaccgattggatgacttgggatcactagtatttgttttcctacatgatacgttatcgggttattgattaggtatttatttggtggatctgatgccagttcgtggcaaaattgaaaattttcaacttaactttctgatcgtgtggttttgaaaaatcgttcttttgataacaagaaaaattcggggttctgatggtagttgggaggcacgcatgggccatgaaccatgaagtcccatattcaattgttggtgaagaaaggcaaaaataaataaataaataaatatactacaactctgcaagttgtttacatttcacacttgttataccaacatctcacgcaagaggccaagagaggaccgaccacttggaagcttctcggatttgaccccaccatgtggatttgtgaactcttgtgcctcattttgtagtactggggaccttcgttcactaagataattgttctcacaaccctaccactgttgtacgataaggaaaacggaacaatttagcttatagacttataccgattgctacaaaacctgactaccgaaaagtatatgccatcaagtgctgtgatgtttttgttaagtgcttaattccatgcatgttcgatccacagcggtatcatgctcatgaacacgggtaggcaaatgtatattggctagtggatataaccgtctacttgttcactatagtccaatgctgcaatttgcgtgtatttgttagggtttctcggaatataatttgctttttgtcattgtcgcacattcatgggtaacacttttgggtgtctcattgtgcctgctagcattaggcgacagaagcttggtgactaatgaagttgggctgcttagtgttctgaagacgtgaagcgtatctgatagaagggtttgctaaagaggtttcttccacaatcctacagagtaccagtgttaccatggcaaacattagtcatgagacatggcacactcattccttttagtttggagttggagcccatcttgtcaaaacatgatctacaagagtgtaccaatcaccatgctctgtcttttttttttacaaaaaagataaatctgcggttaatacagacaaagaacattgcacaggcccaaatttagttgttgagaggataactgaatcttaaactgtcctgtcttatttcaccatcattgttctgagacaggggaacatgcctcactactaaccctctattgtggaggggggtagaggagggttgatgtgagaagaacaggagatcagcaatttcacaacttggctcatgtggtgaaaatgcgagaaagccacacacaccatccgctattgttattggtggtgggtttgcaggtcttgctgctgctgatgcgctcagaaatgcatccttccaggttattcttctggaatctcgtgatagaattggtggcagagttcacactgactactcttttgggtttccagtcgatttgggagcatcttggcttcatggcgtttgtgaagaaaatcccttggcaccaataattggaaggcttggacttccactgtaccgcacaagtggagacgattctgtgctgtttgatcatgatctggagagctatgcactctatgacactaatggacgtcaagtaccacaggagttggtagaaaagattgggaaggtgtttgagaccatactggaagagactggcaaattgagggaaggaaccaatgaagatatgtctatcgcaaaagccattgcaattgttatggatagaaatccacagttgaggcaagaagggattgctcatgaagttcttcagtggtatttgtgccgtatggagggttggtttgccactgacgcagattcaatttcactacagggctgggatcaggaggtgctgcttccaggtggccatggcctcatgggttttggaaattgttcgccaccggaacagggtagaggttactgtaagcagtggccaaacattcgttgcggacgctgcagtggtcactgttccgttgggtgtcctgaaagtgaaaaccatcagatttgagccgaggctgccagagtggaaagaagaggcaatcagagaactgacggttggagttgagaacaaaattgttctgcacttcggccaggttttctggcctaacgtggagttcctcggcgtcgtttcctctagcacgtatggttgcagctatttcctgaaccttcacaaggcaacaggccaccctgtccttgtttacatgcctgctggccgacttgctcgtgacattgagaagatgtcagatgaggctgctgcgcagtttgccttttctcagttgaagaagatccttcccaatgcagctgagccgatgaattacttggtgtcgcactggggctcggacgagaacacacttggctcctacacgttcgatggggtgaacaaaccccgcgacctgtacgagaagctgcgcatccccgtggacaacctgttcttcgcaggagaggccacgagtgtcaagtacacgggcacggtgcacggcgccttctccactggtgttatggcagccgaggagtgcaagatgcgagttctggagcggttcagggagcttgacatgctggagatgtgccaccctgccatgggcgacgaaagccctgtctccgtcccgttgctcatctctcggctctaagcagacgagaggttgtctatgggattgattggcacctgacagtacgctggacgtcccactgattgccggagggaaagctggcagtacagggagaaagaaactccccttgcttctccctcttcggcatgaggaatgtgctggcattacttgtgtggcgtttcatgttaaaacctatattgtgtattgtggccttgtgggtctgtgtgtgttcagggttatcatgtcatcttggtagaaaaggatgccccgtatgtattatgaacactagtaataataatacatatatgtaacttaactgtttggagtattgagttatttggcatgtaacacgtcagctgcttaccgttaggggtagtaata

SEQ ID NO: 216661 - DNA, 2357 bp, Zea Mays
aagagctcggtacatagccaagcaaacaggctgcaaacgctcacgaaaccacgcgtttggtggggtcggcgaggctggtgcggtggtgcacgccggtaactctcctcgccgtccaaagaagctataaattccacccaatcgccgccccgcacgcaccacaccgccccgaccatcaccgacaccagcgcctaagccccccccaaacggcaggagacagcagcaggccggaggtctcctccttctacgcatccactgagttccttcctgcgcaaagtaaatccccagttctttcggccgctgccaagttttcgagtgttgctagccccgccagagttttcttctcccccgcagtcgaattgggcgagaagttgatgggaccgggggcacactggaaggttgtgtgagatcgcgaaggggaccgtgaaatcctgagagggctgcggtgattcggctgctcggctgtatgaactgtttcgtgaacctgggactcaactcgaactcgaaccactacgtcgcctgcctcctcatcttcctgctgcatttctccccccagttaaatccatccaattctaattcaactagtagttgtgaaggagaagaacagagctgcacagatggcgagcaacagctcatgtggtgaaaatgcgagaaagccacacacaccatccgctattgttattggtggtgggtttgcaggtcttgctgctgctgatgcgctcagaaatgcatccttccaggttattcttctggaatctcgtgatagaattggtggcagagttcacactgactactcttttgggtttccagtcgatttgggagcatcttggcttcatggcgtttgtgaagaaaatcccttggcaccaataattggaaggcttggacttccactgtaccgcacaagtggagacgattctgtgctgtttgatcatgatctggagagctatgcactctatgacactaatggacgtcaagtaccacaggagttggtagaaaagattgggaaggtgtttgagaccatactggaagagactggcaaattgagggaaggaaccaatgaagatatgtctatcgcaaaagccattgcaattgttatggatagaaatccacagttgaggcaagaagggattgctcatgaagttcttcagtggtatttgtgccgtatggagggttggtttgccactgacgcagattcaatttcactacagggctgggatcaggaggtgctgcttccaggtggccatggcctcatggttcgtggatatcgtccagttataaatactcttgcaaaaggcttagatatacgcctcaaccataaggttttggaaattgttcgccaccggaacagggtagaggttactgtaagcagtggccaaacattcgttgcggacgctgcagtggtcactgttccgttgggtgtcctgaaagtgaaaaccatcagatttgagccgaggctgccagagtggaaagaagaggcaatcagagaactgacggttggagttgagaacaaaattgttctgcacttcggccaggttttctggcctaacgtggagttcctcggcgtcgtttcctctagcacgtatggttgcagctatttcctgaaccttcacaaggcaacaggccaccctgtccttgtttacatgcctgctggccgacttgctcgtgacattgagaagatgtcagatgaggctgctgcgcagtttgccttttctcagttgaagaagatccttcccaatgcagctgagccgatgaattacttggtgtcgcactggggctcggacgagaacacacttggctcctacacgttcgatggggtgaacaaaccccgcgacctgtacgagaagctgcgcggcgccttctccactggtgttatggcagccgaggagtgcaagatgcgagttctggagcggttcagggagcttgacatgctggagatgtgccaccctgccatgggcgacgaaagccctgtctccgtcccgttgctcatctctcggctctaagcagacgagaggttgtctatgggattgattggcacctgacagtacgctggacgtcccactgattgccggagggaaagctggcagtacagggagaaagaaactccccttgcttctccctcttcggcatgaggaatgtgctggcattacttgtgtggcgtttcatgttaaaacctatattgtgtattgtggccttgtgggtctgtgtgtgttcagggttatcatgtcatcttggtagaaaaggatgccccgtatgtattatgaacactagtaataataatacatatatgtaacttaactgtttggagtattgagttatttggcatgtaacacgtcagctgcttaccgttaggggtagtaata

SEQ ID NO: 216662 - DNA, 2515 bp, Zea Mays
aagagctcggtacatagccaagcaaacaggctgcaaacgctcacgaaaccacgcgtttggtggggtcggcgaggctggtgcggtggtgcacgccggtaactctcctcgccgtccaaagaagctataaattccacccaatcgccgccccgcacgcaccacaccgccccgaccatcaccgacaccagcgcctaagccccccccaaacggcaggagacagcagcaggccggaggtctcctccttctacgcatccactgagttccttcctgcgcaaagtaaatccccagttctttcggccgctgccaagttttcgagtgttgctagccccgccagagttttcttctcccccgcagtcgaattgggcgagaagttgatgggaccgggggcacactggaaggttgtgtgagatcgcgaaggggaccgtgaaatcctgagagggctgcggtgattcggctgctcggctgtatgaactgtttcgtgaacctgggactcaactcgaactcgaaccactacgtcgcctgcctcctcatcttcctgctgcatttctccccccagttaaatccatccaattctaattcaactagtagttgtgaaggagaagaacagagctgcacagatggcgagcaacagggaacatgcctcactactaaccctctattgtggaggggggtagaggagggttgatgtgagaagaacaggagatcagcaatttcacaacttggctcatgtggtgaaaatgcgagaaagccacacacaccatccgctattgttattggtggtgggtttgcaggtcttgctgctgctgatgcgctcagaaatgcatccttccaggttattcttctggaatctcgtgatagaattggtggcagagttcacactgactactcttttgggtttccagtcgatttgggagcatcttggcttcatggcgtttgtgaagaaaatcccttggcaccaataattggaaggcttggacttccactgtaccgcacaagtggagacgattctgtgctgtttgatcatgatctggagagctatgcactctatgacactaatggacgtcaagtaccacaggagttggtagaaaagattgggaaggtgtttgagaccatactggaagagactggcaaattgagggaaggaaccaatgaagatatgtctatcgcaaaagccattgcaattgttatggatagaaatccacagttgaggcaagaagggattgctcatgaagttcttcagtggtatttgtgccgtatggagggttggtttgccactgacgcagattcaatttcactacagggctgggatcaggaggtgctgcttccaggtggccatggcctcatggttcgtggatatcgtccagttataaatactcttgcaaaaggcttagatatacgcctcaaccataaggttttggaaattgttcgccaccggaacagggtagaggttactgtaagcagtggccaaacattcgttgcggacgctgcagtggtcactgttccgttgggtgtcctgaaagtgaaaaccatcagatttgagccgaggctgccagagtggaaagaagaggcaatcagagaactgacggttggagttgagaacaaaattgttctgcacttcggccaggttttctggcctaacgtggagttcctcggcgtcgtttcctctagcacgtatggttgcagctatttcctgaaccttcacaaggcaacaggccaccctgtccttgtttacatgcctgctggccgacttgctcgtgacattgagaagatgtcagatgaggctgctgcgcagtttgccttttctcagttgaagaagatccttcccaatgcagctgagccgatgaattacttggtgtcgcactggggctcggacgagaacacacttggctcctacacgttcgatggggtgaacaaaccccgcgacctgtacgagaagctgcgcatccccgtggacaacctgttcttcgcaggagaggccacgagtgtcaagtacacgggcacggtgcacggcgccttctccactggtgttatggcagccgaggagtgcaagatgcgagttctggagcggttcagggagcttgacatgctggagatgtgccaccctgccatgggcgacgaaagccctgtctccgtcccgttgctcatctctcggctctaagcagacgagaggttgtctatgggattgattggcacctgacagtacgctggacgtcccactgattgccggagggaaagctggcagtacagggagaaagaaactccccttgcttctccctcttcggcatgaggaatgtgctggcattacttgtgtggcgtttcatgttaaaacctatattgtgtattgtggccttgtgggtctgtgtgtgttcagggttatcatgtcatcttggtagaaaaggatgccccgtatgtattatgaacactagtaataataatacatatatgtaacttaactgtttggagtattgagttatttggcatgtaacacgtcagctgcttaccgttaggggtagtaata

SEQ ID NO: 216663 - DNA, 2890 bp, Zea Mays
aagagctcggtacatagccaagcaaacaggctgcaaacgctcacgaaaccacgcgtttggtggggtcggcgaggctggtgcggtggtgcacgccggtaactctcctcgccgtccaaagaagctataaattccacccaatcgccgccccgcacgcaccacaccgccccgaccatcaccgacaccagcgcctaagccccccccaaacggcaggagacagcagcaggccggaggtctcctccttctacgcatccactgagttccttcctgcgcaaagtaaatccccagttctttcggccgctgccaagttttcgagtgttgctagccccgccagagttttcttctcccccgcagtcgaattgggcgagaagttgatgggaccgggggcacactggaaggttgtgtgagatcgcgaaggggaccgtgaaatcctgagagggctgcggtgattcggctgctcggctgtatgaactgtttcgtgaacctgggactcaactcgaactcgaaccactacgtcgcctgcctcctcatcttcctgctgcatttctccccccagttaaatccatccaattctaattcaactagtagttgtgaaggagaagaacagagctgcacagatggcgagcaacacattaggcgacagaagcttggtgactaatgaagttgggctgcttagtgttctgaagacgtgaagcgtatctgatagaagggtttgctaaagaggtttcttccacaatcctacagagtaccagtgttaccatggcaaacattagtcatgagacatggcacactcattccttttagtttggagttggagcccatcttgtcaaaacatgatctacaagagtgtaccaatcaccatgctctgtcttttttttttacaaaaaagataaatctgcggttaatacagacaaagaacattgcacaggcccaaatttagttgttgagaggataactgaatcttaaactgtcctgtcttatttcaccatcattgttctgagacaggggaacatgcctcactactaaccctctattgtggaggggggtagaggagggttgatgtgagaagaacaggagatcagcaatttcacaacttggctcatgtggtgaaaatgcgagaaagccacacacaccatccgctattgttattggtggtgggtttgcaggtcttgctgctgctgatgcgctcagaaatgcatccttccaggttattcttctggaatctcgtgatagaattggtggcagagttcacactgactactcttttgggtttccagtcgatttgggagcatcttggcttcatggcgtttgtgaagaaaatcccttggcaccaataattggaaggcttggacttccactgtaccgcacaagtggagacgattctgtgctgtttgatcatgatctggagagctatgcactctatgacactaatggacgtcaagtaccacaggagttggtagaaaagattgggaaggtgtttgagaccatactggaagagactggcaaattgagggaaggaaccaatgaagatatgtctatcgcaaaagccattgcaattgttatggatagaaatccacagttgaggcaagaagggattgctcatgaagttcttcagtggtatttgtgccgtatggagggttggtttgccactgacgcagattcaatttcactacagggctgggatcaggaggtgctgcttccaggtggccatggcctcatggttcgtggatatcgtccagttataaatactcttgcaaaaggcttagatatacgcctcaaccataaggttttggaaattgttcgccaccggaacagggtagaggttactgtaagcagtggccaaacattcgttgcggacgctgcagtggtcactgttccgttgggtgtcctgaaagtgaaaaccatcagatttgagccgaggctgccagagtggaaagaagaggcaatcagagaactgacggttggagttgagaacaaaattgttctgcacttcggccaggttttctggcctaacgtggagttcctcggcgtcgtttcctctagcacgtatggttgcagctatttcctgaaccttcacaaggcaacaggccaccctgtccttgtttacatgcctgctggccgacttgctcgtgacattgagaagatgtcagatgaggctgctgcgcagtttgccttttctcagttgaagaagatccttcccaatgcagctgagccgatgaattacttggtgtcgcactggggctcggacgagaacacacttggctcctacacgttcgatggggtgaacaaaccccgcgacctgtacgagaagctgcgcatccccgtggacaacctgttcttcgcaggagaggccacgagtgtcaagtacacgggcacggtgcacggcgccttctccactggtgttatggcagccgaggagtgcaagatgcgagttctggagcggttcagggagcttgacatgctggagatgtgccaccctgccatgggcgacgaaagccctgtctccgtcccgttgctcatctctcggctctaagcagacgagaggttgtctatgggattgattggcacctgacagtacgctggacgtcccactgattgccggagggaaagctggcagtacagggagaaagaaactccccttgcttctccctcttcggcatgaggaatgtgctggcattacttgtgtggcgtttcatgttaaaacctatattgtgtattgtggccttgtgggtctgtgtgtgttcagggttatcatgtcatcttggtagaaaaggatgccccgtatgtattatgaacactagtaataataatacatatatgtaacttaactgtttggagtattgagttatttggcatgtaacacgtcagctgcttaccgttaggggtagtaata

SEQ ID NO: 216664 - DNA, 3825 bp, Zea Mays
aagagctcggtacatagccaagcaaacaggctgcaaacgctcacgaaaccacgcgtttggtggggtcggcgaggctggtgcggtggtgcacgccggtaactctcctcgccgtccaaagaagctataaattccacccaatcgccgccccgcacgcaccacaccgccccgaccatcaccgacaccagcgcctaagccccccccaaacggcaggagacagcagcaggccggaggtctcctccttctacgcatccactgagttccttcctgcgcaaagtaaatccccagttctttcggccgctgccaagttttcgagtgttgctagccccgccagagttttcttctcccccgcagtcgaattgggcgagaagttgatgggaccgggggcacactggaaggttgtgtgagatcgcgaaggggaccgtgaaatcctgagagggctgcggtgattcggctgctcggctgtatgaactgtttcgtgaacctgggactcaactcgaactcgaaccactacgtcgcctgcctcctcatcttcctgctgcatttctccccccagttaaatccatccaattctaattcaactagtagttgtgaaggagaagaacagagctgcacagatggcgagcaacagtaagtcctgcttcttccccgggagctcttccagttttgggcttatagttgacagatggatgtttgttccaatttgaaaatatatcttaaatcgacgtgaattattaaagctgctcggctgaagaagaaccgattggatgacttgggatcactagtatttgttttcctacatgatacgttatcgggttattgattaggtatttatttggtggatctgatgccagttcgtggcaaaattgaaaattttcaacttaactttctgatcgtgtggttttgaaaaatcgttcttttgataacaagaaaaattcggggttctgatggtagttgggaggcacgcatgggccatgaaccatgaagtcccatattcaattgttggtgaagaaaggcaaaaataaataaataaataaatatactacaactctgcaagttgtttacatttcacacttgttataccaacatctcacgcaagaggccaagagaggaccgaccacttggaagcttctcggatttgaccccaccatgtggatttgtgaactcttgtgcctcattttgtagtactggggaccttcgttcactaagataattgttctcacaaccctaccactgttgtacgataaggaaaacggaacaatttagcttatagacttataccgattgctacaaaacctgactaccgaaaagtatatgccatcaagtgctgtgatgtttttgttaagtgcttaattccatgcatgttcgatccacagcggtatcatgctcatgaacacgggtaggcaaatgtatattggctagtggatataaccgtctacttgttcactatagtccaatgctgcaatttgcgtgtatttgttagggtttctcggaatataatttgctttttgtcattgtcgcacattcatgggtaacacttttgggtgtctcattgtgcctgctagcattaggcgacagaagcttggtgactaatgaagttgggctgcttagtgttctgaagacgtgaagcgtatctgatagaagggtttgctaaagaggtttcttccacaatcctacagagtaccagtgttaccatggcaaacattagtcatgagacatggcacactcattccttttagtttggagttggagcccatcttgtcaaaacatgatctacaagagtgtaccaatcaccatgctctgtcttttttttttacaaaaaagataaatctgcggttaatacagacaaagaacattgcacaggcccaaatttagttgttgagaggataactgaatcttaaactgtcctgtcttatttcaccatcattgttctgagacaggggaacatgcctcactactaaccctctattgtggaggggggtagaggagggttgatgtgagaagaacaggagatcagcaatttcacaacttggctcatgtggtgaaaatgcgagaaagccacacacaccatccgctattgttattggtggtgggtttgcaggtcttgctgctgctgatgcgctcagaaatgcatccttccaggttattcttctggaatctcgtgatagaattggtggcagagttcacactgactactcttttgggtttccagtcgatttgggagcatcttggcttcatggcgtttgtgaagaaaatcccttggcaccaataattggaaggcttggacttccactgtaccgcacaagtggagacgattctgtgctgtttgatcatgatctggagagctatgcactctatgacactaatggacgtcaagtaccacaggagttggtagaaaagattgggaaggtgtttgagaccatactggaagagactggcaaattgagggaaggaaccaatgaagatatgtctatcgcaaaagccattgcaattgttatggatagaaatccacagttgaggcaagaagggattgctcatgaagttcttcagtggtatttgtgccgtatggagggttggtttgccactgacgcagattcaatttcactacagggctgggatcaggaggtgctgcttccaggtggccatggcctcatggttcgtggatatcgtccagttataaatactcttgcaaaaggcttagatatacgcctcaaccataaggttttggaaattgttcgccaccggaacagggtagaggttactgtaagcagtggccaaacattcgttgcggacgctgcagtggtcactgttccgttgggtgtcctgaaagtgaaaaccatcagatttgagccgaggctgccagagtggaaagaagaggcaatcagagaactgacggttggagttgagaacaaaattgttctgcacttcggccaggttttctggcctaacgtggagttcctcggcgtcgtttcctctagcacgtatggttgcagctatttcctgaaccttcacaaggcaacaggccaccctgtccttgtttacatgcctgctggccgacttgctcgtgacattgagaagatgtcagatgaggctgctgcgcagtttgccttttctcagttgaagaagatccttcccaatgcagctgagccgatgaattacttggtgtcgcactggggctcggacgagaacacacttggctcctacacgttcgatggggtgaacaaaccccgcgacctgtacgagaagctgcgcatccccgtggacaacctgttcttcgcaggagaggccacgagtgtcaagtacacgggcacggtgcacggcgccttctccactggtgttatggcagccgaggagtgcaagatgcgagttctggagcggttcagggagcttgacatgctggagatgtgccaccctgccatgggcgacgaaagccctgtctccgtcccgttgctcatctctcggctctaagcagacgagaggttgtctatgggattgattggcacctgacagtacgctggacgtcccactgattgccggagggaaagctggcagtacagggagaaagaaactccccttgcttctccctcttcggcatgaggaatgtgctggcattacttgtgtggcgtttcatgttaaaacctatattgtgtattgtggccttgtgggtctgtgtgtgttcagggttatcatgtcatcttggtagaaaaggatgccccgtatgtattatgaacactagtaataataatacatatatgtaacttaactgtttggagtattgagttatttggcatgtaacacgtcagctgcttaccgttaggggtagtaata

SEQ ID NO: 216665 - DNA, 2184 bp, Zea Mays
cccaatcgccgccccgcacgcaccacaccgccccgaccatcaccgacaccagcgcctaagccccccccaaacggcaggagacagcagcaggccggaggtctcctccttctacgcatccactgagttccttcctgcgcaaatgttgctagccccgccagagttttcttctcccccgcagtcgaattgggcgagaagttgatgggaccgggggcacactggaaggttgtgtgagatcgcgaaggggaccgtgaaatcctgagagggctgcggtgattcggctgctcggctgtatgaactgtttcgtgaacctgggactcaactcgaactcgaaccactacgtcgcctgcctcctcatcttcctgctgcatttctccccccagttaaatccatccaattctaattcaactagtagttgtgaaggagaagaacagagctgcacagatggcgagcaacagctcatgtggtgaaaatgcgagaaagccacacacaccatccgctattgttattggtggtgggtttgcaggtcttgctgctgctgatgcgctcagaaatgcatccttccaggttattcttctggaatctcgtgatagaattggtggcagagttcacactgactactcttttgggtttccagtcgatttgggagcatcttggcttcatggcgtttgtgaagaaaatcccttggcaccaataattggaaggcttggacttccactgtaccgcacaagtggagacgattctgtgctgtttgatcatgatctggagagctatgcactctatgacactaatggacgtcaagtaccacaggagttggtagaaaagattgggaaggtgtttgagaccatactggaagagactggcaaattgagggaaggaaccaatgaagatatgtctatcgcaaaagccattgcaattgttatggatagaaatccacagttgaggcaagaagggattgctcatgaagttcttcagtggtatttgtgccgtatggagggttggtttgccactgacgcagattcaatttcactacagggctgggatcaggaggtgctgcttccaggtggccatggcctcatggttcgtggatatcgtccagttataaatactcttgcaaaaggcttagatatacgcctcaaccataaggttttggaaattgttcgccaccggaacagggtagaggttactgtaagcagtggccaaacattcgttgcggacgctgcagtggtcactgttccgttgggtgtcctgaaagtgaaaaccatcagatttgagccgaggctgccagagtggaaagaagaggcaatcagagaactgacggttggagttgagaacaaaattgttctgcacttcggccaggttttctggcctaacgtggagttcctcggcgtcgtttcctctagcacgtatggttgcagctatttcctgaaccttcacaaggcaacaggccaccctgtccttgtttacatgcctgctggccgacttgctcgtgacattgagaagatgtcagatgaggctgctgcgcagtttgccttttctcagttgaagaagatccttcccaatgcagctgagccgatgaattacttggtgtcgcactggggctcggacgagaacacacttggctcctacacgttcgatggggtgaacaaaccccgcgacctgtacgagaagctgcgcggcgccttctccactggtgttatggcagccgaggagtgcaagatgcgagttctggagcggttcagggagcttgacatgctggagatgtgccaccctgccatgggcgacgaaagccctgtctccgtcccgttgctcatctctcggctctaagcagacgagaggttgtctatgggattgattggcacctgacagtacgctggacgtcccactgattgccggagggaaagctggcagtacagggagaaagaaactccccttgcttctccctcttcggcatgaggaatgtgctggcattacttgtgtggcgtttcatgttaaaacctatattgtgtattgtggccttgtgggtctgtgtgtgttcagggttatcatgtcatcttggtagaaaaggatgccccgtatgtattatgaacactagtaataataatacatatatgtaacttaactgtttggagtattgagttatttggcatgtaacacgtcagctgcttaccgttaggggtagtaata

SEQ ID NO: 216666 - DNA, 955 bp, Zea Mays
accagtctcctccggaccgagcacagcacaaaccacaatttgattttgacccgtcgcctgcctggccgcctcctagtcgtaatcccgccccgccgcctccccctctccggccttctccgctccgcgcgggcgccatggtgccgcgcacggcggagaacttcctggcgctctgcggaacgggctactacgacggcaccgtgttccaccgcaacatcaagggcttcatggtccagggcggcgaccccaccggcaccggcaagggcgggtcgtccatctggggcgccaagttcgcggacgagttgagggagtcgctcaagcacaacgcgcgcgggatcatgtcgatggccaacagcgggcccaacaccaacggcagccagttcttcatcacctacgccaagcagccgcacctcaacggtcactacaccgtgttcgccaaggtcatccacggcttcgaggtgctggacctcatggagaaggcgcagacgggacccggggacaggccgctcgccgagatcaggctcaaccgcgtcaccatccacgccaacccgctcgccgtctgaactcctcttcctaccgctctcccctccactcgctcctgtcctcatccaccgggatctgagcgtcatcagccttgctttcaaccgcaaaatcacgctttggtttcggaacatcaatctgtagctctctaattttataccgatgctgtgacatgtaacctttgatagatttgttttgcctggcgtttttttttttttttttgcttcatcgaccatcaaaatcttcaccggccatgtctgccagggtttgagtttgacactgtaacttgcaaaacaatatagcagccatggtcagcaaagagatggtataactgattcgatacattggcccagatgcgacctcgtactcattacaactgtgatcctataactagtcatacagaaataacaacagcaat

SEQ ID NO: 216667 - DNA, 1091 bp, Zea Mays
aaaaaatattttaggtccaaggaaatttcacaggtgtaattatgaatgatgaaacagtttatcagttgtgcaaacaggctgtttcacaggctcgtgccggtgctgatgttgtcagccctagtgacatgatggatggccggattggagcacttcgctctgctctggacgccgagggcttccatgatgtctccattatgtcctacaccgcaaagtatgccagttcattttatggccctttccgagaagctttagattcaaatccaagatttggagataagaagacgtaccagatgaacccagctaactacagagaagccctcatagaaaccgcagcggacgaggcagaaggagccgacattctgctagtgaaaccgggattgccgtacttggacattatccgactgcttcgggatcattcagccctaccgattgctgcttaccaggtctcgggcgagtactcgatgatcaaagccggcggggccctgggcatggtggacgagcagaaggtgatgatggagtcgctcatgtgcctgcggcgagccggcgccgatgtcatcctgacctacttcgcccgtcacgccgccgcggtgctgtgcggcatggggcccaagtaggaggcgaggcccgcccgccattcctgccctgcactgtcattgtggagttgagcgatgagttggcttatcgtatgttttgggggcctggcactggcagaggattgtccgaggccttggatctcttccaataatctgcgccgggagataataagttttggagttatcgcatttcccggtactaatcttctgcgtgttgctagtactgaaaaaggtttggattttgaagcgattttagacagctggattagtacctcaacgaacgaaggatttcaggggaagcgtgcgtatcattcttgaaggcgtcgcactcccacctcccactcccacgtgatttcacggtggaccctggaacaacctcgattggacagtacactactagctgctcgtggtcatggctcaggactatctatccatctatgcaaatgaactaggtcaaggtacaaaattaattatgcttaattaaaagcctgcgacgag

SEQ ID NO: 216668 - DNA, 2849 bp, Zea Mays
gtaagattgttctcttgctccctttcatgtatgctacgagtacgtcagtgaccaagggaacgagctttatgaacttgtggctcatctgccagacaaggctaacaactatctcgcaccagcactgtctgttctagagaagaacacctgattgatgcgcaccatcagactcggacatgtaatatacgagtcatacgacgtgtatattttctcctcctgtaaagccatacgtttttcctatacaagccttgtgtcattcacatggtatgccgtttggcccttctgtaaagatcattgcacagaccgactccaggaaacaaaattttatttttgcaatattgcattgtatgataagttctcctgtccccactccttttcatctaaaactgtaaaagtttgcataatttcaccaagaagaacagtacagtggaaaagaagagaccaatctttgaagcaaaggaagcagtgcacgtgcacctgatgaaatgatggctggtttgctcacaatcttgaaagagaatgcaaagcctgaggctgcaagagtggtccggactctggagtactctctctttctctgttgggaaagttggtttcggcctgttctgctgctcaagcagcatacggcagctcacgcctatggtggacaaccaaagattcagtgctctgattcttcttggtttgtctttctccggcagatctctaacgagtagatgttctctcttcttttcttttcttctttttttgaaagcttcactctaacctgaaatcggctttacttaaatttcgagccaacttaatcttcttctttgccaattcttttttaaagaaaagtttgagagatgcctctagttttttttttgggggtgtgtgtttgcgactacagagtctgaaatcacaaatcagagctgtatagggagcaggtggcgactgagtgactgacaaacgtggggaagatggagacaaagaaacgcaagcctgtggtctactaaagacgggggcatcgccatcgagggcaaacggaggccacaggattagcagcttctccgtgctgctgcgtctcctcctcatcgtcctctccagtgtccagctcggccatggcgttcaccgtctccttctcccccgccaacgttcagatgctccaggctaggagtggccacggccacgccacctttggaagctgttccgccgtgccaagagccgggccaaggctgcgttccacggccgtccgggtcagcagcgagcaggaggcggcggcggccgtcagggcgccgtccgggaggaccatcgaggagtgcgaggccgacgccgtcgctgggaagttccctgctcccccgccgctggttaggccgaaggcccctgaaggaacgccggagatcaggccccttgacatggcaaagcgcccccgtcgcaaccgcaaatcacctgctcttagggctgcattccaggagacgagcatctcgcctgctaactttgtgcttccattgtttatccatgaaggagaagaagatgctcctatcggagctatgccagggtgctataggcttgggtggaggcacgggctgcttgacgaggtttacaaggcccgcgatgttggtgttaatagttttgttctctttcctaaagttcccgatgcattgaagtctccaacaggagatgaagcgtacaacgataatggtctggttccacgtacaatccgcttgctcaaggacaagttccctgatattgttatctacacagacgtcgcgttagacccttattcatctgatggtcatgatggtattgtgagggaagatggtgtaattatgaatgatgaaacagtttatcagttgtgcaaacaggctgtttcacaggctcgtgccggtgctgatgttgtcagccctagtgacatgatggatggccggattggagcacttcgctctgctctggacgccgagggcttccatgatgtctccattatgtcctacaccgcaaagtatgccagttcattttatggccctttccgagaagctttagattcaaatccaagatttggagataagaagacgtaccagatgaacccagctaactacagagaagccctcatagaaaccgcagcggacgaggcagaaggagccgacattctgctagtgaaaccgggattgccgtacttggacattatccgactgcttcgggatcattcagccctaccgattgctgcttaccaggtctcgggcgagtactcgatgatcaaagccggcggggccctgggcatggtggacgagcagaaggtgatgatggagtcgctcatgtgcctgcggcgagccggcgccgatgtcatcctgacctacttcgcccgtcacgccgccgcggtgctgtgcggcatggggcccaagtaggaggcgaggcccgcccgccattcctgccctgcactgtcattgtggagttgagcgatgagttggcttatcgtatgttttgggggcctggcactggcagaggattgtccgaggccttggatctcttccaataatctgcgccgggagataataagttttggagttatcgcatttcccggtactaatcttctgcgtgttgctagtactgaaaaaggtttggattttgaagcgattttagacagctggattagtacctcaacgaacgaaggatttcaggggaagcgtgcgtatcattcttgaaggcgtcgcactcccacctcccactcccacgtgatttcacggtggaccctggaacaacctcgattggacagtacactactagctgctcgtggtcatggctcaggactatctatccatctatgcaaatgaactaggtcaaggtacaaaattaattatgcttaattaaaagcctgcgacgag

SEQ ID NO: 216669 - DNA, 3959 bp, Zea Mays
agatggccggctttatcagctgcggcagcgagattcaccgggggaagtatttgcagcgaccgcgccggtccccgccacaaaatcagctacccaccaccgtccgtcagcggcggcggcgagagcatggcggccatcgtggcggcgcgggcgtcggcccccggcagagcggccgtcagcaccatcgccgcgttccacagccacgcgtccccttcccgcgcgctcccgctcgcctcctcctccatcggcggcgccaggcggtaccaccacgcccccgcgtgctgcttcgccaccaagcccaccgcgccggccgctgccgagctcgtcgaccaggacctcgccacggccacgcaggaggccgccaagccacgccggaaacgccggtctcggaaggcgaagaagtccgccaccgccgccaaggaggaggatgggacggacgacaagccggtggcggcggcagaggacgaggcgaaaaggaagaaggaggcggccggcgccgaggacagcgcccgggcattggtggccggcctcgacgacgtgatcgtcaaccccgtgggtctgggtcggcggtcgcggcaggtgttcgacgaggtgtggcgcaagttctcgcggctgggccagatttcgagcgcctcgtccaccgcgctggcggaggaggagcaggccgtgcttatccgtggaggacctatgtgcgagttcactgtgccaggggcgcaggacaccaccgtcctcgtcgtcggtgccaccagccgcatcggccgcatcgtcgtgcgcaagctcatgctccgcggatacaatgtcaaggctttagtaagaagaaacgaccctgaagtgatagatatgctcccaaggtcggtggatgttgttgttggtgatgttggtgatcctgcaactgtcaaagcagctgtatcaggctgcagcaagataatctattgtgcaactgcacgctcaactattacaggagacctaaatagggttgataaccaaggagtaaggaatgctagcaaggctttccaggattactacaacgaattggcccagctcagggctggtaaaagcagcaagagcaaactcctgatagcaaaattcaagtctgcaaagtccttgaagggttgggaggatttgtattcacaagaggtggatatgttgagatatcaaaaaggctttctcttcctctaggttctaccctagacaggtacgatggtttactcttttcagtgggaggaaatggaagatcatacgttgttattcttgaaactggtccattggcggacacgacccagagcaagaagtattttgctcggatgactacaaaagtaggtttttgtagggtaagagtgccgttttcatcttttcggccagtaaacccacaagatcctcccctagacccttttcttgtgcatacactaaccattaggtttgaaccaaaaaggcagagacctggtgaggcatctcaaaattctagtgatcctcgaaactttgagctaaaactggaatacatcaaggctttacctactggtcaagaaacagacttcatattggtgtcatgttcaggttctgggattgaatctaacagaagagaacaagttctcaaagccaagaaggctggagaagatgcactgcggaggtcaggccttggatatacaatcgtgcgcccgggtcctctgcaggaagaacctggtggccagcgcgcgctgatcttcgatcaagggaacagaatctcccagggtatcagctgtgctgatgtggctgatatctgtgtcaaggcactgcatgattccactgcgagaaacaaaagtttcgatgtatgctacgagtacgtcagtgaccaagggaacgagctttatgaacttagaatgcaaagcctgaggctgcaagagtggtccggactctggagtactctctctttctctgttgggaaagttggtttcggcctgttctgctgctcaagcagcatacggcagctcacgcctatggtggacaaccaaagattcagtgctctgattcttcttgagctgtatagggagcaggtggcgactgagtgactgacaaacgtggggaagatggagacaaagaaacgcaagcctgtggtctactaaagacgggggcatcgccatcgagggcaaacggaggccacaggattagcagcttctccgtgctgctgcgtctcctcctcatcgtcctctccagtgtccagctcggccatggcgttcaccgtctccttctcccccgccaacgttcagatgctccaggctaggagtggccacggccacgccacctttggaagctgttccgccgtgccaagagccgggccaaggctgcgttccacggccgtccgggtcagcagcgagcaggaggcggcggcggccgtcagggcgccgtccgggaggaccatcgaggagtgcgaggccgacgccgtcgctgggaagttccctgctcccccgccgctggttaggccgaaggcccctgaaggaacgccggagatcaggccccttgacatggcaaagcgcccccgtcgcaaccgcaaatcacctgctcttagggctgcattccaggagacgagcatctcgcctgctaactttgtgcttccattgtttatccatgaaggagaagaagatgctcctatcggagctatgccagggtgctataggcttgggtggaggcacgggctgcttgacgaggtttacaaggcccgcgatgttggtgttaatagttttgttctctttcctaaagttcccgatgcattgaagtctccaacaggagatgaagcgtacaacgataatggtctggttccacgtacaatccgcttgctcaaggacaagttccctgatattgttatctacacagacgtcgcgttagacccttattcatctgatggtcatgatggtattgtgagggaagatggtgtaattatgaatgatgaaacagtttatcagttgtgcaaacaggctgtttcacaggctcgtgccggtgctgatgttgtcagccctagtgacatgatggatggccggattggagcacttcgctctgctctggacgccgagggcttccatgatgtctccattatgtcctacaccgcaaagtatgccagttcattttatggccctttccgagaagctttagattcaaatccaagatttggagataagaagacgtaccagatgaacccagctaactacagagaagccctcatagaaaccgcagcggacgaggcagaaggagccgacattctgctagtgaaaccgggattgccgtacttggacattatccgactgcttcgggatcattcagccctaccgattgctgcttaccaggtctcgggcgagtactcgatgatcaaagccggcggggccctgggcatggtggacgagcagaaggtgatgatggagtcgctcatgtgcctgcggcgagccggcgccgatgtcatcctgacctacttcgcccgtcacgccgccgcggtgctgtgcggcatggggcccaagtaggaggcgaggcccgcccgccattcctgccctgcactgtcattgtggagttgagcgatgagttggcttatcgtatgttttgggggcctggcactggcagaggattgtccgaggccttggatctcttccaataatctgcgccgggagataataagttttggagttatcgcatttcccggtactaatcttctgcgtgttgctagtactgaaaaaggtttggattttgaagcgattttagacagctggattagtacctcaacgaacgaaggatttcaggggaagcgtgcgtatcattcttgaaggcgtcgcactcccacctcccactcccacgtgatttcacggtggaccctggaacaacctcgattggacagtacactactagctgctcgtggtcatggctcaggactatctatccatctatgcaaatgaactaggtcaaggtacaaaattaattatgcttaattaaaagcctgcgacgag

SEQ ID NO: 216670 - DNA, 960 bp, Zea Mays
gcagtcagcagcttgctgcattgcttcctctcggccgctgtcctgccggccggccggcaaggaacacacctgcaggagctagcttaccgcggtaccaagaatggagggtgccagccggccgccgctcctcgcgctggcgtgtctctggctctgcgccttgctgccccatggagccagcgcagccggcgagtgcgggaacgtgagctgcggcatggggacgtgcagcgagtccagcgactacgccttcggcttcgcgtgcgagtgcaagcccgggtggagccgctaccacctcgccggcctgcagttccccttcctcccctgcgtcatccccaactgcaccatccactcctcgtgccaggacggatcgtcgtcgtccccggcgccggccccgtcgtcgtcgcctccagcggggctgcccccgctaaccgtcttcgatccgtgcctgatgcagtactgcggcgacggcggcgcctgcgagaaggcgtcggacttcgcccaccgctgcagctgccgcgacggctactccaacctcctcaacgacacctcctacccgtgctaccgacagtgttcgctgggcccggactgcaagggtctggggatcgacgtgatcaacgggtccacgccgagctcgtcgccgcctgcacccttctccttcaccgtcaagaagtccggcgccggagctgccgccgcgccggctggcacgctcctcgcgctgctcgcattcttcgggctccaggcgatatggtgaacgagctgccagggcgcgggacaaacgaaagcactgctgtgggactccagacaaagatttcacgcagttttgatttccgtatgtactacatggtttaggatatttcctacgtgtagccttgaccgtcaggagccgcaaagtaccgttttgtccatcaaccgctatagcagagtaaaaaattaccgctactagtgttatccaacatagtaagc

SEQ ID NO: 216671 - DNA, 1562 bp, Zea Mays
agggtagcagccctaggcgcttgagagggtcattgcaagggagagagattggtttgttaatgatcttgcttgatttattccctgctgccatgcggcttataaatagccctatggctaaccaacttcccctacaaactctcaactaactcctactttcttggacttatctgatgctaaccaactctccacaattctcccatttcaatcttattctctaaccttatcccagttcgtctcaatcttattctctagccttatcccagcctggccgttgcctctcgctccctattatgcccatgacatggaacaatgtcattgctttcttttgctgtgaaatcgaacatcatggttgcatttgaataaaatctttggcttatgtgtgaacaatttcttttgaggaaatgaaccttgccttgccaatatttggcctgtatgaaaatggacaaccagtgggattttctgcaatcatttggggacatgcaacaggttaatcccatgcaatttacacaactcatgcaaatgggagtagaacctgtcagggatgcaaaccttggagacccaccagttttcccatagtcacaagcagaacaaccaagtggaaatcaaccttcaaggtgtaaccagagggggaagcaataccacttcagtattgaggagtacaaaatcttggtttcttgctggcttaatgtcagccttgatcctatatttggtgctggacaatggaaggcgtcattttggaggactatagaataaaactacaactctcagaaatcaacaggacatccagtccgcacacttaggagtttggaatggaggtaactacagctataaacctttacaatagcatcgaatgcaagcctataatcaccacccattgctgggagattcttagaaatgaggcaaaatggttggatttgtagaggaaggctactcaggtcatggaagagttggtaaagagaaagtagtatatgttccagactccataaatggcgatgacgaaactgatgacactagtcgaggaacttagaggcccatgggaatggacgctgcaaaggctacaaaaagaaacgtttccaatgaaaccttcatccaatctagctcagagtacacgagtttgatgttaaacttgcatctggagcggatttgagcatataaagaagtgcaaggtgttatggctgtgaacgttgaccaacttattacagttcaagagaaatctttcacccaaaaacaggagattgtcaagcaggtggttgaattgaaaaaggaaatgggaggtcgaagcagctgagaaggcaactctcgaagaagatagaatcatgaatcttgatcgaaacaccctaagtggtccgcaaagggcctactatgaggctcaacaatgtcgtattttgcaatgtgtttacatactttgtgagcgttatttatgttcttacatactttgttttgaattcatgcattgcaaacatttatagctggcttcgtccaactataagcttgtatttgtgagactcagttttgtgacaaattaagtatttcgaacgatggcaactatattgcatttgaat

SEQ ID NO: 216672 - DNA, 1626 bp, Zea Mays
ccctccgcatccaatcgttcatgcacttgtctccccctccacatcgcgtgagtacttttccctatgcccggtgaactctctcaccctcgccactcggccattggtgcgcgcgggcgtcgaggaatcaccacgcaagcgacaggagtcgggactggcgtcggacgacaaggattcgaattgacgacgacaacgatcgtgtttggtgcgtcatgcggttgagttgttggctaggtgtccctcccccatcgccaccggatcgagcggcggtggtccagggaagcgcggatccggcggagtccatcggctcgcgcgactctgcaacgctagatcctcgacgccgtcgacgtccatgagctgcgtcgacgaccggcgaggtggagcgtagaagaagcattcatcgatccacacgacatcgtcgtagatctccttcctccaacaatcacggccaagcgaaacaccttcgtctcggatgatcatggaatttgagattgagaagctcaaaaaggccattgctgtcttaacttccatggttgaggatacaagttccaaggttaatcccatgcaatttacacaactcatgcaaatgggagtagaacctgtcagggatgcaaaccttggagacccaccagttttcccatagtcacaagcagaacaaccaagtggaaatcaaccttcaaggtgtaaccagagggggaagcaataccacttcagtattgaggagtacaaaatcttggtttcttgctggcttaatgtcagccttgatcctatatttggtgctggacaatggaaggcgtcattttggaggactatagaataaaactacaactctcagaaatcaacaggacatccagtccgcacacttaggagtttggaatggaggtaactacagctataaacctttacaatagcatcgaatgcaagcctataatcaccacccattgctgggagattcttagaaatgaggcaaaatggttggatttgtagaggaaggctactcaggtcatggaagagttggtaaagagaaagtagtatatgttccagactccataaatggcgatgacgaaactgatgacactagtcgaggaacttagaggcccatgggaatggacgctgcaaaggctacaaaaagaaacgtttccaatgaaaccttcatccaatctagctcagagtacacgagtttgatgttaaacttgcatctggagcggatttgagcatataaagaagtgcaaggtgttatggctgtgaacgttgaccaacttattacagttcaagagaaatctttcacccaaaaacaggagattgtcaagcaggtggttgaattgaaaaaggaaatgggaggtcgaagcagctgagaaggcaactctcgaagaagatagaatcatgaatcttgatcgaaacaccctaagtggtccgcaaagggcctactatgaggctcaacaatgtcgtattttgcaatgtgtttacatactttgtgagcgttatttatgttcttacatactttgttttgaattcatgcattgcaaacatttatagctggcttcgtccaactataagcttgtatttgtgagactcagttttgtgacaaattaagtatttcgaacgatggcaactatattgcatttgaat

SEQ ID NO: 216673 - DNA, 1358 bp, Zea Mays
ctctagactactcgcgtcggtgaactgatcatcccctccgcatccaatcgttcatgcacttgtctccccctccacatcgcgtgagtacttttccctatgcccggtgaactctctcaccctcgccactcggccattggtgcgcgcgggcgtcgaggaatcaccacgcaagcgacaggagtcgggactggcgtcggacgacaaggattcgaattgacgacgacaacgatcgtgtttggtgcgtcatgcggttgagttgttggctaggtgtccctcccccatcgccaccggatcgagcggcggtggtccagggaagcgcggatccggcggagtccatcggctcgcgcgactctgcaacgctagatcctcgacgccgtcgacgtccatgagctgcgtcgacgaccggcgaggtggagcgtagaagaagcattcatcgatccacacgacatcgtcgtagatctccttcctccaacaatcacggccaagcgaaacaccttcgtctcggatggtgctggacaatggaaggcgtcattttggaggactatagaataaaactacaactctcagaaatcaacaggacatccagtccgcacacttaggagtttggaatggaggtaactacagctataaacctttacaatagcatcgaatgcaagcctataatcaccacccattgctgggagattcttagaaatgaggcaaaatggttggatttgtagaggaaggctactcaggtcatggaagagttggtaaagagaaagtagtatatgttccagactccataaatggcgatgacgaaactgatgacactagtcgaggaacttagaggcccatgggaatggacgctgcaaaggctacaaaaagaaacgtttccaatgaaaccttcatccaatctagctcagagtacacgagtttgatgttaaacttgcatctggagcggatttgagcatataaagaagtgcaaggtgttatggctgtgaacgttgaccaacttattacagttcaagagaaatctttcacccaaaaacaggagattgtcaagcaggtggttgaattgaaaaaggaaatgggaggtcgaagcagctgagaaggcaactctcgaagaagatagaatcatgaatcttgatcgaaacaccctaagtggtccgcaaagggcctactatgaggctcaacaatgtcgtattttgcaatgtgtttacatactttgtgagcgttatttatgttcttacatactttgttttgaattcatgcattgcaaacatttatagctggcttcgtccaactataagcttgtatttgtgagactcagttttgtgacaaattaagtatttcgaacgatggcaactatattgcatttgaat

SEQ ID NO: 216674 - DNA, 474 bp, Zea Mays
atggacccaagcgattccaactccacggcagaggctgcagttccatctgtaaattctgctccagcagtcacttctggaggcccatttaagcttcctaatggtgttggaaagcctgcaactcctttagctgatttgcttgatttgagttctgatgatgctccagtgactacctcagcccctacaacagcacctaatgattttctacaggatctgttgggcattggcttgactgattcgtctcctataggcggcgctccgtctacaagcactgacattctgatggatcttctatctattggttcatcttctatacaaaatggaccaccaacggcaaactttagccttcctggcatagagactaaatctgtcgctgttacacctcaagttgtggatcttcttgatggtttgtcctcaggcacatctcttcctgtttgcctattcgccagatgagaacgcaacctaccccacaatcac

SEQ ID NO: 216675 - DNA, 2054 bp, Zea Mays
ctcgaagttgagagttgactgcatgcctccatggtggagaagtcatcttatgtggagagtattcttcacatctgccgtggtggccgttgtggtgcgttcagccatgaattggtgcaacagtggaaaatgcggtcattttggagctggaggttttataatatgggacatatctggaggtcaagaagattactcataccaggaattgtttcctatggcaattattggtgttatcggtggacttcttggggcattatttaatcaactcaccctctatataactaaatggcggcgaacgtgtcttcataagaaagggaaacgagtccaaatctttgaagcctgtcttatatctttggtaacatccacgatttcctttgtgttgccactactgaggaaatgcagcccatgccctaagttagaaactaattctggcatagaatgccctcatccacctggcacagatgggaattttgttaacttctattgttcacaagatagagagtacaatgatttagcaaccattttcttcaatactcaggatgatgcaatacgtaatcttttcagtgcaaaaacatttcatgaatacagtgcacaaagcctgatcactttcctggtcatgttttatttcttggctgttgtgacatttggaactgcagttccggctggccagttcgttcccggaataatgattggatctacatatggaaggcttgttggaatgtttgttgtcaagttctataagaaactaaacattgaggagggcacgtatgcactccttggtgctgcatcgtttcttggaggttcaatgagaatgactgtatctttatgtgttatcatggttgagattacaaacaacttgaaactcttgccattgatcatgcttgttcttctggtttctaaggcggttggtgacttttttaatgaagggttatatgaagagcaagcccgattaaggggcatccctttactggattccaggcctaagcaagtcatgagaaatatgaatgcaagggatgcgtgcaagaatcaaaaggttgtctgcctaccacgtgtttcaagggttgttgatatcatttctgttttgcgaactaacaagcataatggtttccctgttgttgaccgtgggcagaatggcgagtcacttgtcataggtctcatacttcgtagccacttattggtacttctacaagctaaagtagatttccagaacagtgctttcccctgtgggccaggcgtactgaacaggcacaattttagtgactttgttaaaccagcatcaagtaaaggaaagtcaattgatgatattcatttgacagaggatgaactggggttgtatttggatcttgccccatttttaaatccttcaccatacatagtgccagaggacatgtcgttggcgaaggtgtacaatctcttccgtcaacttggattgagacatatatttgttgttcctaggccttctcgtgttgtaggattgataaccagaaaagatttattacttgaggaggataacaacaatgtgatgccggagctccaatcgacgagtgggcttgctgaacggcaaaatgctcgggggtaatatacatctggaacgtcctcttcttgacaacctagttattgaatagacacgtagcagcatgtatgtcaaaataattttgatagctagcagttaaccttgcactgcatgttgggacatggcccatgggtattatacttcacatgaatgatgaagcagcagtgagcggataatgcagcatggttttggattctgccgactgttgcgcatggatgttggcgttgcgcatcattttttgctccgtcagcagtggctagggaggcgattccccggtgccgtgtgtttagattaggtgattgtaacttacaaaggcgtccatacatacacaccatccatgtatcccacggtaaatttcgaagactgtatgtataagtacatatttgttatacgatggtaaagacaaaagctatgtaggatttgcgtgctctcatgaaactatgatacgtggctataattacttccggttcccgctgaaatcgct

SEQ ID NO: 216676 - DNA, 2603 bp, Zea Mays
atgtggtctcctcaagcaagctttgaggaggtggatgtggcatggcggcactatgagcaggccggtactggattagctgctatattcataaacctggctgttgagaacttctctggatggaaatatactgcgacatttgctataataaagcactcgtattttgtgggattctttgtgtacacagttttcaatttagccctggtcttctcttctgtatatatagtcacaaactttgctccagcagctgctggatctggtattccagagatcaaaggttacttaaatggagtggatacacatggaatcctccttttcaggacattagttgggaagatctttgggagcattggatcagttggaggtggattggctctagggaaagaagggcctcttgttcatactggggcctgcattgcttcgcttcttggacaaggtggatctgcaaagtaccacttgagttctaggtgggtacggatttttgaaagcgatcgtgataggcgagaccttctggagttgctgctgccttcagagctcctgttggtggggtactatttgccttggaggaagttacttcctggtggagaagtcatcttatgtggagagtattcttcacatctgccgtggtggccgttgtggtgcgttcagccatgaattggtgcaacagtggaaaatgcggtcattttggagctggaggttttataatatgggacatatctggaggtcaagaagattactcataccaggaattgtttcctatggcaattattggtgttatcggtggacttcttggggcattatttaatcaactcaccctctatataactaaatggcggcgaacgtgtcttcataagaaagggaaacgagtccaaatctttgaagcctgtcttatatctttggtaacatccacgatttcctttgtgttgccactactgaggaaatgcagcccatgccctaagttagaaactaattctggcatagaatgccctcatccacctggcacagatgggaattttgttaacttctattgttcacaagatagagagtacaatgatttagcaaccattttcttcaatactcaggatgatgcaatacgtaatcttttcagtgcaaaaacatttcatgaatacagtgcacaaagcctgatcactttcctggtcatgttttatttcttggctgttgtgacatttggaactgcagttccggctggccagttcgttcccggaataatgattggatctacatatggaaggcttgttggaatgtttgttgtcaagttctataagaaactaaacattgaggagggcacgtatgcactccttggtgctgcatcgtttcttggaggttcaatgagaatgactgtatctttatgtgttatcatggttgagattacaaacaacttgaaactcttgccattgatcatgcttgttcttctggtttctaaggcggttggtgacttttttaatgaagggttatatgaagagcaagcccgattaaggggcatccctttactggattccaggcctaagcaagtcatgagaaatatgaatgcaagggatgcgtgcaagaatcaaaaggttgtctgcctaccacgtgtttcaagggttgttgatatcatttctgttttgcgaactaacaagcataatggtttccctgttgttgaccgtgggcagaatggcgagtcacttgtcataggtctcatacttcgtagccacttattggtacttctacaagctaaagtagatttccagaacagtgctttcccctgtgggccaggcgtactgaacaggcacaattttagtgactttgttaaaccagcatcaagtaaaggaaagtcaattgatgatattcatttgacagaggatgaactggggttgtatttggatcttgccccatttttaaatccttcaccatacatagtgccagaggacatgtcgttggcgaaggtgtacaatctcttccgtcaacttggattgagacatatatttgttgttcctaggccttctcgtgttgtaggattgataaccagaaaagatttattacttgaggaggataacaacaatgtgatgccggagctccaatcgacgagtgtaaggggcttgctgaacggcaaaatgctcgggggtaatatacatctggaacgtcctcttcttgacaacctagttattgaatagacacgtagcagcatgtatgtcaaaataattttgatagctagcagttaaccttgcactgcatgttgggacatggcccatgggtattatacttcacatgaatgatgaagcagcagtgagcggataatgcagcatggttttggattctgccgactgttgcgcatggatgttggcgttgcgcatcattttttgctccgtcagcagtggctagggaggcgattccccggtgccgtgtgtttagattaggtgattgtaacttacaaaggcgtccatacatacacaccatccatgtatcccacggtaaatttcgaagactgtatgtataagtacatatttgttatacgatggtaaagacaaaagctatgtaggatttgcgtgctctcatgaaactatgatacgtggctataattacttccggttcccgctgaaatcgct

SEQ ID NO: 216677 - DNA, 2598 bp, Zea Mays
atgtggtctcctcaagcaagctttgaggaggtggatgtggcatggcggcactatgagcaggccggtactggattagctgctatattcataaacctggctgttgagaacttctctggatggaaatatactgcgacatttgctataataaagcactcgtattttgtgggattctttgtgtacacagttttcaatttagccctggtcttctcttctgtatatatagtcacaaactttgctccagcagctgctggatctggtattccagagatcaaaggttacttaaatggagtggatacacatggaatcctccttttcaggacattagttgggaagatctttgggagcattggatcagttggaggtggattggctctagggaaagaagggcctcttgttcatactggggcctgcattgcttcgcttcttggacaaggtggatctgcaaagtaccacttgagttctaggtgggtacggatttttgaaagcgatcgtgataggcgagaccttctggagttgctgctgccttcagagctcctgttggtggggtactatttgccttggaggaagttacttcctggtggagaagtcatcttatgtggagagtattcttcacatctgccgtggtggccgttgtggtgcgttcagccatgaattggtgcaacagtggaaaatgcggtcattttggagctggaggttttataatatgggacatatctggaggtcaagaagattactcataccaggaattgtttcctatggcaattattggtgttatcggtggacttcttggggcattatttaatcaactcaccctctatataactaaatggcggcgaacgtgtcttcataagaaagggaaacgagtccaaatctttgaagcctgtcttatatctttggtaacatccacgatttcctttgtgttgccactactgaggaaatgcagcccatgccctaagttagaaactaattctggcatagaatgccctcatccacctggcacagatgggaattttgttaacttctattgttcacaagatagagagtacaatgatttagcaaccattttcttcaatactcaggatgatgcaatacgtaatcttttcagtgcaaaaacatttcatgaatacagtgcacaaagcctgatcactttcctggtcatgttttatttcttggctgttgtgacatttggaactgcagttccggctggccagttcgttcccggaataatgattggatctacatatggaaggcttgttggaatgtttgttgtcaagttctataagaaactaaacattgaggagggcacgtatgcactccttggtgctgcatcgtttcttggaggttcaatgagaatgactgtatctttatgtgttatcatggttgagattacaaacaacttgaaactcttgccattgatcatgcttgttcttctggtttctaaggcggttggtgacttttttaatgaagggttatatgaagagcaagcccgattaaggggcatccctttactggattccaggcctaagcaagtcatgagaaatatgaatgcaagggatgcgtgcaagaatcaaaaggttgtctgcctaccacgtgtttcaagggttgttgatatcatttctgttttgcgaactaacaagcataatggtttccctgttgttgaccgtgggcagaatggcgagtcacttgtcataggtctcatacttcgtagccacttattggtacttctacaagctaaagtagatttccagaacagtgctttcccctgtgggccaggcgtactgaacaggcacaattttagtgactttgttaaaccagcatcaagtaaaggaaagtcaattgatgatattcatttgacagaggatgaactggggttgtatttggatcttgccccatttttaaatccttcaccatacatagtgccagaggacatgtcgttggcgaaggtgtacaatctcttccgtcaacttggattgagacatatatttgttgttcctaggccttctcgtgttgtaggattgataaccagaaaagatttattacttgaggaggataacaacaatgtgatgccggagctccaatcgacgagtgggcttgctgaacggcaaaatgctcgggggtaatatacatctggaacgtcctcttcttgacaacctagttattgaatagacacgtagcagcatgtatgtcaaaataattttgatagctagcagttaaccttgcactgcatgttgggacatggcccatgggtattatacttcacatgaatgatgaagcagcagtgagcggataatgcagcatggttttggattctgccgactgttgcgcatggatgttggcgttgcgcatcattttttgctccgtcagcagtggctagggaggcgattccccggtgccgtgtgtttagattaggtgattgtaacttacaaaggcgtccatacatacacaccatccatgtatcccacggtaaatttcgaagactgtatgtataagtacatatttgttatacgatggtaaagacaaaagctatgtaggatttgcgtgctctcatgaaactatgatacgtggctataattacttccggttcccgctgaaatcgct

SEQ ID NO: 216678 - DNA, 2592 bp, Zea Mays
atgtggtctcctcaagcaagctttgaggaggtggatgtggcatggcggcactatgagcaggccggtactggattagctgctatattcataaacctggctgttgagaacttctctggatggaaatatactgcgacatttgctataataaagcactcgtattttgtgggattctttgtgtacacagttttcaatttagccctggtcttctcttctgtatatatagtcacaaactttgctccagcagctgctggatctggtattccagagatcaaaggttacttaaatggagtggatacacatggaatcctccttttcaggacattagttgggaagatctttgggagcattggatcagttggaggtggattggctctagggaaagaagggcctcttgttcatactggggcctgcattgcttcgcttcttggacaaggtggatctgcaaagtaccacttgagttctaggtgggtacggatttttgaaagcgatcgtgataggcgagaccttgtgacatgtggatgtgcagctggagttgctgctgccttcagagctcctgttggtggggtactatttgccttggaggaagttacttcctggtggagaagtcatcttatgtggagagtattcttcacatctgccgtggtggccgttgtggtgcgttcagccatgaattggtgcaacagtggaaaatgcggtcattttggagctggaggttttataatatgggacatatctggaggtcaagaagattactcataccaggaattgtttcctatggcaattattggtgttatcggtggacttcttggggcattatttaatcaactcaccctctatataactaaatggcggcgaacgtgtcttcataagaaagggaaacgagtccaaatctttgaagcctgtcttatatctttggtaacatccacgatttcctttgtgttgccactactgaggaaatgcagcccatgccctaagttagaaactaattctggcatagaatgccctcatccacctggcacagatgggaattttgttaacttctattgttcacaagatagagagtacaatgatttagcaaccattttcttcaatactcaggatgatgcaatacgtaatcttttcagtgcaaaaacatttcatgaatacagtgcacaaagcctgatcactttcctggtcatgttttatttcttggctgttgtgacatttggaactgcagttccggctggccagttcgttcccggaataatgattggatctacatatggaaggcttgttggaatgtttgttgtcaagttctataagaaactaaacattgaggagggcacgtatgcactccttggtgctgcatcgtttcttggaggttcaatgagaatgactgtatctttatgtgttatcatggttgagattacaaacaacttgaaactcttgccattgatcatgcttgttcttctggtttctaagggttatatgaagagcaagcccgattaaggggcatccctttactggattccaggcctaagcaagtcatgagaaatatgaatgcaagggatgcgtgcaagaatcaaaaggttgtctgcctaccacgtgtttcaagggttgttgatatcatttctgttttgcgaactaacaagcataatggtttccctgttgttgaccgtgggcagaatggcgagtcacttgtcataggtctcatacttcgtagccacttattggtacttctacaagctaaagtagatttccagaacagtgctttcccctgtgggccaggcgtactgaacaggcacaattttagtgactttgttaaaccagcatcaagtaaaggaaagtcaattgatgatattcatttgacagaggatgaactggggttgtatttggatcttgccccatttttaaatccttcaccatacatagtgccagaggacatgtcgttggcgaaggtgtacaatctcttccgtcaacttggattgagacatatatttgttgttcctaggccttctcgtgttgtaggattgataaccagaaaagatttattacttgaggaggataacaacaatgtgatgccggagctccaatcgacgagtgggcttgctgaacggcaaaatgctcgggggtaatatacatctggaacgtcctcttcttgacaacctagttattgaatagacacgtagcagcatgtatgtcaaaataattttgatagctagcagttaaccttgcactgcatgttgggacatggcccatgggtattatacttcacatgaatgatgaagcagcagtgagcggataatgcagcatggttttggattctgccgactgttgcgcatggatgttggcgttgcgcatcattttttgctccgtcagcagtggctagggaggcgattccccggtgccgtgtgtttagattaggtgattgtaacttacaaaggcgtccatacatacacaccatccatgtatcccacggtaaatttcgaagactgtatgtataagtacatatttgttatacgatggtaaagacaaaagctatgtaggatttgcgtgctctcatgaaactatgatacgtggctataattacttccggttcccgctgaaatcgct

SEQ ID NO: 216679 - DNA, 2572 bp, Zea Mays
atgtggtctcctcaagcaagctttgaggaggtggatgtggcatggcggcactatgagcaggccggtactggattagctgctatattcataaacctggctgttgagaacttctctggatggaaatatactgcgacatttgctataataaagcactcgtattttgtgggattctttgtgtacacagttttcaatttagccctggtcttctcttctgtatatatagtcacaaactttgctccagcagctgctggatctggtattccagagatcaaaggttacttaaatggagtggatacacatggaatcctccttttcaggacattagttgggaagatctttgggagcattggatcagttggaggtggattggctctagggaaagaagggcctcttgttcatactggggcctgcattgcttcgcttcttggacaaggtggatctgcaaagtaccacttgagttctaggtgggtacggatttttgaaagcgatcgtgataggcgagaccttgtgacatgtggatgtgcagctggagttgctgctgccttcagagctcctgttggtggggtactatttgccttggaggaagttacttcctggtggagaagtcatcttatgtggagagtattcttcacatctgccgtggtggccgttgtggtgcgttcagccatgaattggtgcaacagtggaaaatgcggtcattttggagctggaggttttataatatgggacatatctggaggtcaagaagattactcataccaggaattgtttcctatggcaattattggtgttatcggtggacttcttggggcattatttaatcaactcaccctctatataactaaatggcggcgaacgtgtcttcataagaaagggaaacgagtccaaatctttgaagcctgtcttatatctttggtaacatccacgatttcctttgtgttgccactactgaggaaatgcagcccatgccctaagttagaaactaattctggcatagaatgccctcatccacctggcacagatgggaattttgttaacttctattgttcacaagatagagagtacaatgatttagcaaccattttcttcaatactcaggatgatgcaatacgtaatcttttcagtgcaaaaacatttcatgaatacagtgcacaaagcctctgcagttccggctggccagttcgttcccggaataatgattggatctacatatggaaggcttgttggaatgtttgttgtcaagttctataagaaactaaacattgaggagggcacgtatgcactccttggtgctgcatcgtttcttggaggttcaatgagaatgactgtatctttatgtgttatcatggttgagattacaaacaacttgaaactcttgccattgatcatgcttgttcttctggtttctaaggcggttggtgacttttttaatgaagggttatatgaagagcaagcccgattaaggggcatccctttactggattccaggcctaagcaagtcatgagaaatatgaatgcaagggatgcgtgcaagaatcaaaaggttgtctgcctaccacgtgtttcaagggttgttgatatcatttctgttttgcgaactaacaagcataatggtttccctgttgttgaccgtgggcagaatggcgagtcacttgtcataggtctcatacttcgtagccacttattggtacttctacaagctaaagtagatttccagaacagtgctttcccctgtgggccaggcgtactgaacaggcacaattttagtgactttgttaaaccagcatcaagtaaaggaaagtcaattgatgatattcatttgacagaggatgaactggggttgtatttggatcttgccccatttttaaatccttcaccatacatagtgccagaggacatgtcgttggcgaaggtgtacaatctcttccgtcaacttggattgagacatatatttgttgttcctaggccttctcgtgttgtaggattgataaccagaaaagatttattacttgaggaggataacaacaatgtgatgccggagctccaatcgacgagtgtaaggggcttgctgaacggcaaaatgctcgggggtaatatacatctggaacgtcctcttcttgacaacctagttattgaatagacacgtagcagcatgtatgtcaaaataattttgatagctagcagttaaccttgcactgcatgttgggacatggcccatgggtattatacttcacatgaatgatgaagcagcagtgagcggataatgcagcatggttttggattctgccgactgttgcgcatggatgttggcgttgcgcatcattttttgctccgtcagcagtggctagggaggcgattccccggtgccgtgtgtttagattaggtgattgtaacttacaaaggcgtccatacatacacaccatccatgtatcccacggtaaatttcgaagactgtatgtataagtacatatttgttatacgatggtaaagacaaaagctatgtaggatttgcgtgctctcatgaaactatgatacgtggctataattacttccggttcccgctgaaatcgct

SEQ ID NO: 216680 - DNA, 2597 bp, Zea Mays
atgtggtctcctcaagcaagctttgaggaggtggatgtggcatggcggcactatgagcaggccggtactggattagctgctatattcataaacctggctgttgagaacttctctggatggaaatatactgcgacatttgctataataaagcactcgtattttgtgggattctttgtgtacacagttttcaatttagccctggtcttctcttctgtatatatagtcacaaactttgctccagcagctgctggatctggtattccagagatcaaaggttacttaaatggagtggatacacatggaatcctccttttcaggacattagttgggaagatctttgggagcattggatcagttggaggtggattggctctagggaaagaagggcctcttgttcatactggggcctgcattgcttcgcttcttggacaaggtggatctgcaaagtaccacttgagttctaggtgggtacggatttttgaaagcgatcgtgataggcgagaccttgtgacatgtggatgtgcagctggagttgctgctgccttcagagctcctgttggtggggtactatttgccttggaggaagttacttcctggtggagaagtcatcttatgtggagagtattcttcacatctgccgtggtggccgttgtggtgcgttcagccatgaattggtgcaacagtggaaaatgcggtcattttggagctggaggttttataatatgggacatatctggaggtcaagaagattactcataccaggaattgtttcctatggcaattattggtgttatcggtggacttcttggggcattatttaatcaactcaccctctatataactaaatggcggcgaacgtgtcttcataagaaagggaaacgagtccaaatctttgaagcctgtcttatatctttggtaacatccacgatttcctttgtgttgccactactgaggaaatgcagcccatgccctaagttagaaactaattctggcatagaatgccctcatccacctggcacagatgggaattttgttaacttctattgttcacaagatagagagtacaatgatttagcaaccattttcttcaatactcaggatgatgcaatacgtaatcttttcagtgcaaaaacatttcatgaatacagtgcacaaagcctgatcactttcctggtcatgttttatttcttggctgttgtgacatttggaactgcagttccggctggccagttcgttcccggaataatgattggatctacatatggaaggcttgttggaatgtttgttgtcaagttctataagaaactaaacattgaggagggcacgtatgcactccttggtgctgcatcgtttcttggaggttcaatgagaatgactgtatctttatgtgttatcatggttgagattacaaacaacttgaaactcttgccattgatcatgcttgttcttctggtttctaagggttatatgaagagcaagcccgattaaggggcatccctttactggattccaggcctaagcaagtcatgagaaatatgaatgcaagggatgcgtgcaagaatcaaaaggttgtctgcctaccacgtgtttcaagggttgttgatatcatttctgttttgcgaactaacaagcataatggtttccctgttgttgaccgtgggcagaatggcgagtcacttgtcataggtctcatacttcgtagccacttattggtacttctacaagctaaagtagatttccagaacagtgctttcccctgtgggccaggcgtactgaacaggcacaattttagtgactttgttaaaccagcatcaagtaaaggaaagtcaattgatgatattcatttgacagaggatgaactggggttgtatttggatcttgccccatttttaaatccttcaccatacatagtgccagaggacatgtcgttggcgaaggtgtacaatctcttccgtcaacttggattgagacatatatttgttgttcctaggccttctcgtgttgtaggattgataaccagaaaagatttattacttgaggaggataacaacaatgtgatgccggagctccaatcgacgagtgtaaggggcttgctgaacggcaaaatgctcgggggtaatatacatctggaacgtcctcttcttgacaacctagttattgaatagacacgtagcagcatgtatgtcaaaataattttgatagctagcagttaaccttgcactgcatgttgggacatggcccatgggtattatacttcacatgaatgatgaagcagcagtgagcggataatgcagcatggttttggattctgccgactgttgcgcatggatgttggcgttgcgcatcattttttgctccgtcagcagtggctagggaggcgattccccggtgccgtgtgtttagattaggtgattgtaacttacaaaggcgtccatacatacacaccatccatgtatcccacggtaaatttcgaagactgtatgtataagtacatatttgttatacgatggtaaagacaaaagctatgtaggatttgcgtgctctcatgaaactatgatacgtggctataattacttccggttcccgctgaaatcgct

SEQ ID NO: 216681 - DNA, 2546 bp, Zea Mays
atgtggtctcctcaagcaagctttgaggaggtggatgtggcatggcggcactatgagcaggccggtactggattagctgctatattcataaacctggctgttgagaacttctctggatggaaatatactgcgacatttgctataataaagcactcgtattttgtgggattctttgtgtacacagttttcaatttagccctggtcttctcttctgtatatatagtcacaaactttgctccagcagctgctggatctggtattccagagatcaaaggttacttaaatggagtggatacacatggaatcctccttttcaggacattagttgggaagatctttgggagcattggatcagttggaggtggattggctctagggaaagaagggcctcttgttcatactggggcctgcattgcttcgcttcttggacaaggtggatctgcaaagtaccacttgagttctaggtgggtacggatttttgaaagcgatcgtgataggcgagaccttgtgacatgtggatgtgcagctggagttgctgctgccttcagagctcctgttggtggggtactatttgccttggaggaagttacttcctggtggagaagtcatcttatgtggagagtattcttcacatctgccgtggtggccgttgtggtgcgttcagccatgaattggtgcaacagtggaaaatgcggtcattttggagctggaggttttataatatgggacatatctggaggtcaagaagattactcataccaggaattgtttcctatggcaattattggtgttatcggtggacttcttggggcattatttaatcaactcaccctctatataactaaatggcggcgaacgtgtcttcataagaaagggaaacgagtccaaatctttgaagcctgtcttatatctttggtaacatccacgatttcctttgtgttgccactactgaggaaatgcagcccatgccctaagttagaaactaattctggcatagaatgccctcatccacctggcacagatgggaattttgttaacttctattgttcacaagatagagagtacaatgatttagcaaccattttcttcaatactcaggatgatgcaatacgtaatcttttcagtgcaaaaacatttcatgaatacagtgcacaaagcctgatcactttcctggtcatgttttatttcttggctgttgtgacatttggaactgcagttccggctggccagttcgttcccggaataatgattggatctacatatggaaggcttgttggaatgtttgttgtcaagttctataagaaactaaacattgaggagggcacgtatgcactccttggtgctgcatcgtttcttggaggttcaatgagaatgactgtatctttatgtgttatcatggttgagattacaaacaacttgaaactcttgccattgatcatgcttgttcttctggtttctaaggcggttggtgacttttttaatgaagggttatatgaagagcaagcccgattaaggggcatccctttactggattccaggcctaagcaagtcatgagaaatatgaatgcaagggatgcgtgcaagaatcaaaaggttgtctgcctaccacgtgtttcaagggttgttgatatcatttctgttttgcgaactaacaagcataatggtttccctgttgttgaccgtgggcagaatggcgagtcacttgtcataggtctcatacttcgtagccacttattggtacttctacaagctaaagtagatttccagaacagtgctttcccctgtgggccaggcgtactgaacagaggatgaactggggttgtatttggatcttgccccatttttaaatccttcaccatacatagtgccagaggacatgtcgttggcgaaggtgtacaatctcttccgtcaacttggattgagacatatatttgttgttcctaggccttctcgtgttgtaggattgataaccagaaaagatttattacttgaggaggataacaacaatgtgatgccggagctccaatcgacgagtgggcttgctgaacggcaaaatgctcgggggtaatatacatctggaacgtcctcttcttgacaacctagttattgaatagacacgtagcagcatgtatgtcaaaataattttgatagctagcagttaaccttgcactgcatgttgggacatggcccatgggtattatacttcacatgaatgatgaagcagcagtgagcggataatgcagcatggttttggattctgccgactgttgcgcatggatgttggcgttgcgcatcattttttgctccgtcagcagtggctagggaggcgattccccggtgccgtgtgtttagattaggtgattgtaacttacaaaggcgtccatacatacacaccatccatgtatcccacggtaaatttcgaagactgtatgtataagtacatatttgttatacgatggtaaagacaaaagctatgtaggatttgcgtgctctcatgaaactatgatacgtggctataattacttccggttcccgctgaaatcgct

SEQ ID NO: 216682 - DNA, 2567 bp, Zea Mays
atgtggtctcctcaagcaagctttgaggaggtggatgtggcatggcggcactatgagcaggccggtactggattagctgctatattcataaacctggctgttgagaacttctctggatggaaatatactgcgacatttgctataataaagcactcgtattttgtgggattctttgtgtacacagttttcaatttagccctggtcttctcttctgtatatatagtcacaaactttgctccagcagctgctggatctggtattccagagatcaaaggttacttaaatggagtggatacacatggaatcctccttttcaggacattagttgggaagatctttgggagcattggatcagttggaggtggattggctctagggaaagaagggcctcttgttcatactggggcctgcattgcttcgcttcttggacaaggtggatctgcaaagtaccacttgagttctaggtgggtacggatttttgaaagcgatcgtgataggcgagaccttgtgacatgtggatgtgcagctggagttgctgctgccttcagagctcctgttggtggggtactatttgccttggaggaagttacttcctggtggagaagtcatcttatgtggagagtattcttcacatctgccgtggtggccgttgtggtgcgttcagccatgaattggtgcaacagtggaaaatgcggtcattttggagctggaggttttataatatgggacatatctggaggtcaagaagattactcataccaggaattgtttcctatggcaattattggtgttatcggtggacttcttggggcattatttaatcaactcaccctctatataactaaatggcggcgaacgtgtcttcataagaaagggaaacgagtccaaatctttgaagcctgtcttatatctttggtaacatccacgatttcctttgtgttgccactactgaggaaatgcagcccatgccctaagttagaaactaattctggcatagaatgccctcatccacctggcacagatgggaattttgttaacttctattgttcacaagatagagagtacaatgatttagcaaccattttcttcaatactcaggatgatgcaatacgtaatcttttcagtgcaaaaacatttcatgaatacagtgcacaaagcctctgcagttccggctggccagttcgttcccggaataatgattggatctacatatggaaggcttgttggaatgtttgttgtcaagttctataagaaactaaacattgaggagggcacgtatgcactccttggtgctgcatcgtttcttggaggttcaatgagaatgactgtatctttatgtgttatcatggttgagattacaaacaacttgaaactcttgccattgatcatgcttgttcttctggtttctaaggcggttggtgacttttttaatgaagggttatatgaagagcaagcccgattaaggggcatccctttactggattccaggcctaagcaagtcatgagaaatatgaatgcaagggatgcgtgcaagaatcaaaaggttgtctgcctaccacgtgtttcaagggttgttgatatcatttctgttttgcgaactaacaagcataatggtttccctgttgttgaccgtgggcagaatggcgagtcacttgtcataggtctcatacttcgtagccacttattggtacttctacaagctaaagtagatttccagaacagtgctttcccctgtgggccaggcgtactgaacaggcacaattttagtgactttgttaaaccagcatcaagtaaaggaaagtcaattgatgatattcatttgacagaggatgaactggggttgtatttggatcttgccccatttttaaatccttcaccatacatagtgccagaggacatgtcgttggcgaaggtgtacaatctcttccgtcaacttggattgagacatatatttgttgttcctaggccttctcgtgttgtaggattgataaccagaaaagatttattacttgaggaggataacaacaatgtgatgccggagctccaatcgacgagtgggcttgctgaacggcaaaatgctcgggggtaatatacatctggaacgtcctcttcttgacaacctagttattgaatagacacgtagcagcatgtatgtcaaaataattttgatagctagcagttaaccttgcactgcatgttgggacatggcccatgggtattatacttcacatgaatgatgaagcagcagtgagcggataatgcagcatggttttggattctgccgactgttgcgcatggatgttggcgttgcgcatcattttttgctccgtcagcagtggctagggaggcgattccccggtgccgtgtgtttagattaggtgattgtaacttacaaaggcgtccatacatacacaccatccatgtatcccacggtaaatttcgaagactgtatgtataagtacatatttgttatacgatggtaaagacaaaagctatgtaggatttgcgtgctctcatgaaactatgatacgtggctataattacttccggttcccgctgaaatcgct

SEQ ID NO: 216683 - DNA, 2667 bp, Zea Mays
ggcttctccagcggtggcgacgtcgaccttgacctcaatgccggcatgtggtctcctcaagcaagctttgaggaggtggatgtggcatggcggcactatgagcaggccggtactggattagctgctatattcataaacctggctgttgagaacttctctggatggaaatatactgcgacatttgctataataaagcactcgtattttgtgggattctttgtgtacacagttttcaatttagccctggtcttctcttctgtatatatagtcacaaactttgctccagcagctgctggatctggtattccagagatcaaaggttacttaaatggagtggatacacatggaatcctccttttcaggacattagttgggaagatctttgggagcattggatcagttggaggtggattggctctagggaaagaagggcctcttgttcatactggggcctgcattgcttcgcttcttggacaaggtggatctgcaaagtaccacttgagttctaggtgggtacggatttttgaaagcgatcgtgataggcgagaccttgtgacatgtggatgtgcagctggagttgctgctgccttcagagctcctgttggtggggtactatttgccttggaggaagttacttcctggtggagaagtcatcttatgtggagagtattcttcacatctgccgtggtggccgttgtggtgcgttcagccatgaattggtgcaacagtggaaaatgcggtcattttggagctggaggttttataatatgggacatatctggaggtcaagaagattactcataccaggaattgtttcctatggcaattattggtgttatcggtggacttcttggggcattatttaatcaactcaccctctatataactaaatggcggcgaacgtgtcttcataagaaagggaaacgagtccaaatctttgaagcctgtcttatatctttggtaacatccacgatttcctttgtgttgccactactgaggaaatgcagcccatgccctaagttagaaactaattctggcatagaatgccctcatccacctggcacagatgggaattttgttaacttctattgttcacaagatagagagtacaatgatttagcaaccattttcttcaatactcaggatgatgcaatacgtaatcttttcagtgcaaaaacatttcatgaatacagtgcacaaagcctgatcactttcctggtcatgttttatttcttggctgttgtgacatttggaactgcagttccggctggccagttcgttcccggaataatgattggatctacatatggaaggcttgttggaatgtttgttgtcaagttctataagaaactaaacattgaggagggcacgtatgcactccttggtgctgcatcgtttcttggaggttcaatgagaatgactgtatctttatgtgttatcatggttgagattacaaacaacttgaaactcttgccattgatcatgcttgttcttctggtttctaaggcggttggtgacttttttaatgaagggttatatgaagagcaagcccgattaaggggcatccctttactggattccaggcctaagcaagtcatgagaaatatgaatgcaagggatgcgtgcaagaatcaaaaggttgtctgcctaccacgtgtttcaagggttgttgatatcatttctgttttgcgaactaacaagcataatggtttccctgttgttgaccgtgggcagaatggcgagtcacttgtcataggtctcatacttcgtagccacttattggtacttctacaagctaaagtagatttccagaacagtgctttcccctgtgggccaggcgtactgaacaggcacaattttagtgactttgttaaaccagcatcaagtaaaggaaagtcaattgatgatattcatttgacagaggatgaactggggttgtatttggatcttgccccatttttaaatccttcaccatacatagtgccagaggacatgtcgttggcgaaggtgtacaatctcttccgtcaacttggattgagacatatatttgttgttcctaggccttctcgtgttgtaggattgataaccagaaaagatttattacttgaggaggataacaacaatgtgatgccggagctccaatcgacgagtgtaaggggcttgctgaacggcaaaatgctcgggggtaatatacatctggaacgtcctcttcttgacaacctagttattgaatagacacgtagcagcatgtatgtcaaaataattttgatagctagcagttaaccttgcactgcatgttgggacatggcccatgggtattatacttcacatgaatgatgaagcagcagtgagcggataatgcagcatggttttggattctgccgactgttgcgcatggatgttggcgttgcgcatcattttttgctccgtcagcagtggctagggaggcgattccccggtgccgtgtgtttagattaggtgattgtaacttacaaaggcgtccatacatacacaccatccatgtatcccacggtaaatttcgaagactgtatgtataagtacatatttgttatacgatggtaaagacaaaagctatgtaggatttgcgtgctctcatgaaactatgatacgtggctataattacttccggttcccgctgaaatcgct

SEQ ID NO: 216684 - DNA, 2680 bp, Zea Mays
ctcagaagtgcatgatgcggcttctccagcggtggcgacgtcgaccttgacctcaatgccggcatgtggtctcctcaagcaagctttgaggaggtggatgtggcatggcggcactatgagcaggccggtactggattagctgctatattcataaacctggctgttgagaacttctctggatggaaatatactgcgacatttgctataataaagcactcgtattttgtgggattctttgtgtacacagttttcaatttagccctggtcttctcttctgtatatatagtcacaaactttgctccagcagctgctggatctggtattccagagatcaaaggttacttaaatggagtggatacacatggaatcctccttttcaggacattagttgggaagatctttgggagcattggatcagttggaggtggattggctctagggaaagaagggcctcttgttcatactggggcctgcattgcttcgcttcttggacaaggtggatctgcaaagtaccacttgagttctaggtgggtacggatttttgaaagcgatcgtgataggcgagaccttgtgacatgtggatgtgcagctggagttgctgctgccttcagagctcctgttggtggggtactatttgccttggaggaagttacttcctggtggagaagtcatcttatgtggagagtattcttcacatctgccgtggtggccgttgtggtgcgttcagccatgaattggtgcaacagtggaaaatgcggtcattttggagctggaggttttataatatgggacatatctggaggtcaagaagattactcataccaggaattgtttcctatggcaattattggtgttatcggtggacttcttggggcattatttaatcaactcaccctctatataactaaatggcggcgaacgtgtcttcataagaaagggaaacgagtccaaatctttgaagcctgtcttatatctttggtaacatccacgatttcctttgtgttgccactactgaggaaatgcagcccatgccctaagttagaaactaattctggcatagaatgccctcatccacctggcacagatgggaattttgttaacttctattgttcacaagatagagagtacaatgatttagcaaccattttcttcaatactcaggatgatgcaatacgtaatcttttcagtgcaaaaacatttcatgaatacagtgcacaaagcctgatcactttcctggtcatgttttatttcttggctgttgtgacatttggaactgcagttccggctggccagttcgttcccggaataatgattggatctacatatggaaggcttgttggaatgtttgttgtcaagttctataagaaactaaacattgaggagggcacgtatgcactccttggtgctgcatcgtttcttggaggttcaatgagaatgactgtatctttatgtgttatcatggttgagattacaaacaacttgaaactcttgccattgatcatgcttgttcttctggtttctaaggcggttggtgacttttttaatgaagggttatatgaagagcaagcccgattaaggggcatccctttactggattccaggcctaagcaagtcatgagaaatatgaatgcaagggatgcgtgcaagaatcaaaaggttgtctgcctaccacgtgtttcaagggttgttgatatcatttctgttttgcgaactaacaagcataatggtttccctgttgttgaccgtgggcagaatggcgagtcacttgtcataggtctcatacttcgtagccacttattggtacttctacaagctaaagtagatttccagaacagtgctttcccctgtgggccaggcgtactgaacaggcacaattttagtgactttgttaaaccagcatcaagtaaaggaaagtcaattgatgatattcatttgacagaggatgaactggggttgtatttggatcttgccccatttttaaatccttcaccatacatagtgccagaggacatgtcgttggcgaaggtgtacaatctcttccgtcaacttggattgagacatatatttgttgttcctaggccttctcgtgttgtaggattgataaccagaaaagatttattacttgaggaggataacaacaatgtgatgccggagctccaatcgacgagtgggcttgctgaacggcaaaatgctcgggggtaatatacatctggaacgtcctcttcttgacaacctagttattgaatagacacgtagcagcatgtatgtcaaaataattttgatagctagcagttaaccttgcactgcatgttgggacatggcccatgggtattatacttcacatgaatgatgaagcagcagtgagcggataatgcagcatggttttggattctgccgactgttgcgcatggatgttggcgttgcgcatcattttttgctccgtcagcagtggctagggaggcgattccccggtgccgtgtgtttagattaggtgattgtaacttacaaaggcgtccatacatacacaccatccatgtatcccacggtaaatttcgaagactgtatgtataagtacatatttgttatacgatggtaaagacaaaagctatgtaggatttgcgtgctctcatgaaactatgatacgtggctataattacttccggttcccgctgaaatcgct

SEQ ID NO: 216685 - DNA, 2861 bp, Zea Mays
gacgaactcttggttctcaagctttcccggccagtctcgcagcaaccctttccctaccccgatcgagcgtgcgtcaaggtcgggatccggcgccgccgcatcccgatccgatgctctccggcgtcgaccacgacgttcccgacggcatcgggatggcgcggctcgcgtggacgcgcctccccaccgccgacggggagggggcgggcccctccacttccgaggccgcggacgacgaactcttatcgggcgctgccatagagagcctcgactacgaggtcatcgagaactacgcgtaccgggaggagcaggcgcagcggagcaagttctgggtgccctactacgtcatgctcaagtggctgttcgctctgctgatcggcgttggtactggattagctgctatattcataaacctggctgttgagaacttctctggatggaaatatactgcgacatttgctataataaagcactcgtattttgtgggattctttgtgtacacagttttcaatttagccctggtcttctcttctgtatatatagtcacaaactttgctccagcagctgctggatctggtattccagagatcaaaggttacttaaatggagtggatacacatggaatcctccttttcaggacattagttgggaagatctttgggagcattggatcagttggaggtggattggctctagggaaagaagggcctcttgttcatactggggcctgcattgcttcgcttcttggacaaggtggatctgcaaagtaccacttgagttctaggtgggtacggatttttgaaagcgatcgtgataggcgagaccttgtgacatgtggatgtgcagctggagttgctgctgccttcagagctcctgttggtggggtactatttgccttggaggaagttacttcctggtggagaagtcatcttatgtggagagtattcttcacatctgccgtggtggccgttgtggtgcgttcagccatgaattggtgcaacagtggaaaatgcggtcattttggagctggaggttttataatatgggacatatctggaggtcaagaagattactcataccaggaattgtttcctatggcaattattggtgttatcggtggacttcttggggcattatttaatcaactcaccctctatataactaaatggcggcgaacgtgtcttcataagaaagggaaacgagtccaaatctttgaagcctgtcttatatctttggtaacatccacgatttcctttgtgttgccactactgaggaaatgcagcccatgccctaagttagaaactaattctggcatagaatgccctcatccacctggcacagatgggaattttgttaacttctattgttcacaagatagagagtacaatgatttagcaaccattttcttcaatactcaggatgatgcaatacgtaatcttttcagtgcaaaaacatttcatgaatacagtgcacaaagcctgatcactttcctggtcatgttttatttcttggctgttgtgacatttggaactgcagttccggctggccagttcgttcccggaataatgattggatctacatatggaaggcttgttggaatgtttgttgtcaagttctataagaaactaaacattgaggagggcacgtatgcactccttggtgctgcatcgtttcttggaggttcaatgagaatgactgtatctttatgtgttatcatggttgagattacaaacaacttgaaactcttgccattgatcatgcttgttcttctggtttctaaggcggttggtgacttttttaatgaagggttatatgaagagcaagcccgattaaggggcatccctttactggattccaggcctaagcaagtcatgagaaatatgaatgcaagggatgcgtgcaagaatcaaaaggttgttgaccgtgggcagaatggcgagtcacttgtcataggtctcatacttcgtagccacttattggtacttctacaagctaaagtagatttccagaacagtgctttcccctgtgggccaggcgtactgaacaggcacaattttagtgactttgttaaaccagcatcaagtaaaggaaagtcaattgatgatattcatttgacagaggatgaactggggttgtatttggatcttgccccatttttaaatccttcaccatacatagtgccagaggacatgtcgttggcgaaggtgtacaatctcttccgtcaacttggattgagacatatatttgttgttcctaggccttctcgtgttgtaggattgataaccagaaaagatttattacttgaggaggataacaacaatgtgatgccggagctccaatcgacgagtgtaaggggcttgctgaacggcaaaatgctcgggggtaatatacatctggaacgtcctcttcttgacaacctagttattgaatagacacgtagcagcatgtatgtcaaaataattttgatagctagcagttaaccttgcactgcatgttgggacatggcccatgggtattatacttcacatgaatgatgaagcagcagtgagcggataatgcagcatggttttggattctgccgactgttgcgcatggatgttggcgttgcgcatcattttttgctccgtcagcagtggctagggaggcgattccccggtgccgtgtgtttagattaggtgattgtaacttacaaaggcgtccatacatacacaccatccatgtatcccacggtaaatttcgaagactgtatgtataagtacatatttgttatacgatggtaaagacaaaagctatgtaggatttgcgtgctctcatgaaactatgatacgtggctataattacttccggttcccgctgaaatcgct

SEQ ID NO: 216686 - DNA, 2920 bp, Zea Mays
gacgaactcttggttctcaagctttcccggccagtctcgcagcaaccctttccctaccccgatcgagcgtgcgtcaaggtcgggatccggcgccgccgcatcccgatccgatgctctccggcgtcgaccacgacgttcccgacggcatcgggatggcgcggctcgcgtggacgcgcctccccaccgccgacggggagggggcgggcccctccacttccgaggccgcggacgacgaactcttatcgggcgctgccatagagagcctcgactacgaggtcatcgagaactacgcgtaccgggaggagcaggcgcagcggagcaagttctgggtgccctactacgtcatgctcaagtggctgttcgctctgctgatcggcgttggtactggattagctgctatattcataaacctggctgttgagaacttctctggatggaaatatactgcgacatttgctataataaagcactcgtattttgtgggattctttgtgtacacagttttcaatttagccctggtcttctcttctgtatatatagtcacaaactttgctccagcagctgctggatctggtattccagagatcaaaggttacttaaatggagtggatacacatggaatcctccttttcaggacattagttgggaagatctttgggagcattggatcagttggaggtggattggctctagggaaagaagggcctcttgttcatactggggcctgcattgcttcgcttcttggacaaggtggatctgcaaagtaccacttgagttctaggtgggtacggatttttgaaagcgatcgtgataggcgagaccttctggagttgctgctgccttcagagctcctgttggtggggtactatttgccttggaggaagttacttcctggtggagaagtcatcttatgtggagagtattcttcacatctgccgtggtggccgttgtggtgcgttcagccatgaattggtgcaacagtggaaaatgcggtcattttggagctggaggttttataatatgggacatatctggaggtcaagaagattactcataccaggaattgtttcctatggcaattattggtgttatcggtggacttcttggggcattatttaatcaactcaccctctatataactaaatggcggcgaacgtgtcttcataagaaagggaaacgagtccaaatctttgaagcctgtcttatatctttggtaacatccacgatttcctttgtgttgccactactgaggaaatgcagcccatgccctaagttagaaactaattctggcatagaatgccctcatccacctggcacagatgggaattttgttaacttctattgttcacaagatagagagtacaatgatttagcaaccattttcttcaatactcaggatgatgcaatacgtaatcttttcagtgcaaaaacatttcatgaatacagtgcacaaagcctgatcactttcctggtcatgttttatttcttggctgttgtgacatttggaactgcagttccggctggccagttcgttcccggaataatgattggatctacatatggaaggcttgttggaatgtttgttgtcaagttctataagaaactaaacattgaggagggcacgtatgcactccttggtgctgcatcgtttcttggaggttcaatgagaatgactgtatctttatgtgttatcatggttgagattacaaacaacttgaaactcttgccattgatcatgcttgttcttctggtttctaaggcggttggtgacttttttaatgaagggttatatgaagagcaagcccgattaaggggcatccctttactggattccaggcctaagcaagtcatgagaaatatgaatgcaagggatgcgtgcaagaatcaaaaggttgtctgcctaccacgtgtttcaagggttgttgatatcatttctgttttgcgaactaacaagcataatggtttccctgttgttgaccgtgggcagaatggcgagtcacttgtcataggtctcatacttcgtagccacttattggtacttctacaagctaaagtagatttccagaacagtgctttcccctgtgggccaggcgtactgaacaggcacaattttagtgactttgttaaaccagcatcaagtaaaggaaagtcaattgatgatattcatttgacagaggatgaactggggttgtatttggatcttgccccatttttaaatccttcaccatacatagtgccagaggacatgtcgttggcgaaggtgtacaatctcttccgtcaacttggattgagacatatatttgttgttcctaggccttctcgtgttgtaggattgataaccagaaaagatttattacttgaggaggataacaacaatgtgatgccggagctccaatcgacgagtgtaaggggcttgctgaacggcaaaatgctcgggggtaatatacatctggaacgtcctcttcttgacaacctagttattgaatagacacgtagcagcatgtatgtcaaaataattttgatagctagcagttaaccttgcactgcatgttgggacatggcccatgggtattatacttcacatgaatgatgaagcagcagtgagcggataatgcagcatggttttggattctgccgactgttgcgcatggatgttggcgttgcgcatcattttttgctccgtcagcagtggctagggaggcgattccccggtgccgtgtgtttagattaggtgattgtaacttacaaaggcgtccatacatacacaccatccatgtatcccacggtaaatttcgaagactgtatgtataagtacatatttgttatacgatggtaaagacaaaagctatgtaggatttgcgtgctctcatgaaactatgatacgtggctataattacttccggttcccgctgaaatcgct

SEQ ID NO: 216687 - DNA, 2908 bp, Zea Mays
gccacaaattcacgggaccaacttgacgaactcttggttctcaagctttcccggccagtctcgcagcaaccctttccctaccccgatcgagcgtgcgtcaaggtcgggatccggcgccgccgcatcccgatccgatgctctccggcgtcgaccacgacgttcccgacggcatcgggatggcgcggctcgcgtggacgcgcctccccaccgccgacggggagggggcgggcccctccacttccgaggccgcggacgacgaactcttatcgggcgctgccatagagagcctcgactacgaggtcatcgagaactacgcgtaccgggaggagcaggcgcagcggagcaagttctgggtgccctactacgtcatgctcaagtggctgttcgctctgctgatcggcgttggtactggattagctgctatattcataaacctggctgttgagaacttctctggatggaaatatactgcgacatttgctataataaagcactcgtattttgtgggattctttgtgtacacagttttcaatttagccctggtcttctcttctgtatatatagtcacaaactttgctccagcagctgctggatctggtattccagagatcaaaggttacttaaatggagtggatacacatggaatcctccttttcaggacattagttgggaagatctttgggagcattggatcagttggaggtggattggctctagggaaagaagggcctcttgttcatactggggcctgcattgcttcgcttcttggacaaggtggatctgcaaagtaccacttgagttctaggtgggtacggatttttgaaagcgatcgtgataggcgagaccttgtgacatgtggatgtgcagctggagttgctgctgccttcagagctcctgttggtggggtactatttgccttggaggaagttacttcctggtggagaagtcatcttatgtggagagtattcttcacatctgccgtggtggccgttgtggtgcgttcagccatgaattggtgcaacagtggaaaatgcggtcattttggagctggaggttttataatatgggacatatctggaggtcaagaagattactcataccaggaattgtttcctatggcaattattggtgttatcggtggacttcttggggcattatttaatcaactcaccctctatataactaaatggcggcgaacgtgtcttcataagaaagggaaacgagtccaaatctttgaagcctgtcttatatctttggtaacatccacgatttcctttgtgttgccactactgaggaaatgcagcccatgccctaagttagaaactaattctggcatagaatgccctcatccacctggcacagatgggaattttgttaacttctattgttcacaagatagagagtacaatgatttagcaaccattttcttcaatactcaggatgatgcaatacgtaatcttttcagtgcaaaaacatttcatgaatacagtgcacaaagcctctgcagttccggctggccagttcgttcccggaataatgattggatctacatatggaaggcttgttggaatgtttgttgtcaagttctataagaaactaaacattgaggagggcacgtatgcactccttggtgctgcatcgtttcttggaggttcaatgagaatgactgtatctttatgtgttatcatggttgagattacaaacaacttgaaactcttgccattgatcatgcttgttcttctggtttctaaggcggttggtgacttttttaatgaagggttatatgaagagcaagcccgattaaggggcatccctttactggattccaggcctaagcaagtcatgagaaatatgaatgcaagggatgcgtgcaagaatcaaaaggttgtctgcctaccacgtgtttcaagggttgttgatatcatttctgttttgcgaactaacaagcataatggtttccctgttgttgaccgtgggcagaatggcgagtcacttgtcataggtctcatacttcgtagccacttattggtacttctacaagctaaagtagatttccagaacagtgctttcccctgtgggccaggcgtactgaacaggcacaattttagtgactttgttaaaccagcatcaagtaaaggaaagtcaattgatgatattcatttgacagaggatgaactggggttgtatttggatcttgccccatttttaaatccttcaccatacatagtgccagaggacatgtcgttggcgaaggtgtacaatctcttccgtcaacttggattgagacatatatttgttgttcctaggccttctcgtgttgtaggattgataaccagaaaagatttattacttgaggaggataacaacaatgtgatgccggagctccaatcgacgagtgggcttgctgaacggcaaaatgctcgggggtaatatacatctggaacgtcctcttcttgacaacctagttattgaatagacacgtagcagcatgtatgtcaaaataattttgatagctagcagttaaccttgcactgcatgttgggacatggcccatgggtattatacttcacatgaatgatgaagcagcagtgagcggataatgcagcatggttttggattctgccgactgttgcgcatggatgttggcgttgcgcatcattttttgctccgtcagcagtggctagggaggcgattccccggtgccgtgtgtttagattaggtgattgtaacttacaaaggcgtccatacatacacaccatccatgtatcccacggtaaatttcgaagactgtatgtataagtacatatttgttatacgatggtaaagacaaaagctatgtaggatttgcgtgctctcatgaaactatgatacgtggctataattacttccggttcccgctgaaatcgct

SEQ ID NO: 216688 - DNA, 2983 bp, Zea Mays
aaaaaacagaacctaaccacgccacaaattcacgggaccaacttgacgaactcttggttctcaagctttcccggccagtctcgcagcaaccctttccctaccccgatcgagcgtgcgtcaaggtcgggatccggcgccgccgcatcccgatccgatgctctccggcgtcgaccacgacgttcccgacggcatcgggatggcgcggctcgcgtggacgcgcctccccaccgccgacggggagggggcgggcccctccacttccgaggccgcggacgacgaactcttatcgggcgctgccatagagagcctcgactacgaggtcatcgagaactacgcgtaccgggaggagcaggcgcagcggagcaagttctgggtgccctactacgtcatgctcaagtggctgttcgctctgctgatcggcgttggtactggattagctgctatattcataaacctggctgttgagaacttctctggatggaaatatactgcgacatttgctataataaagcactcgtattttgtgggattctttgtgtacacagttttcaatttagccctggtcttctcttctgtatatatagtcacaaactttgctccagcagctgctggatctggtattccagagatcaaaggttacttaaatggagtggatacacatggaatcctccttttcaggacattagttgggaagatctttgggagcattggatcagttggaggtggattggctctagggaaagaagggcctcttgttcatactggggcctgcattgcttcgcttcttggacaaggtggatctgcaaagtaccacttgagttctaggtgggtacggatttttgaaagcgatcgtgataggcgagaccttgtgacatgtggatgtgcagctggagttgctgctgccttcagagctcctgttggtggggtactatttgccttggaggaagttacttcctggtggagaagtcatcttatgtggagagtattcttcacatctgccgtggtggccgttgtggtgcgttcagccatgaattggtgcaacagtggaaaatgcggtcattttggagctggaggttttataatatgggacatatctggaggtcaagaagattactcataccaggaattgtttcctatggcaattattggtgttatcggtggacttcttggggcattatttaatcaactcaccctctatataactaaatggcggcgaacgtgtcttcataagaaagggaaacgagtccaaatctttgaagcctgtcttatatctttggtaacatccacgatttcctttgtgttgccactactgaggaaatgcagcccatgccctaagttagaaactaattctggcatagaatgccctcatccacctggcacagatgggaattttgttaacttctattgttcacaagatagagagtacaatgatttagcaaccattttcttcaatactcaggatgatgcaatacgtaatcttttcagtgcaaaaacatttcatgaatacagtgcacaaagcctgatcactttcctggtcatgttttatttcttggctgttgtgacatttggaactgcagttccggctggccagttcgttcccggaataatgattggatctacatatggaaggcttgttggaatgtttgttgtcaagttctataagaaactaaacattgaggagggcacgtatgcactccttggtgctgcatcgtttcttggaggttcaatgagaatgactgtatctttatgtgttatcatggttgagattacaaacaacttgaaactcttgccattgatcatgcttgttcttctggtttctaaggcggttggtgacttttttaatgaagggttatatgaagagcaagcccgattaaggggcatccctttactggattccaggcctaagcaagtcatgagaaatatgaatgcaagggatgcgtgcaagaatcaaaaggttgtctgcctaccacgtgtttcaagggttgttgatatcatttctgttttgcgaactaacaagcataatggtttccctgttgttgaccgtgggcagaatggcgagtcacttgtcataggtctcatacttcgtagccacttattggtacttctacaagctaaagtagatttccagaacagtgctttcccctgtgggccaggcgtactgaacaggcacaattttagtgactttgttaaaccagcatcaagtaaaggaaagtcaattgatgatattcatttgacagaggatgaactggggttgtatttggatcttgccccatttttaaatccttcaccatacatagtgccagaggacatgtcgttggcgaaggtgtacaatctcttccgtcaacttggattgagacatatatttgttgttcctaggccttctcgtgttgtaggattgataaccagaaaagatttattacttgaggaggataacaacaatgtgatgccggagctccaatcgacgagtgtaaggggcttgctgaacggcaaaatgctcgggggtaatatacatctggaacgtcctcttcttgacaacctagttattgaatagacacgtagcagcatgtatgtcaaaataattttgatagctagcagttaaccttgcactgcatgttgggacatggcccatgggtattatacttcacatgaatgatgaagcagcagtgagcggataatgcagcatggttttggattctgccgactgttgcgcatggatgttggcgttgcgcatcattttttgctccgtcagcagtggctagggaggcgattccccggtgccgtgtgtttagattaggtgattgtaacttacaaaggcgtccatacatacacaccatccatgtatcccacggtaaatttcgaagactgtatgtataagtacatatttgttatacgatggtaaagacaaaagctatgtaggatttgcgtgctctcatgaaactatgatacgtggctataattacttccggttcccgctgaaatcgct

SEQ ID NO: 216689 - DNA, 3106 bp, Zea Mays
gagtaaccaaaccaagcaccacgcgcggccatggccttccccgccgacgcgctggttctagagatcaccgacacatcatcctccgccaccgccgccgccgcccgtgctccatcctcaccttctcccccgccgctgtccatctccgacctcgcgcgcttcgacccgctcccatccccaaccgttgccgttcgcgtcgaccggcacaggctaatcgagagctcctcctacttccgcgcgctcctcggcggcagcttcagtgaatccggcagagagcatgtgcgtgtgggctgcaatttggaggctgctgtgcaagtgctgcgctacctttttgagccttccgagagctttaacatcacgcacaacaatttcctccccctgttggagggagctttgtttcttgctgttgagagccttctagtggagtgtcaaagatggttcggcaccatagcctctcaaacttctgccatgtcagttccattagatttcataattgaagtctggtactttgctgaagagcatggtgttacttttgttcaagacatttgccaaaaatttctagctcagaattttgtaggcacatgctatctcaggaaggtcatttaataaaataccttatgatttgctatgttcagcgatcaaatgtccacatctgacagtggatagtgaaaaacaattgtgtgaagcaattttgtattgggtttcagaaaatatgaaagcctgtgaacaatcaaaccccaactcagtagatggccacctcttcattcttagcaaggtgaagatatgccttttaccattaggatttgcggcagggacaatgaggcattggtttgactttggaaacaagatcatatgcactattcttgatcttctcaaagacagtttgaaaactttattggatgctgttgatgatggtaacttggatcgatattgcattcgaataacagaatattcaaagaacatagtgctttcaggatgtccccaagtaactacagcattcttgtacatatctgttctccctaatgatctgagtgtttcattgaagagaaggatagtgagttcatacacccaggttgatcatcaaaccttcgttctttatgaggaattagagaaggctactaaaaccttatcatttaagaatgtacacatggtggatatttcaaaatgtccaaacgttcattttggcgcagcaattgactggttgaagttgggttttccagaattaagggtattcagggtttcacattgtttatcatttcaatttgatgatttactatatctgttaatgagatgtccatggattgatgaaattgatatgactattgatacaagcactgtaacacccagacattcagtaatctcgtctagttctgaagtcctaagcaaggcaaaaccaaatcagaaaagatatggcatacattgttcagcatatgacaggcaaccaaattcggttttcttaaatatatcaagattgacattggaaggcagaaatgatattgatgatatggacttgttggagatatctgtcctgaaaaattctctgtgctatataaacattagaaactgcttcctgttgacggatgatggtatttctaaccttctgatgaagtgtacaaagatccattcgatggttctttcttatacttcttttggaaatcgatcaattcaaatgctatgcgctgccaatccttctggccacaacagtggacatgctcatgttatggcatcttatatgcaagaattacatctggatggctgcaaaggtattgactctgttgctttgtcgcagctagtgagcattataagtatcacaaagtttttgagcttaagggaaacatcacttacagatggtgcactctgcaagtttgttggctctagtctggagtatcttgacgtttcagagactgtgatttctatggtatcattagcaccagttattcaaagaaactgtaaattgaactgtctgaaaacagctggatgctgtagtcttctgttgcaatgtgctaatgtagaacatatcaatggtaacaagtatggagattttctacaggagttaggaactacctactgtctggaggatgttgaaatgggctggggattttgccctattcgaatcgaagaccttgttccttcttttagtaaagtaaggaagatgaaaattggtctcggcacatcattagcggagaatgttctgtgtgctcttcctatgatttgcccattcctcgagtctttgattctaaggtttcaggtgatatctgacagagttgttagacgtctattggaatcagcaacaaatcttcagagaattgcaatttggctgaactttcactttctggttgcaaacttcttgactccagctctcaagacattatctcatctgggtggccaaacttggcacttttacaccttgaggaatgtggtaaagtaactgttgaaggggtttcttcttttttcaactgtaaggctttggaagacgtcctactacggcacacgggtaggggcatcggaaggagcatcatagacgatgctatcagagagttaccactactgcggaagctggctttggatctttgcgatgcctgtgaagacggttacgatagcccaaacgatgcggaagggaagatgattagaagtgtaaggatgagtcgatgcaagaagatggcggggtcgtgtttggaggtccccagacaagggtcttcaacttcaaggccggtgcacaaggacactgtagtgctggaatggagcagcagaatgttcacaaccaccatagtgaaagaaagagtgtgatgagcctcttctgtagttttgtccctgatgaagaacacaagagcaggccacaatatatatgacttgtatgaatggtctccccgcttctgattttgaatgctttgtatgtggacatatcctcgtgtgtgaatgtatttgtatggtatcaaacgaagatcatcttttgcagtcgtactgtacccatgcactcttatgttgatccacgaacaaagtttggaatttttaggtgaccgtgttcatgtttgaaaattattgttgtactagtccttggtaaaataaaggaggcaaggcaggagccaaaaaaaaagacaaaaaacttaat

SEQ ID NO: 216690 - DNA, 3495 bp, Zea Mays
gagtaaccaaaccaagcaccacgcgcggccatggccttccccgccgacgcgctggttctagagatcaccgacacatcatcctccgccaccgccgccgccgcccgtgctccatcctcaccttctcccccgccgctgtccatctccgacctcgcgcgcttcgacccgctcccatccccaaccgttgccgttcgcgtcgaccggcacaggctaatcgagagctcctcctacttccgcgcgctcctcggcggcagcttcagtgaatccggcagagagcatgtgcgtgtgggctgcaatttggaggctgctgtgcaagtgctgcgctacctttttgagccttccgagagctttaacatcacgcacaacaatttcctccccctgttggagggagctttgtttcttgctgttgagagccttctagtggagtgtcaaagatggttcggcaccatagcctctcaaacttctgccatgtcagttccattagatttcataattgaagtctggtactttgctgaagagcatggtgttacttttgttcaagacatttgccaaaaatttctagctcagaattttgtaggcacatgctatctcaggaaggtcatttaataaaataccttatgatttgctatgttcagcgatcaaatgtccacatctgacagtggatagtgaaaaacaattgtgtgaagcaattttgtattgggtttcagaaaatatgaaagcctgtgaacaatcaaaccccaactcagtagatggccacctcttcattcttagcaagcaggtgaagatatgccttttaccattaggatttgcggcagggacaatgaggcattggtttgactttggaaacaagatcatatgcactattcttgatcttctcaaagacagtttgaaaactttattggatgctgttgatgatggtaacttggatcgatattgcattcgaataacagaatattcaaagaacatagtgctttcaggatgtccccaagtaactacagcattcttgtacatatctgttctccctaatgatctgagtgtttcattgaagagaaggatagtgagttcatacacccaggttgatcatcaaaccttcgttctttatgaggaattagagaaggctactaaaaccttatcatttaagaatgtacacatggtggatatttcaaaatgtccaaacgttcattttggcgcagcaattgactggttgaagttgggttttccagaattaagggtattcagggtttcacattgtttatcatttcaatttgatgatttactatatctgttaatgagatgtccatggattgatgaaattgatatgactattgatacaagcactgtaacacccagacattcagtaatctcgtctagttctgaagtcctaagcaaggcaaaaccaaatcagaaaagatatggcatacattgttcagcatatgacaggcaaccaaattcggttttcttaaatatatcaagattgacattggaaggcagaaatgatattgatgatatggacttgttggagatatctgtcctgaaaaattctctgtgctatataaacattagaaactgcttcctgttgacggatgatggtatttctaaccttctgatgaagtgtacaaagatccattcgatggttctttcttatacttcttttggaaatcgatcaattcaaatgctatgcgctgccaatccttctggccacaacagtggacatgctcatgttatggcatcttatatgcaagaattacatctggatggctgcaaaggtattgactctgttgctttgtcgcagctagtgagcattataagtatcacaaagtttttgagcttaagggaaacatcacttacagatggtgcactctgcaagtttgttggctctagtctggagtatcttgacgtttcagagactgtgatttctatggtatcattagcaccagttattcaaagaaactgtaaattgaactgtctgaaaacagctggatgctgtagtcttctgttgcaatgtgctaatgtagaacatatcaatggtaacaagtatggagattttctacaggagttaggaactacctactgtctggaggatgttgaaatgggctggggattttgccctattcgaatcgaagaccttgttccttcttttagtaaagtaaggaagatgaaaattggtctcggcacatcattagcggagaatgttctgtgtgctcttcctatgatttgcccattcctcgagtctttgattctaaggtttcaggtgatatctgacagagttgttagacgtctattggaatcagcaacaaatcttcaggtgctttgcctgcactattgtcttggaagtttaacttcatttagtttccaaacaaaggcacctgcattaagagtattgcggcttcattgggtaacttcatggcttacaaatgatgacttgacaatccttacagagaattgcaatttggctgaactttcactttctggttgcaaacttcttgactccagctctcaagacattatctcatctgggtggccaaacttggcacttttacaccttgaggaatgtggtaaagtaactgttgaaggggtttcttcttttttcaactgtaaggctttggaagacgtcctactacggcacacggtgagtatgaaaaatatcgtagcaggttcttggtatatagttctggtgaatcttaaaacacaacgtagaaccatactaaatgacgtgacatggctacagctgaaacaaaatttcaccatgctgttgcaaaattgcagtccatctgtgcatgtcatttccaggacttctaccggtgtaacttttctccgttgaaaaagttgaattgttgattcacttgattggttatatagtttctgagagttgggaaccgcagggtaggggcatcggaaggagcatcatagacgatgctatcagagagttaccactactgcggaagctggctttggatctttgcgatgcctgtgaagacggttacgatagcccaaacgatgcggaagggaagatgattagaagtgtaaggatgagtcgatgcaagaagatggcggggtcgtgtttggaggtccccagacaagggtcttcaacttcaaggccggtgcacaaggacactgtagtgctggaatggagcagcagaatgttcacaaccaccatagtgaaagaaagagtgtgatgagcctcttctgtagttttgtccctgatgaagaacacaagagcaggccacaatatatatgacttgtatgaatggtctccccgcttctgattttgaatgctttgtatgtggacatatcctcgtgtgtgaatgtatttgtatggtatcaaacgaagatcatcttttgcagtcgtactgtacccatgcactcttatgttgatccacgaacaaagtttggaatttttaggtgaccgtgttcatgtttgaaaattattgttgtactagtccttggtaaaataaaggaggcaaggcaggagccaaaaaaaaagacaaaaaacttaat

SEQ ID NO: 216691 - DNA, 3557 bp, Zea Mays
gtccttgacagagtaaccaaaccaagcaccacgcgcggccatggccttccccgccgacgcgctggttctagagatcaccgacacatcatcctccgccaccgccgccgccgcccgtgctccatcctcaccttctcccccgccgctgtccatctccgacctcgcgctaatcgagagctcctcctacttccgcgcgctcctcggcggcagcttcagtgaatccggcagagagcatgtgcgtgtgggctgcaatttggaggctgctgtgcaagtgctgcgctacctttttgagccttccgagagctttaacatcacgcacaacaatttcctccccctgttggagggagctttgtttcttgctgttgagagccttctagtggagtgtcaaagatggttcggcaccatagcctctcaaacttctgccatgtcagttccattagatttcataattgaagtctggtactttgctgaagagcatggtgttacttttgttcaagacatttgccaaaaatttctagctcagaattttgcacatgctatctcaggaaggtcatttaataaaataccttatgatttgctatgttcagcgatcaaatgtccacatctgacagtggatagtgaaaaacaattgtgtgaagcaattttgtattgggtttcagaaaatatgaaagcctgtgaacaatcaaaccccaactcagtagatggccacctcttcattcttagcaaggtgaagatatgccttttaccattaggatttgcggcagggacaatgaggcattggtttgactttggaaacaagatcatatgcactattcttgatcttctcaaagacagtttgaaaactttattggatgctgttgatgatggtaacttggatcgatattgcattcgaataacagaatattcaaagaacatagtgctttcaggatgtccccaagtaactacagcattcttgtacatatctgttctccctaatgatctgagtgtttcattgaagagaaggatagtgagttcatacacccaggttgatcatcaaaccttcgttctttatgaggaattagagaaggctactaaaaccttatcatttaagaatgtacacatggtggatatttcaaaatgtccaaacgttcattttggcgcagcaattgactggttgaagttgggttttccagaattaagggtattcagggtttcacattgtttatcatttcaatttgatgatttactatatctgttaatgagatgtccatggattgatgaaattgatatgactattgatacaagcactgtaacacccagacattcagtaatctcgtctagttctgaagtcctaagcaaggcaaaaccaaatcagaaaagatatggcatacattgttcagcatatgacaggcaaccaaattcggttttcttaaatatatcaagattgacattggaaggcagaaatgatattgatgatatggacttgttggagatatctgtcctgaaaaattctctgtgctatataaacattagaaactgcttcctgttgacggatgatggtatttctaaccttctgatgaagtgtacaaagatccattcgatggttctttcttatacttcttttggaaatcgatcaattcaaatgctatgcgctgccaatccttctggccacaacagtggacatgctcatgttatggcatcttatatgcaagaattacatctggatggctgcaaaggtattgactctgttgctttgtcgcagctagtgagcattataagtatcacaaagtttttgagcttaagggaaacatcacttacagatggtgcactctgcaagtttgttggctctagtctggagtatcttgacgtttcagagactgtggtgcgatactgattatgtaatttagttttgtgcttctaataatcaagcactacaattgaccaattgatgaaacattcatactggaacattcactgagctaggagactattgatgagtaatacatagtgtgctgggggctattatttctattatctggttgatatgttatactcctatactgtaggcagggtatagacgtatattgtgttcatgaacttttctgctactttattttagtatgacagctatcacttttttatcttcgctacctccagagggcaaaccccaaaagtttatgattatgtttttatttttgcataccatattagagtgcttaattctttttttctgtccattgacttgcagatttctatggtatcattagcaccagttattcaaagaaactgtaaattgaactgtctgaaaacagctggatgctgtagtcttctgttgcaatgtgctaatgtagaacatatcaatggtaacaagtatggagattttctacaggagttaggaactacctactgtctggaggatgttgaaatgggctggggattttgccctattcgaatcgaagaccttgttccttcttttagtaaagtaaggaagatgaaaattggtctcggcacatcattagcggagaatgttctgtgtgctcttcctatgatttgcccattcctcgagtctttgattctaaggtttcaggtgatatctgacagagttgttagacgtctattggaatcagcaacaaatcttcaggtgctttgcctgcactattgtcttggaagtttaacttcatttagtttccaaacaaaggcacctgcattaagagtattgcggcttcattgggtaacttcatggcttacaaatgatgacttgacaatccttacagagaattgcaatttggctgaactttcactttctggttgcaaacttcttgactccagctctcaagacattatctcatctgggtggccaaacttggcacttttacaccttgaggaatgtggtaaagtaactgttgaaggggtttcttcttttttcaactgtaaggctttggaagacgtcctactacggcacacgggtaggggcatcggaaggagcatcatagacgatgctatcagagagttaccactactgcggaagctggctttggatctttgcgatgcctgtgaagacggttacgatagcccaaacgatgcggaagggaagatgattagaagtgtaaggatgagtcgatgcaagaagatggcggggtcgtgtttggaggtccccagacaagggtcttcaacttcaaggccggtgcacaaggacactgtagtgctggaatggagcagcagaatgttcacaaccaccatagtgaaagaaagagtgtgatgagcctcttctgtagttttgtccctgatgaagaacacaagagcaggccacaatatatatgacttgtatgaatggtctccccgcttctgattttgaatgctttgtatgtggacatatcctcgtgtgtgaatgtatttgtatggtatcaaacgaagatcatcttttgcagtcgtactgtacccatgcactcttatgttgatccacgaacaaagtttggaatttttaggtgaccgtgttcatgtttgaaaattattgttgtactagtccttggtaaaataaaggaggcaaggcaggagccaaaaaaaaagacaaaaaacttaat

SEQ ID NO: 216692 - DNA, 2609 bp, Zea Mays
atgacctcgccgcagcccactaagctattgccgtcagtcctcctcgtccggcacctgacactctccttctccttaactgccttcagctggacgcctggaccagagggaaggctcacagccgccgcagggtgccagggcgttagggccttagggcaaagcatagcaacggcggctgcgcagcaagcagttcagctcagcacctcgccggacgccggctcacccatccggccatcccctgccggccgactctccctggtccccagcgcagcaagcagttcaccggagccggcgcagcaagtagtcaggcaagtctccatttccagatctcaacacaggaggcttttgtagatttgtttgtgtttagcaattagtccctattgcaggttgattaacaaggtttgggtttgggagcacttcacaaggtatgaggtagaggttcaggaagctgatggttctattgttaagcaaaagtgggctaaatgcctaagatgttcacataaagctaaggcatatagttataatggcacaaaggcttttagtaaccatttaaggatgaagcatcaagttttgaaaggtcaacaaatgcttagtcagagtggggatgccatagcaacatataaatatgatgagaatgctagtgtgagacttttatattatgccattatcatgcatgagtatccgtttagtattgctcaacataggtactttgtgaaattcatcaaatcattaagaccatcatttccttcgaagtctcgtgttactgtttgtaaagagatcatggaactttataaggaggaaaagaatctactgtatgcacaattcaataaactatcatgtcgtgttagttttactatggatacttggacatctattcagaacaagtcatatttgtgtgttactgcacattggattgatgatcattggaaaatgcaaaaaaggattatcaactttatgcatgtagaaggcagccatggaggaataaaattgagcgatacattttttgcaaatgtgttgaattggaacctagataagaaaatgtttgctctttctttggataatgctgctgcaaacaaggtagccgttgagatagtgattgaaaatgctaaagagttgcttgtatgtgatggaaaattctttcatgttagatgtgcaaatcatatattgaatctagttgctagagatggattatcatgccttggaaatgtcattggaaacattagacaatttgtaacaattatcaaaaggtcacctttgcagttggaggcatttgagaaatgtgctaaagaatgtggtctagaccctaaaaagaccctttccttggatgttgctactagatggaactctacatatatcatgattagagatgccatttactataagaatgcttttgatcgtctggctaaaaaagataaggacaaatatggtcacatcaatccttcaagcactgattggttgaatgcaacaaatattagcaagtgtttgaaaaaattctatgatgtcacattgcttttttccggtacttcatatcctactgcaaatcatttctttcggaagttttctgagattaagatggctattgcaagatggtgtgatagtagtgatctggtaatttgcacaatggcattttctatgagacacaagtttgataaatattgggaaatgaacaatttagctttggcagtgggagcatttcttgatcctagatacaaacataggatgattgagctatatatgtctaagatgtatggcagtgataaagccgagttagagaaattagtattcatgaatgttatcaatgaattatttgcatattattcagcagtcatcaatgcaaaatcaaccacaaaaggttctagttcaagagagagtgagtttgttccacataaaaatacttgtttggtggatgaggaggaggatgaggttgatcttgatgagttgtatgcaacaacaagcaatgacaagaaggtgtcagagttagatttgtatatgagcgaggacctagtgaaggtcaatgacaatgaagcaacatttgatatcctatcatggtggaaagggcaagtcacaaattttcctattctttctacccttgctcgtgatgtgttgtctatgcaagtgtctactgttgcttcagagtctgcatttagttcgggtggacgcattgttgatgcattccgttcaagactcaaaccagaatttattgaggcattggtttgttgtaaagattggaagattgcttcggagaaagatttggagattgaaattaaaaccttaagtgaacctatgaatgacgttgacttggaggatgctgctgcaattggaacttgagaagttaaagttcaagttaccatggatgatgttgaacttgttacttattgttgtaatgttgtggagcggaggtttgctggttgtttggttgttgcaactttattttcttatttgcacttcttcacttgaacatgttaattaatgtcaactatctactatttgttatatacttgtggatttgtggattatgcctaaaataggggaaatgctgccgaatttttttaatattagtaactttgaactgcatgatgttaattttataggtttcttttcctacatttgat

SEQ ID NO: 216693 - DNA, 398 bp, Zea Mays
ctgctgctgacgcggaggggccggacgagggcggcggcggcgtacccgaagatggcgcggccgccgatcctgtccgtcgcgctgccgtccgacaccggccgcgttctcagcatccagtcccacaccgtctgggggtacgttggcaacaaatcggccgtcttccccctgcagctcctcggctttgatgtggatccaataaactctacagtttttctaaccatacagtgatacaggttacataggcccggtttcctttttaaatactatgctacaagttgttgacaaattacgatcagtcaatcctgaccttgtatacgtttgcgacccagtcctaggtgatgaaggaaaaactatacgttcctcaggagctaacatctgtttatcaacagaaggtgatt

SEQ ID NO: 216694 - DNA, 1588 bp, Zea Mays
ctcacatcttcctttccttccctttcccctcctctctcacgggcttctctctcacatctcgtcatgccgcatcgtcccacgcgtccctccttccgtggtctcaccggcgaccccctcagcacagcaccttgcccggccggctgcccctccgcagtgccttggccccatcgttgcccgagctgcatctcccgcaccctcgtcgcctgagccgccactgtgccttggccccacgagccgtcatgcctagccccgtgtgcagccgtgctcctagtccgtcgtcgtgccttggccctacgtgccgctgtgcctggctcgcgcctgcctgtattcgccaaccactacggcgaagactagtggttgcttgagatcagcgctggttgcctcgtgtgaaggatgttgatgtcgaatggattggctaggcgggcgttaacctaccagactgatacactgttgctcttattattaggcactagcatagctaaaggctctaggcaaccgtttgtcatggagacagtgaaagatgatgatgctgcaaaactgggtttgatatcaggtaaacatctgctattcgacacttctgtaatagtaagcagaaaggagcaagtcctcattttttatatgtgcaatgttgctttcatgctacacgagaggggtgaatgctagttataaaacaatggattatttgacataatgtagatgagattttcgcaactattcttatgtactgcaatatttgaaataaacagcccttgcaagatgttagggtcctcctaaaacatatgaatgaccattggattagtctaacattactctttaggcttcctagaccatgtaagcagtctttcacaagtccacgatgactttatttaaacatggagttagcacacataggtagagatagtaatggagtggtagttgttaattcttgaactattgaatttggcaaggacatcggttattgaatttggcaagcaaagatttatccctgatttggcaaggacatgttgcagaaatttacatggcgtccgttttcccatattactatactggtaaactaaagctacaaaaatggaggcaagcatattaactcgtttaatgccacgttcacaagtgatatcctagaactttagttttaaatgttaccggtgccagcttccaatgtttattatacttgtttgcatattgatatatttgttcaagttcttcaagctgatggtggtaagtgtgctaccttcctactttcaagcttacaaccttgtttaaatggaattgttttgcgcatgaggtctgcttttggaaacatcttcagtgctaatttgagacaagctcctgcaaggcaagctgcactgggcacagggatactaaacactgttgtttgtgctttttatgattgaggaatacttgaagaagagtacttgtggtctttatcttgtgctgagatgcatgttctttacctaccgaacatcagacccctccagctaccttgctgacgcgtgaacgagaagacgggttagactttgtcgaaaccctcttcgctagtggaggtatcgaccatcactcgtcactgtaccccgatggtgatcgacga

SEQ ID NO: 216695 - DNA, 1489 bp, Zea Mays
ctcacatcttcctttccttccctttcccctcctctctcacgggcttctctctcacatctcgtcatgccgcatcgtcccacgcgtccctccttccgtggtctcaccggcgaccccctcagcacagcaccttgcccggccggctgcccctccgcagtgccttggccccatcgttgcccgagctgcatctcccgcaccctcgtcgcctgagccgccactgtgccttggccccacgagccgtcatgcctagccccgtgtgcagccgtgctcctagtccgtcgtcgtgccttggccctacgtgccgctgtgcctggctcgcgcctgcctgtattcgccaaccactacggcgaagactagtggttgcttgagatcagcgctggttgcctcggctctaggcaaccgtttgtcatggagacagtgaaagatgatgatgctgcaaaactgggtttgatatcaggtaaacatctgctattcgacacttctgtaatagtaagcagaaaggagcaagtcctcattttttatatgtgcaatgttgctttcatgctacacgagaggggtgaatgctagttataaaacaatggattatttgacataatgtagatgagattttcgcaactattcttatgtactgcaatatttgaaataaacagcccttgcaagatgttagggtcctcctaaaacatatgaatgaccattggattagtctaacattactctttaggcttcctagaccatgtaagcagtctttcacaagtccacgatgactttatttaaacatggagttagcacacataggtagagatagtaatggagtggtagttgttaattcttgaactattgaatttggcaaggacatcggttattgaatttggcaagcaaagatttatccctgatttggcaaggacatgttgcagaaatttacatggcgtccgttttcccatattactatactggtaaactaaagctacaaaaatggaggcaagcatattaactcgtttaatgccacgttcacaagtgatatcctagaactttagttttaaatgttaccggtgccagcttccaatgtttattatacttgtttgcatattgatatatttgttcaagttcttcaagctgatggtggtaagtgtgctaccttcctactttcaagcttacaaccttgtttaaatggaattgttttgcgcatgaggtctgcttttggaaacatcttcagtgctaatttgagacaagctcctgcaaggcaagctgcactgggcacagggatactaaacactgttgtttgtgctttttatgattgaggaatacttgaagaagagtacttgtggtctttatcttgtgctgagatgcatgttctttacctaccgaacatcagacccctccagctaccttgctgacgcgtgaacgagaagacgggttagactttgtcgaaaccctcttcgctagtggaggtatcgaccatcactcgtcactgtaccccgatggtgatcgacga

SEQ ID NO: 216696 - DNA, 1246 bp, Zea Mays
atgtcaacaccacacattgattgcttgctggatggactaaagccaatacaggttgctgctttgagaaataaccgtgaatttctggaacttcttttagcattaactatcccatttctaagtgtgtcaaattggagttttgatggaatcacaaaatacatgttgtctaaagctgctgtgggagagtcacaagtaaaagaagctacatctctgaattcagccagtttagccggaccgcaatctgctgggtcacaagtaaaagaagctacatctctgaattcagccagtttagccggaccgcaatctgctggggtgtcatctagcgcaaaaggggattcgatggaagctaatttgagaggttatgatgcctataaaaatgaaaattacattggagcggtggatgcttacacacaggccattgacttggatcctagcaatgccacactctggtcaaacaagagcctttgctggttgttgcttgggatggctgaaactgccttggaggatgcaaagcaatctcgaacattgagaccagattcggggatagcttgctacagggaaggtgcggcattgcacgagctacagcctactgataatgcatcaagattctacaaatggttcgctgagggggaagagaaggaagtttgctaaaggatcttaaatattgcgtctttggacttgggaacacgcagtatgagcattttaataaggttgcaaagatggtgcatgagctgctacaagaacagggtgggaaacgccttgttcctgttggccttgccttggagacgatgatgagtgcatcgaggatttcaccgcatggtatgaaggctacaataatgcaatctggttgcattccttcccctggtagacattatgcaatctagcttgttgcttcaaacgccaaatccatgaatgagttctaattcttggtgtcgattggtcctttatgtggatactaaacagaggtatctttgtcctaccagccaggagtttgtttctggtccggattggggaaatgaatgtccttactaagtcattatccaacagtagatgatttgctaaatttttttttggctcagctacaaggcaggagaccttactagtagtatgttgaagtcagacaattgaagaactagtcttttgtgctatctcataggtcagatggtgatgagctcgcagatataagctagctacttgactcagctgttggaggcgcgcccttagacaccatcagggttagggaacatgc

SEQ ID NO: 216697 - DNA, 5941 bp, Zea Mays
atgtcaacaccacacattgattgcttgctggatggactaaagccaatacaggttgctgctttgagaaataaccgtgaatttctggaacttcttttagcattaactatcccatttctaagtgtgtcaaattggagttttgatggaatcacaaaatacatgttgtctaaagctgctgtgggagagtcacaagtaaaagaagctacatctctgaattcagccagtttagccggaccgcaatctgctgggtcacaagtaaaagaagctacatctctgaattcagccagtttagccggaccgcaatctgctggggtgtcatctagcgcaaaaggggattcgatggaagctaatttgagaggttatgatgcctataaaaatgaaaattacattggagcggtggatgcttacacacaggccattgacttggatcctagcaatgccacactctggtcaaacaagagcctttgctggttgttgcttgggatggctgaaactgccttggaggatgcaaagcaatctcgaacattgagaccagattcggggatagcttgctacagggaaggtgcggcattgcacgagctacagggatgttgttgaggagggaatgaagtcgcaagccaaacctaaccagtcttccactgcagccaggagtctcttcggtcaaatgtgatgtgatgatgatgtgacaaatgattgagtgttttgcaccagaatccaaaacaattgcaacacaatttgttttttagggaaagtgttaaactgtaatttgacaaattgtgatggttttgccacgtttgatgatgtaggtctggggcttcacgaccagtaggttaagcgcacaggacagatgcactgtttggtgctggtttagcatatctactaatagcgaaatatctctgcaccatgagctctcgaacctggccactccacgttccaaaatcaggacctttggatggatcttgggcttgatctcaaccgtcgtttcttttgccttccgcgccatcattccacaggccgcgagcgctcgcgtttttccttgagcgtcgttcttgccaatgctagctctccaattttttttatttttatatttaaattaattttgtttgtaaaaatattgtacgaattttaaaatttgtagaaatatggtcctgtcgtcctttgagaggatgattttttgtctttttttattgaacgaattgcaacggctagtagcagatacctgtgtacgttcgcaggaatgatgtgctgcacaggcaatgaggaggcctggaacagcccgaactggcggaggacccggtgcacaacgtgctcctccacgaagatgtcgaagacgagcggtttcctagtcggccaatagtccctgtcttaaaagcatagggacaaaaggccgtaaggagcacgttgttgcacgacgttgtcggcgtacagggtctagtggacctggtcatccttcaggtcgtcgagctcagcgacgaagctcaagtacgacctccgtgtctgccgatttttttagctcttttttcgaaaaaaattcatgtttagacccctggaagacttaattccgtttttggaccctttgctcggcgtcatagcctgtggcgccgaggtaacacgtctcggtgtcacaggctgtggcgccgaggtaccagccgcgctggcgagcgaggactgacgcggcgttcacgtggcacctagctacctgaggtcgcagtggagtcaagctactggtggcggaggtggtggaatcggatggcctcctatctacaaaaaaaacatagtagtctcagcaaaaatttcggcagcacctttctatacgatgaggtttctaaaacccgcagagaaatgaacatcacaatggctgtcatccacactttccaacacagaaaacagcatgatggctgacatacaaatgcgcagtaactaaatatagaaacaacaaaatagctacctacctgtatgtactaacaactatattcactaaatatattaagcaaaatgaaataaactaaagtaaactaagtaaatacttaactaaattacagctaaactaacaaatacacggccggtccacctcgtctcggtggtacaacacctggccgtacgcagaaaggtctatcgcgggctgtccaatctaaaaacctctcgtatgaccagagctgtactagtaaagggcagctagtgaagatggccaaaggatcggtctttatgcagccatcatagaggccccgatacgtcgcgcctagcacgacgttaccccagtactgggaaacctggctaagggaggcattcgcgatcgccctcgcgtagtggatcatgtccttcctcacggagttactgtgagtactagtgaacatgacccacccgaagagccacaacaggtacgcctccatatgtcgggccatcgtgtagctatcggtgtcgatcctcatgtactccgcctgagcacatgaagttagtaacaaaacatggtaatgtacagcgtgttaggttcacggaatggcaccgtgaggagtcatccaatcctgcgtccaaacctcgatagattgtttggtttgctaaagggaaccaacctgtctgccataagattacaccctcctccagtatattcacggcatccactcattcctctagaaataatcggacgaacacatgccggacgcactgatgctagacggggtgtgtactccccaaaccaaacagctcggtaaagattactgtaacggtagtcctaaatgggatgaatacttgatacctcgaactgtctttgtccgaacaaccatttttcatgactccgatcaagcacccacgtttttggcctcgggagccggtaaggtagtttttggtctcccgtgacctatagcacacatttttctagccgaacaaccatttttcaagactctagtggccgaaccatgggagctttacccttaaaaaattagaaagtttgtttgcttgggcattaagcttggtgttatcttgacttacatgttggaaaccaacaacatccttaatgccagggcgtctcccattataaagcatgctacgagcaaatttaaaattttcattttcaagctcatgctcggcaatcttagcatctaattttgctatatgatcattttggtttttaatcaaagcaagatgatcataaatagcatcaacatcaatatctctacatctagtgcaaatagtaacatgctcaacggtagatgtagagacagggcaagcattcaatttctcaatcttagcaattaaattcacattttcagatttaagacaaggaattgaatcattgcaagtttttagctcattagtcaaattcttgcatttttccttttcatgagctaaggccttttctagctaaacatatttatcatgttccttagtgagcaattcttcttgacattctaagacatcatccttttcattgatagagctcactaattcattgattttatcaatttgtttttgagaaaggtctttgaacaataaagttaaatcttcttcattatcactagaatcaccctcgtcatcggaagtagtatatttgggggtggttctaggtgttaccttcctcttggtctccttggccatgagacacttatggccgaggttggggaagagaagtcccttgttgacgacgatgttggcggcgtcctcgtcggaggagtcggtggagctctcgtcggagtcccactctcacaacatgtgcctcgccatccttcttcttgtggtagtatttcttcttctccatcttcttctttcccttcttgtcctcgtccctgtcactatcactagcaaatagacatttagcaatatagtgaccgggcttaccacatcggtagcaaaccctcttggtgcggggtttctagtccttccccttcctttgcttgaggatttgccgaaagctcttgatgataagagccatctcctcattgtcaagcttggaggcgtcaattgggatcctcttgcttggcgtgagttcctccttgtcttcggttgctttgaatgcaacgggttgtgcctcgggtgtggaggtggctccttgctccaagttcgcaatgtgtttggagtgtttggccataagttcaaagctcacaaaatgctttcgtggagtgatgttaggtgatatctcatcttttcactccaaatagaataatctacaccatcaaaatatggtggtttacctaaaggaacggaaatgagattggaacgtctagaaatacgagggtaacgaaaaggaattttgttactctttttgtgctcttggcgcttggagatcgactcggcgtcggatgtcgatggcgtggaggagtcggtctcgtaggcttcatcttctttttcttcttgccatctttcttgtgtgacttgatggagccggcggattcttctttcttttccttgtgcttgtcgccggatagcttaatctcccttgatgaaatcttggcttcatgcttctttcccgaagactcgggctttgccccggtgggtacctcgttcttggcgtgttcactcgacatcacttcgagttgttaaactctaatgaagtgccgggctcctataccaattgaaagtcgcctacagggggggtgaataggcgaagcctgaaaatactcgtcagctcgcttggctcgtggccggctctgctcggcttgtttcaattttgtaatgagctgagctagcatcccagctcggtttgttaacgagccagctcgttagctcgaacgagctagcatttgtcagcaaaataaagcctccactcatgttagatgaactaataagtgatgaactctgttaatttggtcttgaattcatgtggtatatgaaattgtgagtattattacgcattttagtgttaaattggtctataattaattaacaattgattatattgttatgtatatatgcatattatttttgttgttgtggctcgcgagctaaacgagccagctcgatctcacaaatgagccgagccgagctgattctctggctcggttccttaacgagccgagctgagccagctcgttaccttaacaagccagctcgagctcgaccgagccaaaccgagctagctcgatatccagccctagtcaaggttcatggcattctgagccaggtataggactttttccatttagcttcttcctttgccgatgctgtcaccaccatttatgaacaagcaacactgtttcgagttatgcagtttacctctttttgttttgttttttcatctatattttgtggctaattatattcatcttgtgcggatatggggacggaaagcctactgataatgcatcaagattctacaaatggttcgctgagggggaagagaaggaagtttgctaaaggatcttaaatattgcgtctttggacttgggaacacgcagtatgagcattttaataaggttgcaaagatggtgcatgagctgctacaagaacagggtgggaaacgccttgttcctgttggccttgccttggagacgatgatgagtgcatcgaggatttcaccgcatggtatgaaggctacaataatgcaatctggttgcattccttcccctggtagacattatgcaatctagcttgttgcttcaaacgccaaatccatgaatgagttctaattcttggtgtcgattggtcctttatgtggatactaaacagaggtatctttgtcctaccagccaggagtttgtttctggtccggattggggaaatgaatgtccttactaagtcattatccaacagtagatgatttgctaaatttttttttggctcagctacaaggcaggagaccttactagtagtatgttgaagtcagacaattgaagaactagtcttttgtgctatctcataggtcagatggtgatgagctcgcagatataagctagctacttgactcagctgttggaggcgcgcccttagacaccatcagggttagggaacatgc

SEQ ID NO: 216698 - DNA, 921 bp, Zea Mays
aagagtcaggaaaggaggctaatgagttcttctgacgttggggggtatgctagatccttgaggtctacattttcgtcttttgaggcacttcctattccaacaattgctgtcattgaaggagctgcccttggtggtgggctagaactggctttggcgtgcgatcttcgaatatgtggagaaaatgctgaacttggactgccagaaacaagccttgctattatacctggagctggtggtacgcaacgccttcctaggatcatagggaggtccagagcaaaggaactgatattcactggccgcagatgtggtgcagctgaagctgtaacgatggggttagcaaactattgtgttccagcaggagaggcttaccagaaggctcttgacattgcctgtgagataacccagaagggtcccatggggataagaatggcaaagaaggcgatcaatgagggggcagaggttgccgacatgtcctcggcgctggctatcgaaggggagtgctacgagcagctgctttacacgcaggatcgcgttgaggccctagctgcatttgctgagaagaggaagcctgtgtacacaggaaagtagtagtgtcagaaaggatgataatcgtcttgagagtctgctacaagcagagatggtggcaatggataccccaaatccatacatccaatagccgggtgtggaataaattctttatcatagatacgttaatgggtacaatattatacccatcagtagacgggtgcaagatggatgcgggtatagatatatattagctatctatgggtaatttttacccacctcatctatatatataatctactcaattaagtacatataaatatatattagctaaaaataaaatcaacttacatatctctacaacactaattgttttcttcttttattctctcatat

SEQ ID NO: 216699 - DNA, 6319 bp, Zea Mays
cgcacgttcgccgtccgcgccttcggcttccgcagttcgcacagctgacagcagtccattcaccgtccgcgcctccggtcaccgcacagtagtgaatccattcgtcgtccgtgcctccgatcaccatacaaccgtgaccgttagcagcaccttgatttttgcgcgtcctccgccactggtggcagcgacgcgcttccgaggaggttagagcgttggctgctatggcgccgcctcgcgtcaccaggaagaaggggaagggcgccggcggcaagaccgacctgcgtcccgaccggaagcagttcaaaaggcaccacaaggaggatgcagccgctgagcagggggatggcaacggagagcggcagcagtcggcagcgccgggttctgcagcgctcctcgccgcagcttctgacgaagctgactttccaagagggggacacagcctcctgagcaaggatgagatggcggaggctcgtgcggaggcggagcaggatttcgagagggaggcgaagaaggggaagggaaaaaggaagaggagtggcggcgagtcgtctggttttggcgtggatgacgacttggggatactcttcggtggggccaccactgggaagctcccacgctttgctaatcgcatcacagtaaagaatatttcaccaaatatgaagctctggggtgttgtaattgaggttaaccagaaagatattgtgttaagtctacctggtggaattagaggctttgttcgctcagaggatgtttgcgacattgctttgcaggaaaatcgtaaggatagtgggaacaatttatgcgcagaagttgttcatgttggtcagcttgttccttgtatagtcctacgagtcgacgatgatagtagagaaggaaaagtaaacaaacgggtttggctatcattgcgattaagcctattgtacaagggacttgccctggatggcttgcaggaaggaatggtacttactgcccaagtcaaaagcatcgaggatcatggttacattcttcattttggagtatcttcctttagcggatttatgcagaaggatgacaaagaagatgtgaagactgagcgccgacaactgatgcaatgtgttgtgaaggcgattgacaaaactcgggccattgttcacttgagttctgatgaagacttgctttctaaatctactattaaggatctgaaaggcctttctattgatcatttgattcctgggatgatggttaatgcacgtgtccattcatttcttgaaaatggactcatgttatcatttcttacttatttcagtggaacagttgatatttttaatttgttgaattccttcccctctggtaattggaaagatgattacagtaagaataagaaggtaaatgctcgcatcctgttcgttgatccatcaacaagagcagttgggcttacattgaacaaacatttacttcatcttgaagtaccccctattaatctaaaagctggagatatctacgataaatcaaaggtgctgagggtagataaaaaggccggtctctttcttgaaataccttctccaactccatcacctggatttattagtatacgtgatgtgtcagacaaggatgcaaaaaacttggagaagttcaaggaaggcagtagcttacgtgtccgtatacttggagtgcggaatcttgaaggagttgcaataggcaccataaaagacagtgcttttgaagggtctgttttcactcatgatgatgttaaacctggaatgttagtgagagctaaggttgctactgttgagccattcggtgctattgtacagttttcaagtggcgtgaaagcactttgtccgcttcctcacatgtcagagttggaacatgttgttaaaccaccaaagaaatttaaggttggagctgagcttcttttccgtgtgttgggctgcaaatccaagagagttacagtgacatacaagaagtctctggtgaaatcaaaacttgatgtgctttcatcatatgctgatgcaaaaattggtttagtgactcatggatggattactcatattgaaaagcacggttgctttgtaaaattctacaatggagttcaaggttttgttagcagatctgaccttggattagaggctggaactgaagcagaaaatgtttatcatgttggccaagtggtcaaatgtagaattatcaatgtgatccctgcttcaaggaaactaaatgttagttttgtcatatcccataataggattgctccaatagacactccaaagttgggcagtattgtctctggtgttgtggaacggcttactcctgcagctgttgttgttagtgtaaatggcttctccaaggggacaatactgaatgaacatttggcagaccatcatggtcaagctgctcagttgaagaatgtgttgaaacctgggcacgagttcaaccaactcttagttctcgatactgaaggtcaaaatttagttctttcggcaaagcactcacttataaattgtgcaaatgacattccttcagagatatcacagatgcatcctgggttacatctgcaacattattgaagctggttgttttgtccgtttcctcggacatttgactggtttctctcccaaggacaaagcagttgataggtggatagaaaagctttctgatgcgttctatgttggccagtcagttcggagtcatatactcagcgtaaatgcagaaactgctagagtaaaactcgcacttcaacagtcaatgtgctcctcaatggattcttcatttattcagggatactttcttctggatcagaagattgcagcattgaagtactcaagcaatgactgggctcgccattttggcattggtagcttagttgaggcggaggtgggagctatagaagaatatggtattatccttaacttcaaagaccatctggatactgttggtttaatcgagcaccatcaacttggtggcagtagtgtggaagtgggatcttctgtgaagggtcttgttttggatttatctgatggagttgttaacttgtccgtcaaaccagagctaattgacagtgtcagaattgttggaaaaaagaagaaacgccaaagggccgtagttgcagacttggagcttcatgaggaagtgaatgcagtcgtggaaataatcaaagacagctatatggtcctttccatccctgagtacaattatgcaattgggttttcaccactgatggattataactcacaactgcttccccaccaccactatgataatggacaacgcattactgtggttgttggaaatatcccaagttctgactcttctggaagacttatcttactaccaaaagcttcagcacagtattcttccctctctgattctaaaagggctaagaagaaatcaggctacaaaattgggtcacttgttgaagcagagattattgatatcaaaccgcttgagcttctactgaaatttggtggcaatcttcatggaagaatccatattactgagattcttgaagaggattctgctgagcatccctttagtgaactcagaatagggcaaaagcttactgccagaattgtttcagaggctgaaccttctggaaagagtggcaaaaaattcaaatgggaattgtctattaggccatgtatagtcaatggagagtttgctcaaaaagaacaaaatcacaccacaaatgggattgtacgtgcttatgttgtcaaggtggataaggaatgggtctggttaactgtatcaagaaatgttatggctcatttatttttacttgatagttcttccgagcccagcgaactgaaagaattccagcagcgctttagtgttggccaagcagtgaaaggtcgtgttatcagtgtgaaccaggagaaaaggttacttcggttgaaggcacttgataaccaatgcacacaaccgaatatagatgaaacacaagaaccaaagtcctctgtgtttggacaaacaaaacaaggagatatcattggtggacgtgttcaaaaaattctacctggtgttggtgggctcgtcgttcagattggacctcatctccatgggagggttcattatactgaaattgttgactcttgggtgtctgaacccttgtctggattccatgagggccagtttgtgaagtgcaaggtcctgtctgtgagccgctcatcagaaggatcacttcgagttgatctatcactccgttcatcaaacctgatcagagactctaacaactcaagactagatgatctggaaacctgtacctcccggattgagaagatcaaggatctgctccctggaactgagattaagggctatgtgaagaacgtgaattccaaaggatgttttattatgctttctcgaatggttgatgctaggattactctatcaaatttatcagatgaatatgttgaaaatccacagaaggatttccccgttggaatgcttgtacacggaaggatcctgtctacagacccatcatcagggagagttgaggcatcacttaggaagaccactggttcaaaattggaaaagctggatgatattagttatagtgacttgcatgttggggatatcgttgatggccaagttaagcgggtggaatcctttggattattcgttacaattcggagaagtgaattggttggtctgtgccatgtatcagaactttctgatgaacctgtcgttgatattaactcttgctataaagctggtgatatggttaaagccaaaattctgaagattgatgagacgcggcatcgagtatcacttggaatgaagaagtcatactttgattctgatctgactgctgacacaaatgatgatgaaagtgctcttatggacatcagcgttgcccctcagatggttgaatatcataacagaaatttagttcaccgcaaagcagaaccaagggcttctgttctgcctcttcaggtttccttggatgaatcggaaggttccgacctagaggataatattagtaatacatgtcttgaaattgctaatggaactgaagcaaatgctaaaaagagtgataaacagttaaagaaggaagcaagaaaacaaagggaactagaaatcagtgctatggaggaaagggctttgcaggaagatataccacaaactccagatgattttgagaagttagttaggagctccccaaatagtagttttatctggataaagtatatggcaactttgttagatcttgcagatgttgagaaagcacgtgcagtagctgagagggctttaaaaacaataatccccagagaagaagaagagaaactaaatgtttgggtagcatatttcaatctggaaaatgaatacggtagtccaagggaggatgctgtgaaaaaggtattccaaagagccttgcaatattgtgatcccaaaaagctgcacttggctcttcttgcgatgtacgagaggaccgaacagtatgagcttgcagatgaacttctagacagaatgaccaaaaggttcaaaacttcctgcaagatatggttatgccgcattcagtttgctctcaagcaaggcaaggatgttgagtacatcaaagccattgtaaaccgtgcacttctaagtttgccacacagaaagcgcataaaattcctctcacaaactgctattctagaattcaaatgtggggtgcctgaagaaggaagatccagatttgaactaatattgcgggagtacccaaaaagaacagacctttggagtgtttatctagaccaagaaatccgccttggtgacgtagaagttatacgggcattgtttgagagggtgacttgtctgaccctacctccaaaaaagatgcagttcttgttcaagaagtatcttaatttcgagaagtcactgggtaaagacaacgaaagaattcagcttgtgcaacagaaggcaatcgaatatgttcagagttcactgccgtcacaagacaactcttgaactacatggagacttaataagcccacaaacaatcattaggaaataccagtcgtactgtagatgtgatctctttgatgactccttgaacattattgtgaaaaggtcaatgtaaaatgtgggctgttcaaaattttgtttgaaacctttatataagttatgagtctagtatgtcatgtttcacccaattttttggaaggaactattctaagccggatctggttcgaatattgaccttttctatctgtggtattgactgatgaggcacaattgaatgggtaactgtctgtgctactctgtcacacccgggtttcggacaccaagacacgggcgcgaacataatcacctggtgttgctgggatcaggtcttacacatatgatgaatcatgacacatgatcgaat

SEQ ID NO: 216700 - DNA, 5646 bp, Zea Mays
cgccgtccgcgccttcggcttccgcagttcgcacagctgacagcagtccattcaccgtccgcgcctccggtcaccgcacagtagtgaatccattcgtcgtccgtgcctccgatcaccatacaaccgtgaccgttagcagcaccttgatttttgcgcgtcctccgccactggtggcagcgacgcgcttccgaggaggttagagcgttggctgctatggcgccgcctcgcgtcaccaggaagaaggggaagggcgccggcggcaagaccgacctgcgtcccgaccggaagcagttcaaaaggcaccacaaggaggatgcagccgctgagcagggggatggcaacggagagcggcagcagtcggcagcgccgggttctgcagcgctcctcgccgcagcttctgacgaagctgactttccaagagggggacacagcctcctgagcaaggatgagatggcggaggctcgtgcggaggcggagcaggatttcgagagggaggcgaagaaggggaagggaaaaaggaagaggagtggcggcgagtcgtctggttttggcgtggatgacgacttggggatactcttcggtggggccaccactgggaagctcccacgctttgctaatcgcatcacagtaaaggttggagacagcgaaatcaagataacagcagcagaagcaagcagggctagaagcaaaattgaatggtccagcagcggaatcgagggcttgttttggacagtttcagttgctagaatatggtacaagttatgcacctcgatgcacattaagattaagaatatttcaccaaatatgaagctctggggtgttgtaattgaggttaaccagaaagatattgtgttaagtctacctggtggaattagaggctttgttcgctcagaggatgtttgcgacattgctttgcaggaaaatcgtaaggatagtgggaacaatttatgcgcagaagttgttcatgttggtcagcttgttccttgtatagtcctacgagtcgacgatgatagtagagaaggaaaagtaaacaaacgggtttggctatcattgcgattaagcctattgtacaagggacttgccctggatggcttgcaggaaggaatggtacttactgcccaagtcaaaagcatcgaggatcatggttacattcttcattttggagtatcttcctttagcggatttatgcagaaggatgacaaagaagatgtgaagactgagcgccgacaactgatgcaatgtgttgtgaaggcgattgacaaaactcgggccattgttcacttgagttctgatgaagacttgctttctaaatctactattaaggatctgaaaggcctttctattgatcatttgattcctgggatgatggttaatgcacgtgtccattcatttcttgaaaatggactcatgttatcatttcttacttatttcagtggaacagttgatatttttaatttgttgaattccttcccctctggtaattggaaagatgattacagtaagaataagaaggtaaatgctcgcatcctgttcgttgatccatcaacaagagcagttgggcttacattgaacaaacatttacttcatcttgaagtaccccctattaatctaaaagctggagatatctacgataaatcaaaggtgctgagggtagataaaaaggccggtctctttcttgaaataccttctccaactccatcacctggatttattagtatacgtgatgtgtcagacaaggatgcaaaaaacttggagaagttcaaggaaggcagtagcttacgtgtccgtatacttggagtgcggaatcttgaaggagttgcaataggcaccataaaagacagtgcttttgaagggtctgttttcactcatgatgatgttaaacctggaatgttagtgagagctaaggttgctactgttgagccattcggtgctattgtacagttttcaagtggcgtgaaagcactttgtccgcttcctcacatgtcagagttggaacatgttgttaaaccaccaaagaaatttaaggttggagctgagcttcttttccgtgtgttgggctgcaaatccaagagagttacagtgacatacaagaagtctctggtgaaatcaaaacttgatgtgctttcatcatatgctgatgcaaaaattggtttagtgactcatggatggattactcatattgaaaagcacggttgctttgtaaaattctacaatggagttcaaggttttgttagcagatctgaccttggattagaggctggaactgaagcagaaaatgtttatcatgttggccaagtggtcaaatgtagaattatcaatgtgatccctgcttcaaggaaactaaatgttagttttgtcatatcccataataggattgctccaatagacactccaaagttgggcagtattgtctctggtgttgtggaacggcttactcctgcagctgttgttgttagtgtaaatggcttctccaaggggacaatactgaatgaacatttggcagaccatcatggtcaagctgctcagttgaagaatgtgttgaaacctgggcacgagttcaaccaactcttagttctcgatactgaaggtcaaaatttagttctttcggcaaagcactcacttataaattgtgcaaatgacattccttcagagatatcacagatgcatcctggtgttgtagttcatggttacatctgcaacattattgaagctggttgttttgtccgtttcctcggacatttgactggtttctctcccaaggacaaagcagttgataggtggatagaaaagctttctgatgcgttctatgttggccagtcagttcggagtcatatactcagcgtaaatgcagaaactgctagagtaaaactcgcacttcaacagtcaatgtgctcctcaatggattcttcatttattcagggatactttcttctggatcagaagattgcagcattgaagtactcaagcaatgactgggctcgccattttggcattggtagcttagttgaggcggaggtgggagctatagaagaatatggtattatccttaacttcaaagaccatctggatactgttggtttaatcgagcaccatcaacttggtggcagtagtgtggaagtgggatcttctgtgaagggtcttgttttggatttatctgatggagttgttaacttgtccgtcaaaccagagctaattgacagtgtcagaattgttggaaaaaagaagaaacgccaaagggccgtagttgcagacttggagcttcatgaggaagtgaatgcagtcgtggaaataatcaaagacagctatatggtcctttccatccctgagtacaattatgcaattgggttttcaccactgatggattataactcacaactgcttccccaccaccactatgataatggacaacgcattactgtggttgttggaaatatcccaagttctgactcttctggaagacttatcttactaccaaaagcttcagcacagtattcttccctctctgattctaaaagggctaagaagaaatcaggctacaaaattgggtcacttgttgaagcagagattattgatatcaaaccgcttgagcttctactgaaatttggtggcaatcttcatggaagaatccatattactgagattcttgaagaggattctgctgagcatccctttagtgaactcagaatagggcaaaagcttactgccagaattgtttcagaggctgaaccttctggaaagagtggcaaaaaattcaaatgggaattgtctattaggccatgtatagtcaatggagagtttgctcaaaaagaacaaaatcacaccacaaatgggattgtacgtgcttatgttgtcaaggtggataaggaatgggtctggttaactgtatcaagaaatgttatggctcatttatttttacttgatagttcttccgagcccagcgaactgaaagaattccagcagcgctttagtgttggccaagcagtgaaaggtcgtgttatcagtgtgaaccaggagaaaaggttacttcggttgaaggcacttgataaccaatgcacacaaccgaatatagatgaaacacaagaaccaaagtcctctgtgtttggacaaacaaaacaaggagatatcattggtggacgtgttcaaaaaattctacctggtgttggtgggctcgtcgttcagattggacctcatctccatgggagggttcattatactgaaattgttgactcttgggtgtctgaacccttgtctggattccatgagggccagtttgtgaagtgcaaggtcctgtctgtgagccgctcatcagaaggatcacttcgagttgatctatcactccgttcatcaaacctgatcagagactctaacaactcaagactagatgatctggaaacctgtacctcccggattgagaagatcaaggatctgctccctggaactgagattaagggctatgtgaagaacgtgaattccaaaggatgttttattatgctttctcgaatggttgatgctaggattactctatcaaatttatcagatgaatatgttgaaaatccacagaaggatttccccgttggaatgcttgtacacggaaggatcctgtctacagacccatcatcagggagagttgaggcatcacttaggaagaccactggttcaaaattggaaaagctggatgatattagttatagtgacttgcatgttggggatatcgttgatggccaagttaagcgggtggaatcctttggattattcgttacaattcggagaagtgaattggttggtctgtgccatgtatcagaactttctgatgaacctgtcgttgatattaactcttgctataaagctggtgatatggttaaagccaaaattctgaagattgatgagacgcggcatcgagtatcacttggaatgaagaagtcatactttgattctgatctgactgctgacacaaatgatgatgaaagtgctcttatggacatcagcgttgcccctcagatggttgaatatcataacagaaatttagttcaccgcaaagcagaaccaagggcttctgttctgcctcttcaggtttccttggatgaatcggaaggttccgacctagaggataatattagtaatacatgtcttgaaattgctaatggaactgaagcaaatgctaaaaagagtgataaacagttaaagaaggaagcaagaaaacaaagggaactagaaatcagtgctatggaggaaagggctttgcaggaagatataccacaaactccagatgattttgagaagttagttaggagctccccaaatagtagttttatctggataaagtatatggcaactttgttagatcttgcagatgttgagaaagcacgtgcagtagctgagagggctttaaaaacaataatccccagagaagaagaagagaaactaaatgtttgggtagcatatttcaatctggaaaatgaatacggtagtccaagggaggatgctgtgaaaaaggtattccaaagagccttgcaatattgtgatcccaaaaagctgcacttggctcttcttgcgatgtacgagaggaccgaacagtatgagcttgcagatgaacttctagacagaatgaccaaaaggttcaaaacttcctgcaagatcctatttgtg

SEQ ID NO: 216701 - DNA, 6273 bp, Zea Mays
attcaccgtccgcgcctccggtcaccgcacagtagtgaatccattcgtcgtccgtgcctccgatcaccatacaaccgtgaccgttagcagcaccttgatttttgcgcgtcctccgccactggtggcagcgacgcgcttccgaggaggttagagcgttggctgctatggcgccgcctcgcgtcaccaggaagaaggggaagggcgccggcggcaagaccgacctgcgtcccgaccggaagcagttcaaaaggcaccacaaggaggatgcagccgctgagcagggggatggcaacggagagcggcagcagtcggcagcgccgggttctgcagcgctcctcgccgcagcttctgacgaagctgactttccaagagggggacacagcctcctgagcaaggatgagatggcggaggctcgtgcggaggcggagcaggatttcgagagggaggcgaagaaggggaagggaaaaaggaagaggagtggcggcgagtcgtctggttttggcgtggatgacgacttggggatactcttcggtggggccaccactgggaagctcccacgctttgctaatcgcatcacagtaaagaatatttcaccaaatatgaagctctggggtgttgtaattgaggttaaccagaaagatattgtgttaagtctacctggtggaattagaggctttgttcgctcagaggatgtttgcgacattgctttgcaggaaaatcgtaaggatagtgggaacaatttatgcgcagaagttgttcatgttggtcagcttgttccttgtatagtcctacgagtcgacgatgatagtagagaaggaaaagtaaacaaacgggtttggctatcattgcgattaagcctattgtacaagggacttgccctggatggcttgcaggaaggaatggtacttactgcccaagtcaaaagcatcgaggatcatggttacattcttcattttggagtatcttcctttagcggatttatgcagaaggatgacaaagatgtgaagactgagcgccgacaactgatgcaatgtgttgtgaaggcgattgacaaaactcgggccattgttcacttgagttctgatgaagacttgctttctaaatctactattaaggatctgaaaggcctttctattgatcatttgattcctgggatgatggttaatgcacgtgtccattcatttcttgaaaatggactcatgttatcatttcttacttatttcagtggaacagttgatatttttaatttgttgaattccttcccctctggtaattggaaagatgattacagtaagaataagaaggtaaatgctcgcatcctgttcgttgatccatcaacaagagcagttgggcttacattgaacaaacatttacttcatcttgaagtaccccctattaatctaaaagctggagatatctacgataaatcaaaggtgctgagggtagataaaaaggccggtctctttcttgaaataccttctccaactccatcacctggatttattagtatacgtgatgtgtcagacaaggatgcaaaaaacttggagaagttcaaggaaggcagtagcttacgtgtccgtatacttggagtgcggaatcttgaaggagttgcaataggcaccataaaagacagtgcttttgaagggtctgttttcactcatgatgatgttaaacctggaatgttagtgagagctaaggttgctactgttgagccattcggtgctattgtacagttttcaagtggcgtgaaagcactttgtccgcttcctcacatgtcagagttggaacatgttgttaaaccaccaaagaaatttaaggttggagctgagcttcttttccgtgtgttgggctgcaaatccaagagagttacagtgacatacaagaagtctctggtgaaatcaaaacttgatgtgctttcatcatatgctgatgcaaaaattggtttagtgactcatggatggattactcatattgaaaagcacggttgctttgtaaaattctacaatggagttcaaggttttgttagcagatctgaccttggattagaggctggaactgaagcagaaaatgtttatcatgttggccaagtggtcaaatgtagaattatcaatgtgatccctgcttcaaggaaactaaatgttagttttgtcatatcccataataggattgctccaatagacactccaaagttgggcagtattgtctctggtgttgtggaacggcttactcctgcagctgttgttgttagtgtaaatggcttctccaaggggacaatactgaatgaacatttggcagaccatcatggtcaagctgctcagttgaagaatgtgttgaaacctgggcacgagttcaaccaactcttagttctcgatactgaaggtcaaaatttagttctttcggcaaagcactcacttataaattgtgcaaatgacattccttcagagatatcacagatgcatcctggtgttgtagttcatggttacatctgcaacattattgaagctggttgttttgtccgtttcctcggacatttgactggtttctctcccaaggacaaagcagttgataggtggatagaaaagctttctgatgcgttctatgttggccagtcagttcggagtcatatactcagcgtaaatgcagaaactgctagagtaaaactcgcacttcaacagtcaatgtgctcctcaatggattcttcatttattcagggatactttcttctggatcagaagattgcagcattgaagtactcaagcaatgactgggctcgccattttggcattggtagcttagttgaggcggaggtgggagctatagaagaatatggtattatccttaacttcaaagaccatctggatactgttggtttaatcgagcaccatcaacttggtggcagtagtgtggaagtgggatcttctgtgaagggtcttgttttggatttatctgatggagttgttaacttgtccgtcaaaccagagctaattgacagtgtcagaattgttggaaaaaagaagaaacgccaaagggccgtagttgcagacttggagcttcatgaggaagtgaatgcagtcgtggaaataatcaaagacagctatatggtcctttccatccctgagtacaattatgcaattgggttttcaccactgatggattataactcacaactgcttccccaccaccactatgataatggacaacgcattactgtggttgttggaaatatcccaagttctgactcttctggaagacttatcttactaccaaaagcttcagcacagtattcttccctctctgattctaaaagggctaagaagaaatcaggctacaaaattgggtcacttgttgaagcagagattattgatatcaaaccgcttgagcttctactgaaatttggtggcaatcttcatggaagaatccatattactgagattcttgaagaggattctgctgagcatccctttagtgaactcagaatagggcaaaagcttactgccagaattgtttcagaggctgaaccttctggaaagagtggcaaaaaattcaaatgggaattgtctattaggccatgtatagtcaatggagagtttgctcaaaaagaacaaaatcacaccacaaatgggattgtacgtgcttatgttgtcaaggtggataaggaatgggtctggttaactgtatcaagaaatgttatggctcatttatttttacttgatagttcttccgagcccagcgaactgaaagaattccagcagcgctttagtgttggccaagcagtgaaaggtcgtgttatcagtgtgaaccaggagaaaaggttacttcggttgaaggcacttgataaccaatgcacacaaccgaatatagatgaaacacaagaaccaaagtcctctgtgtttggacaaacaaaacaaggagatatcattggtggacgtgttcaaaaaattctacctggtgttggtgggctcgtcgttcagattggacctcatctccatgggagggttcattatactgaaattgttgactcttgggtgtctgaacccttgtctggattccatgagggccagtttgtgaagtgcaaggtcctgtctgtgagccgctcatcagaaggatcacttcgagttgatctatcactccgttcatcaaacctgatcagagactctaacaactcaagactagatgatctggaaacctgtacctcccggattgagaagatcaaggatctgctccctggaactgagattaagggctatgtgaagaacgtgaattccaaaggatgttttattatgctttctcgaatggttgatgctaggattactctatcaaatttatcagatgaatatgttgaaaatccacagaaggatttccccgttggaatgcttgtacacggaaggatcctgtctacagacccatcatcagggagagttgaggcatcacttaggaagaccactggttcaaaattggaaaagctggatgatattagttatagtgacttgcatgttggggatatcgttgatggccaagttaagcgggtggaatcctttggattattcgttacaattcggagaagtgaattggttggtctgtgccatgtatcagaactttctgatgaacctgtcgttgatattaactcttgctataaagctggtgatatggttaaagccaaaattctgaagattgatgagacgcggcatcgagtatcacttggaatgaagaagtcatactttgattctgatctgactgctgacacaaatgatgatgaaagtgctcttatggacatcagcgttgcccctcagatggttgaatatcataacagaaatttagttcaccgcaaagcagaaccaagggcttctgttctgcctcttcaggtttccttggatgaatcggaaggttccgacctagaggataatattagtaatacatgtcttgaaattgctaatggaactgaagcaaatgctaaaaagagtgataaacagttaaagaaggaagcaagaaaacaaagggaactagaaatcagtgctatggaggaaagggctttgcaggaagatataccacaaactccagatgattttgagaagttagttaggagctccccaaatagtagttttatctggataaagtatatggcaactttgttagatcttgcagatgttgagaaagcacgtgcagtagctgagagggctttaaaaacaataatccccagagaagaagaagagaaactaaatgtttgggtagcatatttcaatctggaaaatgaatacggtagtccaagggaggatgctgtgaaaaaggtattccaaagagccttgcaatattgtgatcccaaaaagctgcacttggctcttcttgcgatgtacgagaggaccgaacagtatgagcttgcagatgaacttctagacagaatgaccaaaaggttcaaaacttcctgcaagatatggttatgccgcattcagtttgctctcaagcaaggcaaggatgttgagtacatcaaagccattgtaaaccgtgcacttctaagtttgccacacagaaagcgcataaaattcctctcacaaactgctattctagaattcaaatgtggggtgcctgaagaaggaagatccagatttgaactaatattgcgggagtacccaaaaagaacagacctttggagtgtttatctagaccaagaaatccgccttggtgacgtagaagttatacgggcattgtttgagagggtgacttgtctgaccctacctccaaaaaagatgcagttcttgttcaagaagtatcttaatttcgagaagtcactgggtaaagacaacgaaagaattcagcttgtgcaacagaaggcaatcgaatatgttcagagttcactgccgtcacaagacaactcttgaactacatggagacttaataagcccacaaacaatcattaggaaataccagtcgtactgtagatgtgatctctttgatgactccttgaacattattgtgaaaaggtcaatgtaaaatgtgggctgttcaaaattttgtttgaaacctttatataagttatgagtctagtatgtcatgtttcacccaattttttggaaggaactattctaagccggatctggttcgaatattgaccttttctatctgtggtattgactgatgaggcacaattgaatgggtaactgtctgtgctactctgtcacacccgggtttcggacaccaagacacgggcgcgaacataatcacctggtgttgctgggatcaggtcttacacatatgatgaatcatgacacatgatcgaat

SEQ ID NO: 216702 - DNA, 4668 bp, Zea Mays
cttgaactggtgtcaacttgcatgacagtgcttttgaagggtctgttttcactcatgatgatgttaaacctggaatgttagtgagagctaaggttgctactgttgagccattcggtgctattgtacagttttcaagtggcgtgaaagcactttgtccgcttcctcacatgtcagagttggaacatgttgttaaaccaccaaagaaatttaaggttggagctgagcttcttttccgtgtgttgggctgcaaatccaagagagttacagtgacatacaagaagtctctggtgaaatcaaaacttgatgtgctttcatcatatgctgatgcaaaaattggtttagtgactcatggatggattactcatattgaaaagcacggttgctttgtaaaattctacaatggagttcaaggttttgttagcagatctgaccttggattagaggctggaactgaagcagaaaatgtttatcatgttggccaagtggtcaaatgtagaattatcaatgtgatccctgcttcaaggaaactaaatgttagttttgtcatatcccataataggattgctccaatagacactccaaagttgggcagtattgtctctggtgttgtggaacggcttactcctgcagctgttgttgttagtgtaaatggcttctccaaggggacaatactgaatgaacatttggcagaccatcatggtcaagctgctcagttgaagaatgtgttgaaacctgggcacgagttcaaccaactcttagttctcgatactgaaggtcaaaatttagttctttcggcaaagcactcacttataaattgtgcaaatgacattccttcagagatatcacagatgcatcctggtgttgtagttcatggttacatctgcaacattattgaagctggttgttttgtccgtttcctcggacatttgactggtttctctcccaaggacaaagcagttgataggtggatagaaaagctttctgatgcgttctatgttggccagtcagttcggagtcatatactcagcgtaaatgcagaaactgctagagtaaaactcgcacttcaacagtcaatgtgctcctcaatggattcttcatttattcagggatactttcttctggatcagaagattgcagcattgaagtactcaagcaatgactgggctcgccattttggcattggtagcttagttgaggcggaggtgggagctatagaagaatatggtattatccttaacttcaaagaccatctggatactgttggtttaatcgagcaccatcaacttggtggcagtagtgtggaagtgggatcttctgtgaagggtcttgttttggatttatctgatggagttgttaacttgtccgtcaaaccagagctaattgacagtgtcagaattgttggaaaaaagaagaaacgccaaagggccgtagttgcagacttggagcttcatgaggaagtgaatgcagtcgtggaaataatcaaagacagctatatggtcctttccatccctgagtacaattatgcaattgggttttcaccactgatggattataactcacaactgcttccccaccaccactatgataatggacaacgcattactgtggttgttggaaatatcccaagttctgactcttctggaagacttatcttactaccaaaagcttcagcacagtattcttccctctctgattctaaaagggctaagaagaaatcaggctacaaaattgggtcacttgttgaagcagagattattgatatcaaaccgcttgagcttctactgaaatttggtggcaatcttcatggaagaatccatattactgagattcttgaagaggattctgctgagcatccctttagtgaactcagaatagggcaaaagcttactgccagaattgtttcagaggctgaaccttctggaaagagtggcaaaaaattcaaatgggaattgtctattaggccatgtatagtcaatggagagtttgctcaaaaagaacaaaatcacaccacaaatgggattgtacgtgcttatgttgtcaaggtggataaggaatgggtctggttaactgtatcaagaaatgttatggctcatttatttttacttgatagttcttccgagcccagcgaactgaaagaattccagcagcgctttagtgttggccaagcagtgaaaggtcgtgttatcagtgtgaaccaggagaaaaggttacttcggttgaaggcacttgataaccaatgcacacaaccgaatatagatgaaacacaagaaccaaagtcctctgtgtttggacaaacaaaacaaggagatatcattggtggacgtgttcaaaaaattctacctggtgttggtgggctcgtcgttcagattggacctcatctccatgggagggttcattatactgaaattgttgactcttgggtgtctgaacccttgtctggattccatgagggccagtttgtgaagtgcaaggtcctgtctgtgagccgctcatcagaaggatcacttcgagttgatctatcactccgttcatcaaacctgatcagagactctaacaactcaagactagatgatctggaaacctgtacctcccggattgagaagatcaaggatctgctccctggaactgagattaagggctatgtgaagaacgtgaattccaaaggatgttttattatgctttctcgaatggttgatgctaggattactctatcaaatttatcagatgaatatgttgaaaatccacagaaggatttccccgttggaatgcttgtacacggaaggatcctgtctacagacccatcatcagggagagttgaggcatcacttaggaagaccactggttcaaaattggaaaagctggatgatattagttatagtgacttgcatgttggggatatcgttgatggccaagttaagcgggtggaatcctttggattattcgttacaattcggagaagtgaattggttggtctgtgccatgtatcagaactttctgatgaacctgtcgttgatattaactcttgctataaagctggtgatatggttaaagccaaaattctgaagattgatgagacgcggcatcgagtatcacttggaatgaagaagtcatactttgattctgatctgactgctgacacaaatgatgatgaaagtgctcttatggacatcagcgttgcccctcagatggttgaatatcataacagaaatttagttcaccgcaaagcagaaccaagggcttctgttctgcctcttcaggtttccttggatgaatcggaaggttccgacctagaggataatattagtaatacatgtcttgaaattgctaatggaactgaagcaaatgctaaaaagagtgataaacagttaaagaaggaagcaagaaaacaaagggaactagaaatcagtgctatggaggaaagggctttgcaggaagatataccacaaactccagatgattttgagaagttagttaggagctccccaaatagtagttttatctggataaagtatatggcaactttgttagatcttgcagatgttgagaaagcacgtgcagtagctgagagggctttaaaaacaataatccccagagaagaagaagagaaactaaatgtttgggtagcatatttcaatctggaaaatgaatacggtagtccaagggaggatgctgtgaaaaaggtattccaaagagccttgcaatattgtgatcccaaaaagctgcacttggctcttcttgcgatgtacgagaggaccgaacagtatgagcttgcagatgaacttctagacagaatgaccaaaaggttcaaaacttcctgcaagatatggttatgccgcattcagtttgctctcaagcaaggcaaggatgttgagtacatcaaagccattgtaaaccgtgcacttctaagtttgccacacagaaagcgcataaaattcctctcacaaactgctattctagaattcaaatgtggggtgcctgaagaaggaagatccagatttgaactaatattgcgggagtacccaaaaagaacagacctttggagtgtttatctagaccaagaaatccgccttggtgacgtagaagttatacgggcattgtttgagagggtgacttgtctgaccctacctccaaaaaagatgcagttcttgttcaagaagtatcttaatttcgagaagtcactgggtaaagacaacgaaagaattcagcttgtgcaacagaaggcaatcgaatatgttcagagttcactgccgtcacaagacaactcttgaactacatggagacttaataagcccacaaacaatcattaggaaataccagtcgtactgtagatgtgatctctttgatgactccttgaacattattgtgaaaaggtcaatgtaaaatgtgggctgttcaaaattttgtttgaaacctttatataagttatgagtctagtatgtcatgtttcacccaattttttggaaggaactattctaagccggatctggttcgaatattgaccttttctatctgtggtattgactgatgaggcacaattgaatgggtaactgtctgtgctactctgtcacacccgggtttcggacaccaagacacgggcgcgaacataatcacctggtgttgctgggatcaggtcttacacatatgatgaatcatgacacatgatcgaat

SEQ ID NO: 216703 - DNA, 3928 bp, Zea Mays
aaaggatgtgcagaatttcacaatgatactgaaggtcaaaatttagttctttcggcaaagcactcacttataaattgtgcaaatgacattccttcagagatatcacagatgcatcctggtgttgtagttcatggttacatctgcaacattattgaagctggttgttttgtccgtttcctcggacatttgactggtttctctcccaaggacaaagcagttgataggtggatagaaaagctttctgatgcgttctatgttggccagtcagttcggagtcatatactcagcgtaaatgcagaaactgctagagtaaaactcgcacttcaacagtcaatgtgctcctcaatggattcttcatttattcagggatactttcttctggatcagaagattgcagcattgaagtactcaagcaatgactgggctcgccattttggcattggtagcttagttgaggcggaggtgggagctatagaagaatatggtattatccttaacttcaaagaccatctggatactgttggtttaatcgagcaccatcaacttggtggcagtagtgtggaagtgggatcttctgtgaagggtcttgttttggatttatctgatggagttgttaacttgtccgtcaaaccagagctaattgacagtgtcagaattgttggaaaaaagaagaaacgccaaagggccgtagttgcagacttggagcttcatgaggaagtgaatgcagtcgtggaaataatcaaagacagctatatggtcctttccatccctgagtacaattatgcaattgggttttcaccactgatggattataactcacaactgcttccccaccaccactatgataatggacaacgcattactgtggttgttggaaatatcccaagttctgactcttctggaagacttatcttactaccaaaagcttcagcacagtattcttccctctctgattctaaaagggctaagaagaaatcaggctacaaaattgggtcacttgttgaagcagagattattgatatcaaaccgcttgagcttctactgaaatttggtggcaatcttcatggaagaatccatattactgagattcttgaagaggattctgctgagcatccctttagtgaactcagaatagggcaaaagcttactgccagaattgtttcagaggctgaaccttctggaaagagtggcaaaaaattcaaatgggaattgtctattaggccatgtatagtcaatggagagtttgctcaaaaagaacaaaatcacaccacaaatgggattgtacgtgcttatgttgtcaaggtggataaggaatgggtctggttaactgtatcaagaaatgttatggctcatttatttttacttgatagttcttccgagcccagcgaactgaaagaattccagcagcgctttagtgttggccaagcagtgaaaggtcgtgttatcagtgtgaaccaggagaaaaggttacttcggttgaaggcacttgataaccaatgcacacaaccgaatatagatgaaacacaagaaccaaagtcctctgtgtttggacaaacaaaacaaggagatatcattggtggacgtgttcaaaaaattctacctggtgttggtgggctcgtcgttcagattggacctcatctccatgggagggttcattatactgaaattgttgactcttgggtgtctgaacccttgtctggattccatgagggccagtttgtgaagtgcaaggtcctgtctgtgagccgctcatcagaaggatcacttcgagttgatctatcactccgttcatcaaacctgatcagagactctaacaactcaagactagatgatctggaaacctgtacctcccggattgagaagatcaaggatctgctccctggaactgagattaagggctatgtgaagaacgtgaattccaaaggatgttttattatgctttctcgaatggttgatgctaggattactctatcaaatttatcagatgaatatgttgaaaatccacagaaggatttccccgttggaatgcttgtacacggaaggatcctgtctacagacccatcatcagggagagttgaggcatcacttaggaagaccactggttcaaaattggaaaagctggatgatattagttatagtgacttgcatgttggggatatcgttgatggccaagttaagcgggtggaatcctttggattattcgttacaattcggagaagtgaattggttggtctgtgccatgtatcagaactttctgatgaacctgtcgttgatattaactcttgctataaagctggtgatatggttaaagccaaaattctgaagattgatgagacgcggcatcgagtatcacttggaatgaagaagtcatactttgattctgatctgactgctgacacaaatgatgatgaaagtgctcttatggacatcagcgttgcccctcagatggttgaatatcataacagaaatttagttcaccgcaaagcagaaccaagggcttctgttctgcctcttcaggtttccttggatgaatcggaaggttccgacctagaggataatattagtaatacatgtcttgaaattgctaatggaactgaagcaaatgctaaaaagagtgataaacagttaaagaaggaagcaagaaaacaaagggaactagaaatcagtgctatggaggaaagggctttgcaggaagatataccacaaactccagatgattttgagaagttagttaggagctccccaaatagtagttttatctggataaagtatatggcaactttgttagatcttgcagatgttgagaaagcacgtgcagtagctgagagggctttaaaaacaataatccccagagaagaagaagagaaactaaatgtttgggtagcatatttcaatctggaaaatgaatacggtagtccaagggaggatgctgtgaaaaaggtattccaaagagccttgcaatattgtgatcccaaaaagctgcacttggctcttcttgcgatgtacgagaggaccgaacagtatgagcttgcagatgaacttctagacagaatgaccaaaaggttcaaaacttcctgcaagatatggttatgccgcattcagtttgctctcaagcaaggcaaggatgttgagtacatcaaagccattgtaaaccgtgcacttctaagtttgccacacagaaagcgcataaaattcctctcacaaactgctattctagaattcaaatgtggggtgcctgaagaaggaagatccagatttgaactaatattgcgggagtacccaaaaagaacagacctttggagtgtttatctagaccaagaaatccgccttggtgacgtagaagttatacgggcattgtttgagagggtgacttgtctgaccctacctccaaaaaagatgcagttcttgttcaagaagtatcttaatttcgagaagtcactgggtaaagacaacgaaagaattcagcttgtgcaacagaaggcaatcgaatatgttcagagttcactgccgtcacaagacaactcttgaactacatggagacttaataagcccacaaacaatcattaggaaataccagtcgtactgtagatgtgatctctttgatgactccttgaacattattgtgaaaaggtcaatgtaaaatgtgggctgttcaaaattttgtttgaaacctttatataagttatgagtctagtatgtcatgtttcacccaattttttggaaggaactattctaagccggatctggttcgaatattgaccttttctatctgtggtattgactgatgaggcacaattgaatgggtaactgtctgtgctactctgtcacacccgggtttcggacaccaagacacgggcgcgaacataatcacctggtgttgctgggatcaggtcttacacatatgatgaatcatgacacatgatcgaat

SEQ ID NO: 216704 - DNA, 325 bp, Zea Mays
tgtctcattttgtacttctttccacataaaacaggcatacaatttgtcaagagaccataaaccagagcttgaggcagagagagaaaggatacaaagtgccgggggttacattaaaatggggcgtgtaaatggaagtttaaatttgtcaagagctattgtatgtgaaagagtgcttgatagatgcctggctccatcgacggctggcgagggatgcgataacatgacgatgatcctggtgcagttcaagaagccatttgctcaggtaaaggatgccagtggtgcggaacaactaactggagatgcgggatgctctgagacccagtga

SEQ ID NO: 216705 - DNA, 1523 bp, Zea Mays
cagtcggcctcgctactttcctaagtggaaaaagggttctctccggccatttccttgagtcgttccgccgccactcgaccaccaccgccatggcggcgccgacgccgaccacaaccactcgcagagactaccgcctccgcccccgctgcttctcgtctccacgcagctgtccgatggccaagcgactcgccggcatcgacaaagaggtgctcgtcgaggtggtgaggttcacgcataagagcggactgaggggctgtgacggtggctggaaggatttcctggcccggaacgatagaaagtttggcgcgtcggtgagcgacccgaggaagcgctccagggacgtgctgttcgccttcctgcaaaccttccccaaggatttccagaagaaacacttgatgccactagtccgacgagagccaccggaaggcaacgcaggcattcctcagtccccaaagtgagctgctgggcagctgctcatcaccaacacaattctaacccccagcagtttcaggcgattggcatacgaatcgcaaagacgctgcatgccttctatcagttctgccgaccacacacaatatttggaaccataataggcattacttcggtgtctctcctaccagtgaaagagcctggacgattttatgttgatagctatatggggatttctcgagagtttcggataaccttttgaaggtcaataagccaaccctcccattagcgtcaggagagttttcagtgccaactccagtattgttagtagtggcattcttggtcatggtgtctggtcatggcttgcttgcctccacactctggcaaagagcacaacaatttgacattgagaataaggattgtatcacacaattttatatgttcatttggaagttattctacgccgagtattttcttataccatttgtgtagtaaagaatcatgcgaagaacaacacccctgctatagacatgtgaaggtttattgctaatgttactctaccgaatggtctgaatgtctatgcgtcatttgaatgtaatatgactatttgttgtatcagggtaacaactggagcaaatgtaccatgtatattaagtattaatttaactgcatcatttgtaccatgtatattatgactatgtatgagatattgtctcttattattactggatgtgatgtgtcttattttgactatggatgagacttttgtgatgtaattgatgagactatggatttaaatattgttatgtgattgtgtgtgagatattttatgtgaaaatatgttgtgctatattgttgatatatttgttatgttgtggaatatggtgtaaaataaaaataaacaacatttgtaatgctggtcaaattaacttcctagaggcttattggaccataggaagttagccagctaacttcctaggggctacagacagccgtagaaagttagccagctaacttcctagggctacagtcagccgtaggaagttagtcgtaggaagttagtcagctgacggcgctaacggcgtgaagctact

SEQ ID NO: 216706 - DNA, 1642 bp, Zea Mays
cagtcggcctcgctactttcctaagtggaaaaagggttctctccggccatttccttgagtcgttccgccgccactcgaccaccaccgccatggcggcgccgacgccgaccacaaccactcgcagagactaccgcctccgcccccgctgcttctcgtctccacgcagctgtccgatggccaagcgactcgccggcatcgacaaagaggtagggggcggcacgccaacagagcagcccacccagaccgggcaggccgcctcgttgcgctcacccatttggtcagcgccaggtgctcgtcgaggtggtgaggttcacgcataagagcggactgaggggctgtgacggtggctggaaggatttcctggcccggaacgatagaaagtttggcgcgtcggtgagcgacccgaggaagcgctccagggacgtgctgttcgccttcctgcaaaccttccccaaggatttccagaagaaacacttgatgccactagtccgacgagagccaccggaaggcaacgcaggcattcctcagtccccaaagtgagctgctgggcagctgctcatcaccaacacaattctaacccccagcagtttcaggcgattggcatacgaatcgcaaagacgctgcatgccttctatcagttctgccgaccacacacaatatttggaaccataataggcattacttcggtgtctctcctaccagtgaaagagcctggacgattttatgttgatagctatatggggatttctcgaggtataaatgctttggccgccgcattatgtatgaacgtttatgtagtagggctgaacaaggtcaataagccaaccctcccattagcgtcaggagagttttcagtgccaactccagtattgttagtagtggcattcttggtcatggtgtctggtcatggcttgcttgcctccacactctggcaaagagcacaacaatttgacattgagaataaggattgtatcacacaattttatatgttcatttggaagttattctacgccgagtattttcttataccatttgtgtagtaaagaatcatgcgaagaacaacacccctgctatagacatgtgaaggtttattgctaatgttactctaccgaatggtctgaatgtctatgcgtcatttgaatgtaatatgactatttgttgtatcagggtaacaactggagcaaatgtaccatgtatattaagtattaatttaactgcatcatttgtaccatgtatattatgactatgtatgagatattgtctcttattattactggatgtgatgtgtcttattttgactatggatgagacttttgtgatgtaattgatgagactatggatttaaatattgttatgtgattgtgtgtgagatattttatgtgaaaatatgttgtgctatattgttgatatatttgttatgttgtggaatatggtgtaaaataaaaataaacaacatttgtaatgctggtcaaattaacttcctagaggcttattggaccataggaagttagccagctaacttcctaggggctacagacagccgtagaaagttagccagctaacttcctagggctacagtcagccgtaggaagttagtcgtaggaagttagtcagctgacggcgctaacggcgtgaagctact

SEQ ID NO: 216707 - DNA, 923 bp, Zea Mays
aaagaatccattagactctccttagctctcagctaaagatcgatctaagacgggccaataacacagagatcatgttgacaaaaatcaaaatgccgctccctgatatgatgagtgctgctctagctttggacgattcagttttggatgctgaccagattgaaaatctaataaaattttgcccaacaaaagaggagatggaacttctaaagaactacagtggggacaaggaagctcttggcaagtgtgagcatttctttctagagttaatgaaggtgccaagggttgaatctaagcttaagatatttgctttcaagattcagtttcagtctcagattagggatgtcagaaagaatttgcagactgtatcatctgcttgtgaggagctcagaagctctgagaagttgaaggttatcatgaagaacattctgttaattgggaatacattgaatcaaggcacaccaagaggccaggctgttggttttcgcttggacagcctcctaaaacttatagagacccgtgccactagtggtagaatgacattaatgcattttctatgtaagtcccttgcagagaagtcaccagaagtaatggattttcatgaggatcttgtccacttggaagcttcttcaaagttgcaactaaaagcattggcggaggagcagctggcagtggtaaaggggctggagaaagttgaacaggagctaactgcttcagaaagtgatgggccggtttctgatgttttccgtaagactttaaaggagttcattgattgttcgagtgctgatgtatgctccttgtcagcattctattctgaagtaggtaaaagcgcagatgcacttgctctttattttggagaagaccctgctaaatttccttttgagcaaggtaatattcatgcctatagacccatggaaatggtttaa

SEQ ID NO: 216708 - DNA, 6288 bp, Zea Mays
ccgacggcggtcggaagcgcaagggaatggcgctgttccggaggctcttctatcggaagccgccggatcggctcctcgagatagccgaccgcgtctacggtattcgattgttgcttctcaacagaaaccatggaccaatacagatacaagaattacctggacaacattattttgcagctccgtgaacagtttgcagattcttcattgatggtacttaactttagagatgaaggaaaaagtcttatttcaggcattttctccaagtacaatattacagccaaagactacccttgcaagtatctaggatgcccgttacttcctttggatatcattctccacttcctaaggctgagtgaaaggtggcttatgcttgaagggcagcaaaatattttactaatgcactgtgagaaagatggatggccagtgttggcatttatgcttgcaggtcttcttctgtacaggaaacaatataatggggagcaaagaactctagatatggtgtacaagcaagccccaaaggagcttcttcagatgctaaccacattgaatccacaaccgtctcatcttcggtatcttgggtacatatgcagaatggatgacggcataggatggcctacacaacctattcctttcaccttggattgtgtaattcttagagaaattccaaattttgatggagtcggtggttgtcggccaattgttcgagtatatgggcaggatattccaacaactgacagaagtcatagtgtcatttcaccaccatcaaaggccaagaaacatattaggcgttacagacaggcagataatgcgccagtgaagttaaatgtaggatcctgcgtccaaggtgatgtcgtccttgaatgtctgcatgtggatgatggccaaggaaatgaaaggttaatgtttagggtgatgttcaatacctttttcatccagtctcacattttaccgttgaactttgaggacatcgatgtcccttgggatgccgatcaccagttcacaaagaacttcaaagcagaggtactcttttcagagtttgatgctgagtctgatgcgtcaactgaagtagcacctgattatgattatgattatgactatgataatgatatggatgttgcctctgctgatgagttctttgaagcagaagaaatcttcagtaatgctgaatctcaagatggaaataaggatgcggatactctttctatggtctctacagattatattcgaactccaagtgccgaatgttggaaaaactctccattttccaactttgatctgaatattgacattgatggatcacaagacaataaagccgataacttgggcttgttgttagaaacagtaaatgatggaaagacatgcacatccactgaagccaatattttgctcaacaatgagactgcagttgtgaagtcaacttttaccgctacaatagcatgcacatccactgaagccaatattttgctcaacgatgagactgcagttgtgaagtcaacttttacagctacaatagatggagacacagatagcggcatctcaagttctacctataaagaggatgggtgcatgtttgaaaagggtagttccaagcaggatataaggatgggttccaatcaagacttgagccagattgataatgtattggttaaggaggtgattatattagaaactaatagtactgatgacatacagatgatcaaagaggtcatcatatctgaagttacaactcccaaacaagtggtagaggggaatatgatggaaactgaattagatgaggcagtccacagttcagaaagcactgcactgggagaagacgaggacacaaaacgacctaatacttttttcaaaaaagatgagggacagagtgcacgagatgaatatgctgcttatgacaatggcatagtgattgaacgggaagaaagtcgcaacaaagaaaaatttaccatcacaggcacagattcactagtggctgagcccaaagatttaccacatcttgacagctcaaacacttctttggaactaagttcagccaatgaaaatattgatcagcttcgtgcttgcagtagtaatgtcactgcagagcgaagagcaggaattgacacatcattttccagctccaggagtcagtcttctaatatctcttgtgcgaacattctaccagaagaatctaacttgataataaaccatgcttcaacttctgtgaatgcaaatacagatacaaccgattcatctcgactggtgctaaagaaaaaaccttttctaccattggcgacatctagtcttttttctccatcatctcccagacgcaatctgcttcgtgctgcatccacagatttgtcctttttttctccatcacaaacagaatctaagcagaactccgttacttctacaagtggaaggggtgattcagatacatcttctgtgcttccaccatttcagctctacacatccctgggatcatcatccaaaatgtctctagtacatcctactctgcgaccaataagaacgatttcatctctaccatcattatcatttggcacattcatagagatgtcaatggcttcttcaagatcacccaaacaccaagagcatgttagatctccctcaataccacaagatcaacatcttcacccaccaatgacagaggaaaatgatctacattcaggtagcttaactttgcctgcttccaaccaatatggccctcaaaccccacacccacctccactaccacccccacatgattcttgcacccaaagttattcgagcaccataatatatgaacctgaacaaataagagctgatggatcttgttcctatagtccagattatagacaaagtgttctcaacttaggtgattcctcactaacttcactctctaatagtagtatagctgcaactgaatgtcccttaggagcctctgattttgtagatgaggaagtaacaagtagacctaatatagtaactgccatggatgtcccatttaccaatgaagatacaaattctttgttgcacatgacttgttcttcacctcccaaaacattacaacgtgctgaaccaccaacgctgccgccaccacctttgcctctagtaccaccaccatcacaactaccactgccaactatatgcagtgatagtggatcagttccactggtatactcaaatccgtcttcagattgtccatataaagaaccaacaatgctaccagaacacaaatctgatgttccagctacttctctcgaaggacatgaagcaagtgaagttcaatttctgcaatctgatactgctgtcgaattatctccatcagagcattctgagtataaagttcagcatgtggttggaagcgctgaagatacaatttcaaagcaagtaaattgtgagcagcctttagatcaaacaacattatcaattcatttgaggccatttgaggtggagatatcacaaggtgaaacaattaacggagtcttggcctctataattgatgataaagaacacggaggcattccaattctgcaattgccacaaaagttgcctcattctggagaacatatgaaatctccacctccacctcctcctcctccacaaccaccaccttgtcatgcaacagttataccttctttgtgtttatcttcaaaaccaccttctccaacagaacattacgaaaatccaccttcttcccctccacctttttctagagaatcatgtgttgttctacctccacttccagctccactcttgaatcatccatctcttcctggaaaacatattaatctatatccacctccaccacctccaccaccaactttacatcatatcgcacctgcatctccgtgctcgtaccaaccttctttctatgcagatatagcaacccaacctaccttttcagaggatattgtaatagttccacctccacattcaaaaggggttaatataattccattgccacctcctcctcctagaacaagtgaaactttgtctcaacctcttgatggtgggcaatcaacaggaccagcttctcttcttgaagttactaaagaaaacccaccacctcctctccttccccctgaaggacaaatgggatctccattgtcaactctttgtggagaaattgtgaatattccaatacctccaccttcacttcctggaggacatggagaagttccactatcaactcctcctagaggatgtggggccattccacctccaccaccctttactaaagggataggaggaattacattgccaattggatttcatagtggagacttgtcattcctccaatctaccagagaatctaaaggcccttcatgcttgccacctccacctccacctccacctccacctccaccaccaccactatcttctaatggacacataggtgatctgccaccaccacctacgagtgtatttgtagaggcttcgatccctctgccacctcaaacaggatgtggaggggatccaccaccgccaccacctactggaggacatgtagggcctccaccaccaccgccacctctaggggaatgtgcatgggatcttcaacctcccaaagcatgtgtaagggctcccccgccacctccacctcctggaggatatgcagaagttctaatgccaccaccacctcccagaggatatgtaggggctccagcaccacctccacctcctggaggatatgcaggagctccaccaccaccgccacctcctggaggatatgcaggagctccaccaccaccgccacctcctggaggatatgcaggagctccaccaccaccgccacctcctggaggatatgcaggagctccaccaccaccgccaccccctggaggatatgcaggagctccaccacccccgccttcatatggaggaattggaggagttcctcctcctccaccaccctttggaggactaggaggaactccaccgcctccacctccagcagggtttcgaggtggagctccatcaccacctcctcctcctggaggtcatggaggtccaccaccacctcctcctagaggacatggaagtggtccccctccccctcccggtgcaccttctcctccaatgcctcctggaatgtctggtggcccccctcctcctccaggtggaagagggatgcctactccacctggcggaaggggacatggccttgctcgaacgttaggcccgacattacaaagtgcaatgcgaaagtcatccctaaaaccactacattgggtcaaagtaacaagagcaatgcaaggaagcttatgggcggagctacaaaaacaagtggaagctaatagccatgctgaattcgatgtaaatgaactagagtctctgtttaccattgctccaaaggcaaaagctggctcaaaatcagaaggccgtggaaaatcccttggaacaaaatctgataaagttcaactgatcgatctaagacgggccaataacacagagatcatgttgacaaaaatcaaaatgccgctccctgatatgatgagtgctgctctagctttggacgattcagttttggatgctgaccagattgaaaatctaataaaattttgcccaacaaaagaggagatggaacttctaaagaactacagtggggacaaggaagctcttggcaagtgtgagcatttctttctagagttaatgaaggtgccaagggttgaatctaagcttaagatatttgctttcaagattcagtttcagtctcagattagggatgtcagaaagaatttgcagactgtatcatctgcttgtgaggagctcagaagctctgagaagttgaaggttatcatgaagaacattctgttaattgggaatacattgaatcaaggcacaccaagaggccaggctgttggttttcgcttggacagcctcctaaaacttatagagacccgtgccactagtggtagaatgacattaatgcattttctatgtaagtcccttgcagagaagtcaccagaagtaatggattttcatgaggatcttgtccacttggaagcttcttcaaagttgcaactaaaagcattggcggaggagcagctggcagtggtaaaggggctggagaaagttgaacaggagctaactgcttcagaaagtgatgggccggtttctgatgttttccgtaagactttaaaggagttcattgattgttcgagtgctgatgtatgctccttgtcagcattctattctgaagtaggtaaaagcgcagatgcacttgctctttattttggagaagaccctgctaaatttccttttgagcaaggtaatattcatgcctatagacccatggaaatggtttaa

SEQ ID NO: 216709 - DNA, 3769 bp, Zea Mays
gcgacgccgacggcggtcggaagcgcaagggaatggcgctgttccggaggctcttctatcggaagccgccggatcggctcctcgagatagccgaccgcgtctacggtacggtaccacacaatgtagattaccactccgttgaaacggctgcggtcgtgctttggcaccttgcttactacttcctcccaccaatcgtattcgattgttgcttctcaacagaaaccatggaccaatacagatacaagaattacctggacaacattattttgcagctccgtgaacagtttgcagattcttcattgatggtacttaactttagagatgaaggaaaaagtcttatttcaggcattttctccaagtacaatattacagccaaagactacccttgcaagtatctaggatgcccgttacttcctttggatatcattctccacttcctaaggctgagtgaaaggtggcttatgcttgaagggcagcaaaatattttactaatgcactgtgagaaagatggatggccagtgttggcatttatgcttgcaggtcttcttctgtacaggaaacaatataatggggagcaaagaactctagatatggtgtacaagcaagccccaaaggagcttcttcagatgctaaccacattgaatccacaaccgtctcatcttcggtatcttgggtacatatgcagaatggatgacggcataggatggcctacacaacctattcctttcaccttggattgtgtaattcttagagaaattccaaattttgatggagtcggtggttgtcggccaattgttcgagtatatgggcaggatattccaacaactgacagaagtcatagtgtcatttcaccaccatcaaaggccaagaaacatattaggcgttacagacaggcagataatgcgccagtgaagttaaatgtaggatcctgcgtccaaggtgatgtcgtccttgaatgtctgcatgtggatgatggccaaggaaatgaaaggttaatgtttagggtgatgttcaatacctttttcatccagtctcacattttaccgttgaactttgaggacatcgatgtcccttgggatgccgatcaccagttcacaaagaacttcaaagcagaggtactcttttcagagtttgatgctgagtctgatgcgtcaactgaagtagcacctgattatgattatgattatgactatgataatgatatggatgttgcctctgctgatgagttctttgaagcagaagaaatcttcagtaatgctgaatctcaagatggaaataaggatgcggatactctttctatggtctctacagattatattcgaactccaagtgccgaatgttggaaaaactctccattttccaactttgatctgaatattgacattgatggatcacaagacaataaagccgataacttgggcttgttgttagaaacagtaaatgatggaaagacatgcacatccactgaagccaatattttgctcaacaatgagactgcagttgtgaagtcaacttttaccgctacaatagcatgcacatccactgaagccaatattttgctcaacgatgagactgcagttgtgaagtcaacttttacagctacaatagatggagacacagatagcggcatctcaagttctacctataaagaggatgggtgcatgtttgaaaagggtagttccaagcaggatataaggatgggttccaatcaagacttgagccagattgataatgtattggttaaggaggtgattatattagaaactaatagtactgatgacatacagatgatcaaagaggtcatcatatctgaagttacaactcccaaacaagtggtagaggggaatatgatggaaactgaattagatgaggcagtccacagttcagaaagcactgcactgggagaagacgaggacacaaaacgacctaatacttttttcaaaaaagatgagggacagagtgcacgagatgaatatgctgcttatgacaatggcatagtgattgaacgggaagaaagtcgcaacaaagaaaaatttaccatcacaggcacagattcactagtggctgagcccaaagatttaccacatcttgacagctcaaacacttctttggaactaagttcagccaatgaaaatattgatcagcttcgtgcttgcagtagtaatgtcactgcagagcgaagagcaggaattgacacatcattttccagctccaggagtcagtcttctaatatctcttgtgcgaacattctaccagaagaatctaacttgataataaaccatgcttcaacttctgtgaatgcaaatacagatacaaccgattcatctcgactggtgctaaagaaaaaaccttttctaccattggcgacatctagtcttttttctccatcatctcccagacgcaatctgcttcgtgctgcatccacagatttgtcctttttttctccatcacaaacagaatctaagcagaactccgttacttctacaagtggaaggggtgattcagatacatcttctgtgcttccaccatttcagctctacacatccctgggatcatcatccaaaatgtctctagtacatcctactctgcgaccaataagaacgatttcatctctaccatcattatcatttggcacattcatagagatgtcaatggcttcttcaagatcacccaaacaccaagagcatgttagatctccctcaataccacaagatcaacatcttcacccaccaatgacagaggaaaatgatctacattcagccatgctgaattcgatgtaaatgaactagagtctctgtttaccattgctccaaaggcaaaagctggctcaaaatcagaaggccgtggaaaatcccttggaacaaaatctgataaagttcaactgatcgatctaagacgggccaataacacagagatcatgttgacaaaaatcaaaatgccgctccctgatatgatgagtgctgctctagctttggacgattcagttttggatgctgaccagattgaaaatctaataaaattttgcccaacaaaagaggagatggaacttctaaagaactacagtggggacaaggaagctcttggcaagtgtgagcatttctttctagagttaatgaaggtgccaagggttgaatctaagcttaagatatttgctttcaagattcagtttcagtctcagattagggatgtcagaaagaatttgcagactgtatcatctgcttgtgaggagctcagaagctctgagaagttgaaggttatcatgaagaacattctgttaattgggaatacattgaatcaaggcacaccaagaggccaggctgttggttttcgcttggacagcctcctaaaacttatagagacccgtgccactagtggtagaatgacattaatgcattttctatgtaagtcccttgcagagaagtcaccagaagtaatggattttcatgaggatcttgtccacttggaagcttcttcaaagttgcaactaaaagcattggcggaggagcagctggcagtggtaaaggggctggagaaagttgaacaggagctaactgcttcagaaagtgatgggccggtttctgatgttttccgtaagactttaaaggagttcattgattgttcgagtgctgatgtatgctccttgtcagcattctattctgaagtaggtaaaagcgcagatgcacttgctctttattttggagaagaccctgctaaatttccttttgagcaaggtaatattcatgcctatagacccatggaaatggtttaa

SEQ ID NO: 216710 - DNA, 526 bp, Zea Mays
atttttctcctaattgccgttgaggcataccgcatacgtttctcccccattcctctccccactccgaaccctagccaccgtgctcacttcccaggtcgaacccgccgcggcgcgagtccacggcagtgcaggacctgatcctgcggtctaggccgcggcggtgagatggtgatggtgtcaggcggcggggggaacgcgtgggcgaaggagatgaccctccgccgcaggatagccagcatattcaacaagacgcaggaacacttccctactctgaaagactacaacgattatctggaagaagttgaggatatgactttcaacctgatcgaagggatagatgtcgaggagattgaagcaaaaattgcaagataccaacaggaaaatgcggagcagatatacttgtccagagctaaaagggcggaagatcttgcggcagcacttaaagcaagcaggatgaaccctgtaaaggccgaagcaaatgatacggcaaccaattcggatcattattggcgcaccaagcacatcg

SEQ ID NO: 216711 - DNA, 2730 bp, Zea Mays
gtccagcccaaataaaagcccattaatgctacacgctgtcacccatcgtatcggtcaggtaggcacggccgatccggcgccagcagcggcggtgctcgaccttcaggcatcagagctgcgggacatcacacgcaccgctacgatctcctcctgcgagcgagatctcaccaccgcagcggcgccgcggccatggcgggaaggtatcaccaggatcagggcggggacgggggcgcgtccatggaggtagtcagcacgccgaaccaggagctggcccttaccaactgcgcatacgtctctcccgctgacctccgccgcttccccaacgggctcgccctcgtcgctgacgcctgggtcttcaccctacgtgaccacaatgctgttgcaagtggacgcattgccttgaatgctattcagcgtcggcaggcaaaggtttcagctggggattctgttactgttagcagttttgtcccccctgatgatttcaagttggctttgctcactttagatctagattatgccaaggcaagagccaaccgaaatgacgagctggatgctgttgtgcttgcccaacaactccgtaagaggtttctgaatcaggtcatgacctcagggcaaagggtgccatttgaattttatggaacaaactatgtattcaccgtcaatcaagctttgctagagggtcaagagagttctacaccattggatagaggattcttgtccagtgatacatacatcatatttgaggctgctcctaattcaggaattaaggtgatcaaccaaaaggaagctgctagcagcaagcttttcaaacataaagagtttaacctggaaaaattgggtataggtggattaagcgctgaattcactgacatatttcgtagggcattcgcttcaagagtctttccgcctcatgttgtcagtaagttgggcatcaaacatgttaagggtatattgctatatggacctcctggtactggcaagactctaatggccagacaaattggaaagttactgaatggaaaagatcccaagattgtgaatggacctgaagttctgagcaagtttgttggagaaactgagaagaatgtgagagatttgtttgctgatgctgaaaatgagcagagaacacgaggtgatcagagtgacctccatgttatcatattcgatgaaattgatgccatctgcaagtctagaggatctacccgtgatggtacaggtgtacatgatagcattgtaaaccagctgcttacaaagatagatggtgttgaggcgttgaataatgtattgcttattggaatgacgaatcgtaaagatttgcttgatgaagctttattgagacctggacgattggaagtacacattgagataaacctgcctgatgaaaatggtcgtttgcaaatccttcaaattcatacaaataagatgaaggagaattctttcctgtctccagatattaatcttcaggagctagctgcgcggacaaagaactacagtggagcagagttggaaggtgttgtcaaaagtgctgtctcatttgctttgaaccggcagataaccatggatgacctcactaaacctttggatgaggaaagcatcaaggttaccatggatgattttgtgaatgcacttcatgaaattacccctgcatttggtgcttccaccgatgatctcgaaagatgcagattgcgtggtattgttgattgtggcaaggcacataagcacatttatcaaagagctatgctcctcgtagagcaagttaaagttagcaaaggtagcccactcgtgacttgcctattggaaggtcctgctggaagtgggaaaacggctatggcagcaagtgttggcattgacagtgattttgcatatgtgaaaattatatcagcagaaacaatgattggtttcagtgaaagcagcaaatgcgcacagatttgcaaggtttttgaggacgcatacaagtctcagttcagcatgataattcttgatgatatcgaaaggttactggagtatgtagccatcggaccacgtttttcaaacttgatctcacaaactcttctggtcctcctcaagagagttcctcctaagggaaaaaacttgcttgtcgttggaacaacaagcgaggttggcttcctagaatctgttggaatgtgtgacgtgttctctgtgacctaccatgttcccaaactgaaaaaggaggatgccaaaaaggtattgcatcatcttgatgtgttcgatgacggagatcttgacgcagcagcagaagcactggacgatatgccaatcaagaagttgtacacacttgttgagatggctgctcaggggccaaccggaggaagtgctgaagcgatttatgccggagagaagatagatatcaaccatttctttagcatcttgagtgatattatccgttactaagcccgcatggagccgaaatgaaccctataagtatccagtaggagtttgtttgcacccgtgcttcatcaaccatttctgtagattggtttgatctttgatgtgttgtttttgtttgatgcacctactagagctgttggattagatcagaggcgaattacacgatatatcatttttgtattgtatgacgatgtttatacagttcttaatgggatccagctttacacctcagaacaccgataattttcacattcctattagacccgcttgttttgttgaaattgaattctattttaataaatacgatttagagaaaactaa

SEQ ID NO: 216712 - DNA, 2682 bp, Zea Mays
atcgtatcggtcaggtaggcacggccgatccggcgccagcagcggcggtgctcgaccttcaggcatcagagctgcgggacatcacacgcaccgctacgatctcctcctgcgagcgagatctcaccaccgcagcggcgccgcggccatggcgggaaggtatcaccaggatcagggcggggacgggggcgcgtccatggaggtagtcagcacgccgaaccaggagctggcccttaccaactgcgcatacgtctctcccgctgacctccgccgcttccccaacgggctcgccctcgtcgctgacgcctgggtcttcaccctacgtgaccacaatgctgttgcaagtggacgcattgccttgaatgctattcagcgtcggcaggcaaaggtttcagctggggattctgttactgttagcagttttgtcccccctgatgatttcaagttggctttgctcactttagatctagattatgccaaggcaagagccaaccgaaatgacgagctggatgctgttgtgcttgcccaacaactccgtaagaggtttctgaatcaggtcatgacctcagggcaaagggtgccatttgaattttatggaacaaactatgtattcaccgtcaatcaagctttgctagagggtcaagagagttctacaccattggatagaggattcttgtccagtgatacatacatcatatttgaggctgctcctaattcaggaattaaggtgatcaaccaaaaggaagctgctagcagcaagcttttcaaacataaagagtttaacctggaaaaattgggtataggtggattaagcgctgaattcactgacatatttcgtagggcattcgcttcaagagtctttccgcctcatgttgtcagtaagttgggcatcaaacatgttaagggtatattgctatatggacctcctggtactggcaagactctaatggccagacaaattggaaagttactgaatggaaaagatcccaagattgtgaatggacctgaagttctgagcaagtttgttggagaaactgagaagaatgtgagagatttgtttgctgatgctgaaaatgagcagagaacacgaggtgatcagagtgacctccatgttatcatattcgatgaaattgatgccatctgcaagtctagaggatctacccgtgatggtacaggtgtacatgatagcattgtaaaccagctgcttacaaagatggtgttgaggcgttgaataatgtattgcttattggaatgacgaatcgtaaagatttgcttgatgaagctttattgagacctggacgattggaagtacacattgagataaacctgcctgatgaaaatggtcgtttgcaaatccttcaaattcatacaaataagatgaaggagaattctttcctgtctccagatattaatcttcaggagctagctgcgcggacaaagaactacagtggagcagagttggaaggtgttgtcaaaagtgctgtctcatttgctttgaaccggcagataaccatggatgacctcactaaacctttggatgaggaaagcatcaaggttaccatggatgattttgtgaatgcacttcatgaaattacccctgcatttggtgcttccaccgatgatctcgaaagatgcagattgcgtggtattgttgattgtggcaaggcacataagcacatttatcaaagagctatgctcctcgtagagcaagttaaagttagcaaaggtagcccactcgtgacttgcctattggaaggtcctgctggaagtgggaaaacggctatggcagcaagtgttggcattgacagtgattttgcatatgtgaaaattatatcagcagaaacaatgattggtttcagtgaaagcagcaaatgcgcacagatttgcaaggtttttgaggacgcatacaagtctcagttcagcatgataattcttgatgatatcgaaaggttactggagtatgtagccatcggaccacgtttttcaaacttgatctcacaaactcttctggtcctcctcaagagagttcctcctaagggaaaaaacttgcttgtcgttggaacaacaagcgaggttggcttcctagaatctgttggaatgtgtgacgtgttctctgtgacctaccatgttcccaaactgaaaaaggaggatgccaaaaaggtattgcatcatcttgatgtgttcgatgacggagatcttgacgcagcagcagaagcactggacgatatgccaatcaagaagttgtacacacttgttgagatggctgctcaggggccaaccggaggaagtgctgaagcgatttatgccggagagaagatagatatcaaccatttctttagcatcttgagtgatattatccgttactaagcccgcatggagccgaaatgaaccctataagtatccagtaggagtttgtttgcacccgtgcttcatcaaccatttctgtagattggtttgatctttgatgtgttgtttttgtttgatgcacctactagagctgttggattagatcagaggcgaattacacgatatatcatttttgtattgtatgacgatgtttatacagttcttaatgggatccagctttacacctcagaacaccgataattttcacattcctattagacccgcttgttttgttgaaattgaattctattttaataaatacgatttagagaaaactaa

SEQ ID NO: 216713 - DNA, 2524 bp, Zea Mays
gccagcagcggcggtgctcgaccttcaggcatcagagctgcgggacatcacacgcaccgctacgatctcctcctgcgagcgagatctcaccaccgcagcggcgccgcggccatggcgggaaggtatcaccaggatcagggcggggacgggggcgcgtccatggaggtagtcagcacgccgaaccaggagctggcccttaccaactgcgcatacgtctctcccgctgacctccgccgcttccccaacgggctcgccctcgtcgctgacgcctgggtcttcaccctacgtgaccacaatgctgttgcaagtggacgcattgccttgaatgctattcagcgtcggcaggcaaaggtttcagctggggattctgttactgttagcagatctagattatgccaaggcaagagccaaccgaaatgacgagctggatgctgttgtgcttgcccaacaactccgtaagaggtttctgaatcaggtcatgacctcagggcaaagggtgccatttgaattttatggaacaaactatgtattcaccgtcaatcaagctttgctagagggtcaagagagttctacaccattggatagaggattcttgtccagtgatacatacatcatatttgaggctgctcctaattcaggaattaaggtgatcaaccaaaaggaagctgctagcagcaagcttttcaaacataaagagtttaacctggaaaaattgggtataggtggattaagcgctgaattcactgacatatttcgtagggcattcgcttcaagagtctttccgcctcatgttgtcagtaagttgggcatcaaacatgttaagggtatattgctatatggacctcctggtactggcaagactctaatggccagacaaattggaaagttactgaatggaaaagatcccaagattgtgaatggacctgaagttctgagcaagtttgttggagaaactgagaagaatgtgagagatttgtttgctgatgctgaaaatgagcagagaacacgaggtgatcagagtgacctccatgttatcatattcgatgaaattgatgccatctgcaagtctagaggatctacccgtgatggtacaggtgtacatgatagcattgtaaaccagctgcttacaaagatggtgttgaggcgttgaataatgtattgcttattggaatgacgaatcgtaaagatttgcttgatgaagctttattgagacctggacgattggaagtacacattgagataaacctgcctgatgaaaatggtcgtttgcaaatccttcaaattcatacaaataagatgaaggagaattctttcctgtctccagatattaatcttcaggagctagataaccatggatgacctcactaaacctttggatgaggaaagcatcaaggttaccatggatgattttgtgaatgcacttcatgaaattacccctgcatttggtgcttccaccgatgatctcgaaagatgcagattgcgtggtattgttgattgtggcaaggcacataagcacatttatcaaagagctatgctcctcgtagagcaagttaaagttagcaaaggtagcccactcgtgacttgcctattggaaggtcctgctggaagtgggaaaacggctatggcagcaagtgttggcattgacagtgattttgcatatgtgaaaattatatcagcagaaacaatgattggtttcagtgaaagcagcaaatgcgcacagatttgcaaggtttttgaggacgcatacaagtctcagttcagcatgataattcttgatgatatcgaaaggttactggagtatgtagccatcggaccacgtttttcaaacttgatctcacaaactcttctggtcctcctcaagagagttcctcctaagggaaaaaacttgcttgtcgttggaacaacaagcgaggttggcttcctagaatctgttggaatgtgtgacgtgttctctgtgacctaccatgttcccaaactgaaaaaggaggatgccaaaaaggtattgcatcatcttgatgtgttcgatgacggagatcttgacgcagcagcagaagcactggacgatatgccaatcaagaagttgtacacacttgttgagatggctgctcaggggccaaccggaggaagtgctgaagcgatttatgccggagagaagatagatatcaaccatttctttagcatcttgagtgatattatccgttactaagcccgcatggagccgaaatgaaccctataagtatccagtaggagtttgtttgcacccgtgcttcatcaaccatttctgtagattggtttgatctttgatgtgttgtttttgtttgatgcacctactagagctgttggattagatcagaggcgaattacacgatatatcatttttgtattgtatgacgatgtttatacagttcttaatgggatccagctttacacctcagaacaccgataattttcacattcctattagacccgcttgttttgttgaaattgaattctattttaataaatacgatttagagaaaactaa

SEQ ID NO: 216714 - DNA, 2595 bp, Zea Mays
gccagcagcggcggtgctcgaccttcaggcatcagagctgcgggacatcacacgcaccgctacgatctcctcctgcgagcgagatctcaccaccgcagcggcgccgcggccatggcgggaaggtatcaccaggatcagggcggggacgggggcgcgtccatggaggtagtcagcacgccgaaccaggagctggcccttaccaactgcgcatacgtctctcccgctgacctccgccgcttccccaacgggctcgccctcgtcgctgacgcctgggtcttcaccctacgtgaccacaatgctgttgcaagtggacgcattgccttgaatgctattcagcgtcggcaggcaaaggtttcagctggggattctgttactgttagcagatctagattatgccaaggcaagagccaaccgaaatgacgagctggatgctgttgtgcttgcccaacaactccgtaagaggtttctgaatcagggcaaagggtgccatttgaattttatggaacaaactatgtattcaccgtcaatcaagctttgctagagggtcaagagagttctacaccattggatagaggattcttgtccagtgatacatacatcatatttgaggctgctcctaattcaggaattaaggtgatcaaccaaaaggaagctgctagcagcaagcttttcaaacataaagagtttaacctggaaaaattgggtataggtggattaagcgctgaattcactgacatatttcgtagggcattcgcttcaagagtctttccgcctcatgttgtcagtaagttgggcatcaaacatgttaagggtatattgctatatggacctcctggtactggcaagactctaatggccagacaaattggaaagttactgaatggaaaagatcccaagattgtgaatggacctgaagttctgagcaagtttgttggagaaactgagaagaatgtgagagatttgtttgctgatgctgaaaatgagcagagaacacgaggtgatcagagtgacctccatgttatcatattcgatgaaattgatgccatctgcaagtctagaggatctacccgtgatggtacaggtgtacatgatagcattgtaaaccagctgcttacaaagatagatggtgttgaggcgttgaataatgtattgcttattggaatgacgaatcgtaaagatttgcttgatgaagctttattgagacctggacgattggaagtacacattgagataaacctgcctgatgaaaatggtcgtttgcaaatccttcaaattcatacaaataagatgaaggagaattctttcctgtctccagatattaatcttcaggagctagctgcgcggacaaagaactacagtggagcagagttggaaggtgttgtcaaaagtgctgtctcatttgctttgaaccggcagataaccatggatgacctcactaaacctttggatgaggaaagcatcaaggttaccatggatgattttgtgaatgcacttcatgaaattacccctgcatttggtgcttccaccgatgatctcgaaagatgcagattgcgtggtattgttgattgtggcaaggcacataagcacatttatcaaagagctatgctcctcgtagagcaagttaaagttagcaaaggtagcccactcgtgacttgcctattggaaggtcctgctggaagtgggaaaacggctatggcagcaagtgttggcattgacagtgattttgcatatgtgaaaattatatcagcagaaacaatgattggtttcagtgaaagcagcaaatgcgcacagatttgcaaggtttttgaggacgcatacaagtctcagttcagcatgataattcttgatgatatcgaaaggttactggagtatgtagccatcggaccacgtttttcaaacttgatctcacaaactcttctggtcctcctcaagagagttcctcctaagggaaaaaacttgcttgtcgttggaacaacaagcgaggttggcttcctagaatctgttggaatgtgtgacgtgttctctgtgacctaccatgttcccaaactgaaaaaggaggatgccaaaaaggtattgcatcatcttgatgtgttcgatgacggagatcttgacgcagcagcagaagcactggacgatatgccaatcaagaagttgtacacacttgttgagatggctgctcaggggccaaccggaggaagtgctgaagcgatttatgccggagagaagatagatatcaaccatttctttagcatcttgagtgatattatccgttactaagcccgcatggagccgaaatgaaccctataagtatccagtaggagtttgtttgcacccgtgcttcatcaaccatttctgtagattggtttgatctttgatgtgttgtttttgtttgatgcacctactagagctgttggattagatcagaggcgaattacacgatatatcatttttgtattgtatgacgatgtttatacagttcttaatgggatccagctttacacctcagaacaccgataattttcacattcctattagacccgcttgttttgttgaaattgaattctattttaataaatacgatttagagaaaactaa

SEQ ID NO: 216715 - DNA, 1679 bp, Zea Mays
gtccgcgttgccattctcgccggcatcgtcgcgcccccaccccatacgagccgcccccgcgacgctgaccccactgccgtccagcaggatctctcccttcccccgccccacgcctagcaggatctctcccttccctcgcgcgtccgagacgacatggacgaaggtgggaggctcccaacgcatccccgccgacctcaacgccgacggtcctttcctaacccgcagcccccggccacagtctctctcttccggtccagtgggggctgctagcttccaggaatattggagatgtgccttcaacactctagggctcgattgcctccagataagcaacttgctgcagaaaaaagttttgccttgtattgcaagccagttgaattgtacaatattatccagaggcgagctattaaaaatccaccttttgttcaaagatcccttctatataagatacaggcaaggagaaaaaagaggctccaaccgcgcctcctcaagttacttcgcagcaatgccttcaaggcgaagcccgcgctcatcaccctcatcggcgcctgcgcggccatgggcgccaatgccgaagtcaccgcctccatcacgtgcctccgcgatgcaatcgctagcgatgactgggcagcgaggaaggccgcggcggaggcgcttgctgcattggccctagagcacacggatcttctcacgacctacaaatcctcttgcgtcaccttcttcgaggccagaaggtttgacaaggtcaaggttgtgcaagagtcgatgaaccagatgattgaggcggggaaggagatcccaggtgctgaagaggacgagtgctcctcgctctgccaccagcgtcccagtcacaacgaagatcttctcttacagggagtgcaagtgatgggcgatatccagctgcttcgctgggctcaaactcagttcctttagcaacaaggaagagcatattatctgtaagcagatcatctctgtctgacgtgtctaccagtgtaattttctggaccttctccagtctattgtgtagttgcaaaagaatatgtgaattaccagtcagtggagattgagagggattccccggctagaagctcaagcggattaggaagtggctcatcttcatccagtgtttattttttcagtaaccagaggatgacaagcctactacaagagttggtcctaagttataaaataagcctaactttttttacagagtacacaaatgtcaggttttcctgtttgggctagcaccacaaatggaaacaaaaaattggactcagcccatcgtgaagatatgaaggaagagcactgtcccattattctgtttttcgaagaccatgtttctagcatgaacatgccagcatggtgccatcaacaacttccctgttagctcacggtacaccatgctccagcctgtcccctggttatcactgtggtgctgattgtgttcccaagatgcactgaaatagagcaagatcaaatgaggatgaagttactgtgtagagatttttgttccccctttgtagcagcacccatggatttttatttgcacagaattactctcttttactggttcattcaataattcaatttgttgcttggaaaccactgtataataaatacaaatgctatggtatgattttgtgaattctgatcgctccttttcttgtaagcatgaattc

SEQ ID NO: 216716 - DNA, 1721 bp, Zea Mays
cgcgttgccattctcgccggcatcgtcgcgcccccaccccatacgagccgcccccgcgacgctgaccccactgccgtccagcaggatctctcccttcccccgccccacgcctagcaggatctctcccttccctcgcgcgtccgagacgacatggacgaaggtgggaggctcccaacgcatccccgccgacctcaacgccgacggtcctttcctaacccgcagcccccggccacagtctctctcttccggtccagtgggggctgctagcttccaggaatattggagatgtgccttcaacactctagggctcgattgcctccagataagcaacttgctgcagaaaaaagttttgccttgtattgcaagccagttgaattgtacaatattatccagaggcgagctattaaaaatccaccttttgttcaaagatcccttctatataagatacaggcaaggagaaaaaagaggctccaaccgcgcctcctcaagttacttcgcagcaatgccttcaaggcgaagcccgcgctcatcaccctcatcggcgcctgcgcggccatgggcgccaatgccgaagtcaccgcctccatcacgtgcctccgcgatgcaatcgctagcgatgactgggcagcgaggaaggccgcggcggaggcgcttgctgcattggccctagagcacacggatcttctcacgacctacaaatcctcttgcgtcaccttcttcgaggccagaaggtttgacaaggtcaaggttgtgcaagagtcgatgaaccagatgattgaggcggggaaggagatcccaggtgctgaagaggacgagtgctcctcgctctgccaccagcgtcccagtcacaacgaagatcttctcttacagggagtgcaagtgatgggcgatatccagctgcttcgctgggctcaaactcagttcctttagcaacaaggaagagcatattatctgtaagcagatcatctctgtctgacgtgtctaccagtgtaattttctggaccttctccaggtacacctcgtgtagcgattttctgactttcctgagtgaggcggcgctattggctttgtctattgtgtagttgcaaaagaatatgtgaattaccagtcagtggagattgagagggattccccggctagaagctcaagcggattaggaagtggctcatcttcatccagtgtaaccagaggatgacaagcctactacaagagttggtcctaagttataaaataagcctaactttttttacagagtacacaaatgtcaggttttcctgtttgggctagcaccacaaatggaaacaaaaaattggactcagcccatcgtgaagatatgaaggaagagcactgtcccattattctgtttttcgaagaccatgtttctagcatgaacatgccagcatggtgccatcaacaacttccctgttagctcacggtacaccatgctccagcctgtcccctggttatcactgtggtgctgattgtgttcccaagatgcactgaaatagagcaagatcaaatgaggatgaagttactgtgtagagatttttgttccccctttgtagcagcacccatggatttttatttgcacagaattactctcttttactggttcattcaataattcaatttgttgcttggaaaccactgtataataaatacaaatgctatggtatgattttgtgaattctgatcgctccttttcttgtaagcatgaattc

SEQ ID NO: 216717 - DNA, 1755 bp, Zea Mays
catcgtcgcgcccccaccccatacgagccgcccccgcgacgctgaccccactgccgtccagcaggatctctcccttcccccgccccacgcctagcaggatctctcccttccctcgcgcgtccgagacgacatggacgaaggtgggaggctcccaacgcatccccgccgacctcaacgccgacggtcctttcctaacccgcagcccccggccacagtctctctcttccggtccagtgggggctgctagcttccaggaatattggagatgtgccttcaacactctagggctcgattgcctccagataagcaacttgctgcagaaaaaagttttgccttgtattgcaagccagttgaattgtacaatattatccagaggcgagctattaaaaatccaccttttgttcaaagatcccttctatataagatacaggcaaggagaaaaaagaggctccaaccgcgcctcctcaagttacttcgcagcaatgccttcaaggcgaagcccgcgctcatcaccctcatcggcgcctgcgcggccatgggcgccaatgccgaagtcaccgcctccatcacgtgcctccgcgatgcaatcgctagcgatgactgggcagcgaggaaggccgcggcggaggcgcttgctgcattggccctagagcacacggatcttctcacgacctacaaatcctcttgcgtcaccttcttcgaggccagaaggtttgacaaggtcaaggttgtgcaagagtcgatgaaccagatgattgaggcggggaaggagatcccaggtgctgaagaggacgagtgctcctcgctctgccaccagcgtcccagtcacaacgaagatcttctcttacagggagtgcaagtgatgggcgatatccagctgcttcgctgggctcaaactcagttcctttagcaacaaggaagagcatattatctgtaagcagatcatctctgtctgacgtgtctaccagtgtaattttctggaccttctccagttgcaaaagaatatgtgaattaccagtcagtggagattgagagggattccccggctagaagctcaagcggattaggaagtggctcatcttcatccagtggtacagtacagtggagcaaatgagtatctatcaccattaatgctgagttatcgatcaagtagctcgttaattcgttaaaattccttgcagattctgactctgatgttacagtttattttttcagtaaccagaggatgacaagcctactacaagagttggtcctaagttataaaataagcctaactttttttacagagtacacaaatgtcaggttttcctgtttgggctagcaccacaaatggaaacaaaaaattggactcagcccatcgtgaagatatgaaggaagagcactgtcccattattctgtttttcgaagaccatgtttctagcatgaacatgccagcatggtgccatcaacaacttccctgttagctcacggtacaccatgctccagcctgtcccctggttatcactgtggtgctgattgtgttcccaagatgcactgaaatagagcaagatcaaatgaggatgaagttactgtgtagagatttttgttccccctttgtagcagcacccatggatttttatttgcacagaattactctcttttactggttcattcaataattcaatttgttgcttggaaaccactgtataataaatacaaatgctatggtatgattttgtgaattctgatcgctccttttcttgtaagcatgaattc

SEQ ID NO: 216718 - DNA, 3550 bp, Zea Mays
catcgtcgcgcccccaccccatacgagccgcccccgcgacgctgaccccactgccgtccagcaggatctctcccttcccccgccccacgcctagcaggatctctcccttccctcgcgcgtccgagacgacatggacgaaggtgggaggctcccaacgcatccccgccgacctcaacgccgacggtcctttcctaacccgcagcccccggccacagtctctctcttccggtccagtgggggctgctagcttccaggaatattggagatgtgccttcaacactctagggctcgattgcctccagataagcaacttgctgcagaaaaaagttttgccttgtattgcaagccagttgaattgtacaatattatccagaggcgagctattaaaaatccaccttttgttcaaagatcccttctatataagatacaggcaaggagaaaaaagaggctccaaccgcgcctcctcaagttacttcgcagcaatgccttcaaggcgaagcccgcgctcatcaccctcatcggcgcctgcgcggccatgggcgccaatgccgaagtcaccgcctccatcacgtgcctccgcgatgcaatcgctagcgatgactgggcagcgaggaaggccgcggcggaggcgcttgctgcattggccctagagcacacggatcttctcacgacctacaaatcctcttgcgtcaccttcttcgaggccagaaggtttgacaaggtcaaggttgtgcaagagtcgatgaaccagatgattgaggcggggaaggagatcccaggtgctgaagaggacgagtgctcctcgctctgccaccagcgtcccagtcacaacgaagatcttctcttacagggagtgcaagtgatgggcgatatccagctgcttcgctgggctcaaactcagttcctttagcaacaaggaagagcatattatctgtaagcagatcatctctgtctgacgtgtctaccagtgtaattttctggaccttctccaggtaattttcctttagtgtgtttattgttactgtatatttttacagttctcttgcgagacgtagtagtatagggcttgtagtcgttaccttttcttccagaaataagtaatcattaacttctctgctgattactaaacacaagagaaaacattctgtaactgtaagtccacgttggaagtggaagtagttagtttttggatacttggttgcaacttgagctgtggcttcaatgctggagcagattatctggtgaagctgaggttgttttgagaaaacgtttggttgaacagcttctgatatctcttataaatagctgagaggggcaatgtccaagatgcccttgggtattgtaaaatttgattatatggttgcagatgttcttttatatttgagtacttttcaaattttaaaataaaaattatcaacaaccaataactttgccaagaaacgagcagataaggaattggggttatggcggattctttctaatttcttgtgaactttaggggtgaaaatgtactttgtgtggtgggccgtgggcctgtccatgtagcgcgtggaagctcctttttccaactccaccatgcacctgtccctcgtgaaagcgcactttatggtttatggagctccatgaatggagctgctacagcagcaccttcttggtacaaggagctaaaaacagctccaggagctgtaatggaatccccaccaaaggggggcatatgttggtcgtaagaagagggtactattgactcctgtttgagaatactgaaaagggactgctacttaaaatttgatgtttccatccagcattaacttttcagtatcagtgacacgatgggtcagatttgaacatgattattgcaagccaagacattgtcaattacatatagaagcacatgtcatgttgctttccatgttccccgcataatattacattgctaaacttaactatgcactaatgttttagtagtgacttgtaggtatacatattaccaccttgttgagtttgctgcaccagtcatgtgcaattaacgttccgtatcatcacttgtaaaaaaaaggtttatgttgggggcatctcctctgatgtctcttatgatgatctcaaaaactctgccagtcttttggacaagtagtggaagtgattactcctagatttctttgtgctagcttttgtttttgctttcttctaaattcagagttttttcttttcttttctgtaggttgaactcatagctgatcttcatgttatccatgctagcaatgtattgcgtttattcatatttctcttttatagtagggtgggtatatgtgataaagcatgtattcgataaagcagatctttccaagtagggaactaaattgaaaattgtattttatgaactttatgtttagtttcatggatcagtttgaggcatagctaagtataatttatatgattacactcacatccacttggtgtttttaaaatgtttgcaacggtccactattgagttcgaaatactgaacctcaaactccttgtcaaggtacacctcgtgtagcgattttctgactttcctgagtgaggcggcgctattggctttggtaggtctttctcatgatcatgttgtttgggtctgaaaatgctctgagtcgtagtctcgtaatgttatagtaacaataacatcatttttgtgaggatttgtctgaaaggagaacaactcaacatcaatcttggttatcaaccaagagtctaaactcctttgtcatgtgttatcgtttcaatcctgaactatgcattgttgtgggtcttgaagatctggttacaagcctacaacttaactgatatatatcacatgatgatgataatatgtatattcatggtgacacctttgctctttgaacatgttgtagtctattgtgtagttgcaaaagaatatgtgaattaccagtcagtggagattgagagggattccccggctagaagctcaagcggattaggaagtggctcatcttcatccagtgtttattttttcagtaaccagaggatgacaagcctactacaagagttggtcctaagttataaaataagcctaactttttttacagagtacacaaatgtcaggttttcctgtttgggctagcaccacaaatggaaacaaaaaattggactcagcccatcgtgaagatatgaaggaagagcactgtcccattattctgtttttcgaccatgtttctagcatgaacatgccagcatggtgccatcaacaacttccctgttagctcacggtacaccatgctccagcctgtcccctggttatcactgtggtgctgattgtgttcccaagatgcactgaaatagagcaagatcaaatgaggatgaagttactgtgtagagatttttgttccccctttgtagcagcacccatggatttttatttgcacagaattactctcttttactggttcattcaataattcaatttgttgcttggaaaccactgtataataaatacaaatgctatggtatgattttgtgaattctgatcgctccttttcttgtaagcatgaattc

SEQ ID NO: 216719 - DNA, 2023 bp, Zea Mays
catcgtcgcgcccccaccccatacgagccgcccccgcgacgctgaccccactgccgtccagcaggatctctcccttcccccgccccacgcctagcaggatctctcccttccctcgcgcgtccgagacgacatggacgaaggtgggaggctcccaacgcatccccgccgacctcaacgccgacggtcctttcctaacccgcagcccccggccacagtctctctcttccggtccagtgggggctgctagcttccaggaatattggagatgtgccttcaacactctagggctcgattgcctccagataagcaacttgctgcagaaaaaagttttgccttgtattgcaagccagttgaattgtacaatattatccagaggcgagctattaaaaatccaccttttgttcaaagatcccttctatataagatacaggcaaggagaaaaaagaggctccaaccgcgcctcctcaagttacttcgcagcaatgccttcaaggcgaagcccgcgctcatcaccctcatcggcgcctgcgcggccatgggcgccaatgccgaagtcaccgcctccatcacgtgcctccgcgatgcaatcgctagcgatgactgggcagcgaggaaggccgcggcggaggcgcttgctgcattggccctagagcacacggatcttctcacgacctacaaatcctcttgcgtcaccttcttcgaggccagaaggtttgacaaggtcaaggttgtgcaagagtcgatgaaccagatgattgaggcggggaaggagatcccaggtgctgaagaggacgagtgctcctcgctctgccaccagcgtcccagtcacaacgaagatcttctcttacagggagtgcaagtgatgggcgatatccagctgcttcgctgggctcaaactcagttcctttagcaacaaggaagagcatattatctgtaagcagatcatctctgtctgacgtgtctaccagtgtaattttctggaccttctccaggtacacctcgtgtagcgattttctgactttcctgagtgaggcggcgctattggctttggtaggtctttctcatgatcatgttgtttgggtctgaaaatgctctgagtcgtagtctcgtaatgttatagtaacaataacatcatttttgtgaggatttgtctgaaaggagaacaactcaacatcaatcttggttatcaaccaagagtctaaactcctttgtcatgtgttatcgtttcaatcctgaactatgcattgttgtgggtcttgaagatctggttacaagcctacaacttaactgatatatatcacatgatgatgataatatgtatattcatggtgacacctttgctctttgaacatgttgtagtctattgtgtagttgcaaaagaatatgtgaattaccagtcagtggagattgagagggattccccggctagaagctcaagcggattaggaagtggctcatcttcatccagtgtttattttttcagtaaccagaggatgacaagcctactacaagagttggtcctaagttataaaataagcctaactttttttacagagtacacaaatgtcaggttttcctgtttgggctagcaccacaaatggaaacaaaaaattggactcagcccatcgtgaagatatgaaggaagagcactgtcccattattctgtttttcgaagaccatgtttctagcatgaacatgccagcatggtgccatcaacaacttccctgttagctcacggtacaccatgctccagcctgtcccctggttatcactgtggtgctgattgtgttcccaagatgcactgaaatagagcaagatcaaatgaggatgaagttactgtgtagagatttttgttccccctttgtagcagcacccatggatttttatttgcacagaattactctcttttactggttcattcaataattcaatttgttgcttggaaaccactgtataataaatacaaatgctatggtatgattttgtgaattctgatcgctccttttcttgtaagcatgaattc

SEQ ID NO: 216720 - DNA, 2131 bp, Zea Mays
catcgtcgcgcccccaccccatacgagccgcccccgcgacgctgaccccactgccgtccagcaggatctctcccttcccccgccccacgcctagcaggatctctcccttccctcgcgcgtccgagacgacatggacgaaggtgggaggctcccaacgcatccccgccgacctcaacgccgacggtcctttcctaacccgcagcccccggccacagtctctctcttccggtccagtgggggctgctagcttccaggaatattggagatgtgccttcaacactctagggctcgattgcctccagataagcaacttgctgcagaaaaaagttttgccttgtattgcaagccagttgaattgtacaatattatccagaggcgagctattaaaaatccaccttttgttcaaagatcccttctatataagatacaggcaaggagaaaaaagaggctccaaccgcgcctcctcaagttacttcgcagcaatgccttcaaggcgaagcccgcgctcatcaccctcatcggcgcctgcgcggccatgggcgccaatgccgaagtcaccgcctccatcacgtgcctccgcgatgcaatcgctagcgatgactgggcagcgaggaaggccgcggcggaggcgcttgctgcattggccctagagcacacggatcttctcacgacctacaaatcctcttgcgtcaccttcttcgaggccagaaggtttgacaaggtcaaggttgtgcaagagtcgatgaaccagatgattgaggcggggaaggagatcccaggtgctgaagaggacgagtgctcctcgctctgccaccagcgtcccagtcacaacgaagatcttctcttacagggagtgcaagtgatgggcgatatccagctgcttcgctgggctcaaactcagttcctttagcaacaaggaagagcatattatctgtaagcagatcatctctgtctgacgtgtctaccagtgtaattttctggaccttctccaggtacacctcgtgtagcgattttctgactttcctgagtgaggcggcgctattggctttggtaggtctttctcatgatcatgttgtttgggtctgaaaatgctctgagtcgtagtctcgtaatgttatagtaacaataacatcatttttgtgaggatttgtctgaaaggagaacaactcaacatcaatcttggttatcaaccaagagtctaaactcctttgtcatgtgttatcgtttcaatcctgaactatgcattgttgtgggtcttgaagatctggttacaagcctacaacttaactgatatatatcacatgatgatgataatatgtatattcatggtgacacctttgctctttgaacatgttgtagtctattgtgtagttgcaaaagaatatgtgaattaccagtcagtggagattgagagggattccccggctagaagctcaagcggattaggaagtggctcatcttcatccagtggtacagtacagtggagcaaatgagtatctatcaccattaatgctgagttatcgatcaagtagctcgttaattcgttaaaattccttgcagattctgactctgatgttacagtttattttttcagtaaccagaggatgacaagcctactacaagagttggtcctaagttataaaataagcctaactttttttacagagtacacaaatgtcaggttttcctgtttgggctagcaccacaaatggaaacaaaaaattggactcagcccatcgtgaagatatgaaggaagagcactgtcccattattctgtttttcgaccatgtttctagcatgaacatgccagcatggtgccatcaacaacttccctgttagctcacggtacaccatgctccagcctgtcccctggttatcactgtggtgctgattgtgttcccaagatgcactgaaatagagcaagatcaaatgaggatgaagttactgtgtagagatttttgttccccctttgtagcagcacccatggatttttatttgcacagaattactctcttttactggttcattcaataattcaatttgttgcttggaaaccactgtataataaatacaaatgctatggtatgattttgtgaattctgatcgctccttttcttgtaagcatgaattc

SEQ ID NO: 216721 - DNA, 1711 bp, Zea Mays
catcgtcgcgcccccaccccatacgagccgcccccgcgacgctgaccccactgccgtccagcaggatctctcccttcccccgccccacgcctagcaggatctctcccttccctcgcgcgtccgagacgacatggacgaaggtgggaggctcccaacgcatccccgccgacctcaacgccgacggtcctttcctaacccgcagcccccggccacagtctctctcttccggtccagtgggggctgctagcttccaggaatattggagatgtgccttcaacactctagggctcgattgcctccagataagcaacttgctgcagaaaaaagttttgccttgtattgcaagccagttgaattgtacaatattatccagaggcgagctattaaaaatccaccttttgttcaaagatcccttctatataagatacaggcaaggagaaaaaagaggctccaaccgcgcctcctcaagttacttcgcagcaatgccttcaaggcgaagcccgcgctcatcaccctcatcggcgcctgcgcggccatgggcgccaatgccgaagtcaccgcctccatcacgtgcctccgcgatgcaatcgctagcgatgactgggcagcgaggaaggccgcggcggaggcgcttgctgcattggccctagagcacacggatcttctcacgacctacaaatcctcttgcgtcaccttcttcgaggccagaaggtttgacaaggtcaaggttgtgcaagagtcgatgaaccagatgattgaggcggggaaggagatcccaggtgctgaagaggacgagtgctcctcgctctgccaccagcgtcccagtcacaacgaagatcttctcttacagggagtgcaagtgatgggcgatatccagctgcttcgctgggctcaaactcagttcctttagcaacaaggaagagcatattatctgtaagcagatcatctctgtctgacgtgtctaccagtgtaattttctggaccttctccaggtacacctcgtgtagcgattttctgactttcctgagtgaggcggcgctattggctttgtctattgtgtagttgcaaaagaatatgtgaattaccagtcagtggagattgagagggattccccggctagaagctcaagcggattaggaagtggctcatcttcatccagtgtttattttttcagtaaccagaggatgacaagcctactacaagagttggtcctaagttataaaataagcctaactttttttacagagtacacaaatgtcaggttttcctgtttgggctagcaccacaaatggaaacaaaaaattggactcagcccatcgtgaagatatgaaggaagagcactgtcccattattctgtttttcgaccatgtttctagcatgaacatgccagcatggtgccatcaacaacttccctgttagctcacggtacaccatgctccagcctgtcccctggttatcactgtggtgctgattgtgttcccaagatgcactgaaatagagcaagatcaaatgaggatgaagttactgtgtagagatttttgttccccctttgtagcagcacccatggatttttatttgcacagaattactctcttttactggttcattcaataattcaatttgttgcttggaaaccactgtataataaatacaaatgctatggtatgattttgtgaattctgatcgctccttttcttgtaagcatgaattc

SEQ ID NO: 216722 - DNA, 1471 bp, Zea Mays
ctgggaactaggcaactataccactgccttagagatctgtacagcagcaccaacaaagccttttagtcccaagaatattggagatgtgccttcaacactctagggctcgattgcctccagataagcaacttgctgcagaaaaaagttttgccttgtattgcaagccagttgaattgtacaatattatccagaggcgagctattaaaaatccaccttttgttcaaagatcccttctatataagatacaggcaaggagaaaaaagaggctccaaccgcgcctcctcaagttacttcgcagcaatgccttcaaggcgaagcccgcgctcatcaccctcatcggcgcctgcgcggccatgggcgccaatgccgaagtcaccgcctccatcacgtgcctccgcgatgcaatcgctagcgatgactgggcagcgaggaaggccgcggcggaggcgcttgctgcattggccctagagcacacggatcttctcacgacctacaaatcctcttgcgtcaccttcttcgaggccagaaggtttgacaaggtcaaggttgtgcaagagtcgatgaaccagatgattgaggcggggaaggagatcccaggtgctgaagaggacgagtgctcctcgctctgccaccagcgtcccagtcacaacgaagatcttctcttacagggagtgcaagtgatgggcgatatccagctgcttcgctgggctcaaactcagttcctttagcaacaaggaagagcatattatctgtaagcagatcatctctgtctgacgtgtctaccagtgtaattttctggaccttctccagtctattgtgtagttgcaaaagaatatgtgaattaccagtcagtggagattgagagggattccccggctagaagctcaagcggattaggaagtggctcatcttcatccagtgtttattttttcagtaaccagaggatgacaagcctactacaagagttggtcctaagttataaaataagcctaactttttttacagagtacacaaatgtcaggttttcctgtttgggctagcaccacaaatggaaacaaaaaattggactcagcccatcgtgaagatatgaaggaagagcactgtcccattattctgtttttcgaccatgtttctagcatgaacatgccagcatggtgccatcaacaacttccctgttagctcacggtacaccatgctccagcctgtcccctggttatcactgtggtgctgattgtgttcccaagatgcactgaaatagagcaagatcaaatgaggatgaagttactgtgtagagatttttgttccccctttgtagcagcacccatggatttttatttgcacagaattactctcttttactggttcattcaataattcaatttgttgcttggaaaccactgtataataaatacaaatgctatggtatgattttgtgaattctgatcgctccttttcttgtaagcatgaattc

SEQ ID NO: 216723 - DNA, 1354 bp, Zea Mays
aaattcagagttttttcttttcttttctgtaggttgaactcatagctgatcttcatgttatccatgctagcaatgtattgcgtttattcatatttctcttttatagtagggtgggtatatgtgataaagcatgtattcgataaagcagatctttccaagtagggaactaaattgaaaattgtattttatgaactttatgtttagtttcatggatcagtttgaggcatagctaagtataatttatatgattacactcacatccacttggtgtttttaaaatgtttgcaacggtccactattgagttcgaaatactgaacctcaaactccttgtcaaggtacacctcgtgtagcgattttctgactttcctgagtgaggcggcgctattggctttggtaggtctttctcatgatcatgttgtttgggtctgaaaatgctctgagtcgtagtctcgtaatgttatagtaacaataacatcatttttgtgaggatttgtctgaaaggagaacaactcaacatcaatcttggttatcaaccaagagtctaaactcctttgtcatgtgttatcgtttcaatcctgaactatgcattgttgtgggtcttgaagatctggttacaagcctacaacttaactgatatatatcacatgatgatgataatatgtatattcatggtgacacctttgctctttgaacatgttgtagtctattgtgtagttgcaaaagaatatgtgaattaccagtcagtggagattgagagggattccccggctagaagctcaagcggattaggaagtggctcatcttcatccagtgtaaccagaggatgacaagcctactacaagagttggtcctaagttataaaataagcctaactttttttacagagtacacaaatgtcaggttttcctgtttgggctagcaccacaaatggaaacaaaaaattggactcagcccatcgtgaagatatgaaggaagagcactgtcccattattctgtttttcgaagaccatgtttctagcatgaacatgccagcatggtgccatcaacaacttccctgttagctcacggtacaccatgctccagcctgtcccctggttatcactgtggtgctgattgtgttcccaagatgcactgaaatagagcaagatcaaatgaggatgaagttactgtgtagagatttttgttccccctttgtagcagcacccatggatttttatttgcacagaattactctcttttactggttcattcaataattcaatttgttgcttggaaaccactgtataataaatacaaatgctatggtatgattttgtgaattctgatcgctccttttcttgtaagcatgaattc

SEQ ID NO: 216724 - DNA, 1058 bp, Zea Mays
aaattcagagttttttcttttcttttctgtaggttgaactcatagctgatcttcatgttatccatgctagcaatgtattgcgtttattcatatttctcttttatagtagggtgggtatatgtgataaagcatgtattcgataaagcagatctttccaagtagggaactaaattgaaaattgtattttatgaactttatgtttagtttcatggatcagtttgaggcatagctaagtataatttatatgattacactcacatccacttggtgtttttaaaatgtttgcaacggtccactattgagttcgaaatactgaacctcaaactccttgtcaaggtacacctcgtgtagcgattttctgactttcctgagtgaggcggcgctattggctttgtctattgtgtagttgcaaaagaatatgtgaattaccagtcagtggagattgagagggattccccggctagaagctcaagcggattaggaagtggctcatcttcatccagtgtttattttttcagtaaccagaggatgacaagcctactacaagagttggtcctaagttataaaataagcctaactttttttacagagtacacaaatgtcaggttttcctgtttgggctagcaccacaaatggaaacaaaaaattggactcagcccatcgtgaagatatgaaggaagagcactgtcccattattctgtttttcgaagaccatgtttctagcatgaacatgccagcatggtgccatcaacaacttccctgttagctcacggtacaccatgctccagcctgtcccctggttatcactgtggtgctgattgtgttcccaagatgcactgaaatagagcaagatcaaatgaggatgaagttactgtgtagagatttttgttccccctttgtagcagcacccatggatttttatttgcacagaattactctcttttactggttcattcaataattcaatttgttgcttggaaaccactgtataataaatacaaatgctatggtatgattttgtgaattctgatcgctccttttcttgtaagcatgaattc

SEQ ID NO: 216725 - DNA, 1042 bp, Zea Mays
aaattcagagttttttcttttcttttctgtaggttgaactcatagctgatcttcatgttatccatgctagcaatgtattgcgtttattcatatttctcttttatagtagggtgggtatatgtgataaagcatgtattcgataaagcagatctttccaagtagggaactaaattgaaaattgtattttatgaactttatgtttagtttcatggatcagtttgaggcatagctaagtataatttatatgattacactcacatccacttggtgtttttaaaatgtttgcaacggtccactattgagttcgaaatactgaacctcaaactccttgtcaaggtacacctcgtgtagcgattttctgactttcctgagtgaggcggcgctattggctttgtctattgtgtagttgcaaaagaatatgtgaattaccagtcagtggagattgagagggattccccggctagaagctcaagcggattaggaagtggctcatcttcatccagtgtaaccagaggatgacaagcctactacaagagttggtcctaagttataaaataagcctaactttttttacagagtacacaaatgtcaggttttcctgtttgggctagcaccacaaatggaaacaaaaaattggactcagcccatcgtgaagatatgaaggaagagcactgtcccattattctgtttttcgaccatgtttctagcatgaacatgccagcatggtgccatcaacaacttccctgttagctcacggtacaccatgctccagcctgtcccctggttatcactgtggtgctgattgtgttcccaagatgcactgaaatagagcaagatcaaatgaggatgaagttactgtgtagagatttttgttccccctttgtagcagcacccatggatttttatttgcacagaattactctcttttactggttcattcaataattcaatttgttgcttggaaaccactgtataataaatacaaatgctatggtatgattttgtgaattctgatcgctccttttcttgtaagcatgaattc

SEQ ID NO: 216726 - DNA, 2476 bp, Zea Mays
cttcaacgacgattcgggtgccccgcttgactcggacgacgacagctccgtccacggcggccacggatccgtgatgtcccatctcctggagcgcgaggccgacaccgccttccttccccactcggatcagcgggatggagttgaggcgtggttcatcctgcgccggtgcactcccgcctccttcaacgtcgcctccaccgaccccaacaacgaggtctcgagcgccgttaccgcggacgcgctcgctaaggccgcgcccgcgctcttcgcttcgagggcgcccagaccatcgctcaagtacctggagctgcttctcccggcagaaatcgacttcgaccacattgacctaccgactgctgccgccgcagggcacatcgtcgcccaggtcaccggcaacaacgcggtgtccgtggtggaggaccaactcaggtgcaccctcttgctcacgcgtaacttcctgtcaagccaccaccaggccgtcagcaaggagtgggacatggtcgccgtcgtgcacccagtgtgcaacctgggggaaaagtctattttggtactcaccatggattcgctgcatggcccaggagccatggcacaattcttgtcttcgatttttagcaataccttgtcctggaacaactcaatgtcgattgctgcttcatgctcaaccaacaccctttttgccaaggatgatggagattctatgaaccggtgtttcagttggtgttggaagcctccatggttacatccaggtcagtcgaaattcagagatttcctctggtggtctttttggtatttccaatttgtcaggtccaagtattatgggtgcagagcatcacaattactaactccttggacaccacctatgacattatgtttggttggcgatgaccttcttgtgatgctagttattccaagtatgctactgttatctcggtgctattttagtggagtagaatgtgtgctggcagctgcagatccgttattttctacatttcatgctgagagagagttgttctggaagccaccttggcaacatctagttcctaacaccagatctgagatacagttgttgatggagtttgtctatctcaatacaggagtctgccgttctctgcacatgattaataaattttctaagcaatactttgttggcctatctttgctaattacaagggaaaaatttatgtctgggagaataatgttggctcttcttccacttctgaagctatttacatcaggaggagcaaggattgtcaatgcttcctcacttgcgtcggagctgaagagaatgccaaatgagaagttgcgaaacgatttgagcaacattgacatctgggacgaggaccggatacaagcagtactcaacacattcttggaagacctgaggagcggtcggctggaagaggctgggtggcccgtgatgctaccagcctacagcctgtcgaaaatggtcatcaatctgtacaccaggatcatagcaaggaggtatccggagatgcgcatcaactgtgtgcgacctggatttgtcacgacggacatcagctggaatctgggggtcctgacgcctaaacaaggtgcgagagggccagtcatgctagctctcctcccagatgatggaccaacgggttggtacagagatgaaatgggcgataagatgggcagcctattatttttcaaaatggtcaagtattcatcactagtcgagggattttgtggtgtgcagttttcatttcctaatattcaattgtgcaagtcttggtcacaggagttagccaccaacacagaaagccatttactaccagaaatgctagaagcggccaatggttatatttgtcatgagcttcatcttatgcttacctctattggagtgacacatatgatcgattgtgttaaatatttgataggggttatcgacttgctaactccatgggatcctggcatagtggtcttcaacctcaagttcctgatgctttggcttgagggcaagccaaatcttaagaaggggggaatgtcagtactgatgagatggaaaacagtgtggtggctgatggcgggtcgcgtccgcctcgtgtgcatcatctgagcgatcgtgtatatgggccggaccgaagaaagtgacctgttgggcgcctgcgtgcgcgagaatagctggacctggtttggcagcttgtaagcaagtagtacttatgcattgcctgatggaagggtcaggattatcgaaaacatgaacaactatttcctctctgcagaagatactccatccttcctgtgatcttccctacctcttctcctgtatcttcctccactcctgctgtgtatcttcctccactcctgctgttcggttagggattagtgagtattgctaacacatggcctgcgtgccgagcgcgagtgggggagggagcgcgagtgggaacgccggcgctgaaaggaagacgaagaaacgacgacggatgtgtgcattcgctggagctgtgaa

SEQ ID NO: 216727 - DNA, 3761 bp, Zea Mays
atgaagcgggcgatcgtgagtgccggcgagggtggtgacacgcgagggcctgggggaaacgcccctggtgctagtgacggtggagaaagaagccctagtggatcacgaggtgaggagaaactctatcaaacatggtggatgaaagcgcatggagagtgggggaaagaaagcaaaaaagagaggaatctgtgggctaacatgtatgacgagaagatttgggatgtcgagatcggccctgagatcattgacgaggcgctccatcctgccaccgtaggccgtggcatcatcgagctcgatgtgtggcctgcacccagtcatgagcagattgtgcggcttgagaccccggtgtcggagagggcggacaaggatgagggcagggcacgtaacggagggagagagagcagcagttgcagccgccactacctcctctccagcttcgcgtccactcccctcaaaaccctaaacgcgctcaggaccctagttgtcatgtcgtaccgcggagggcgcgggggcggcgggcccaactcgcaccgcgggcgcgggcggggcggcggcggtggggcgggacgccgcggcggcggcgggggacgcggggagcagaggtggtgggacccggagtggcgagccgagcgcctccggcagatgcatggggaggtggaaaaggtcgatgagaatgaatggtggaacaagattgggcaattaagagaagggtcccagcaggagctagtagtcaagcggaattttggacgggatggacaaaatatacttgcaaacatggctcagagacaaggaatttactttaatgcatacaacaaagggaagacacttgttttcagcaaggtacccttacctgattatcgagcagatctggacgacaggcatggatcaacacaaaaggagattaagatgtctaatcagacagaggcgcgagtcgaagaccttttgtccaggtcaaagtggaacaacaattctgcaagcacatcaactgtctcaacgagacaaattttccctggcgcatcctcgtctgtagttgaaccagcagcaccaattgataaagaaaagctcagttcccagcttagggagttgcagaattcaaggaagacgacagcaagtgctagatcaatgcaatcttttagggagaaattacctgcattcagcatgagagaggggtttctgaaagcagtggcagccaatcaggttctggtcatttctggcgagacaggctgcggcaaaacaactcagcttccacagttcattctagaagaagaaataaacagcctccgcggtgctgattgcaacataatttgtactcagccccgccgtatatctgccatttcagtagcagcaagagtatctgctgagagaggtgaagaactcggcgaggctgttggataccagattcgccttgaatcaaaacggtctgcacaaacacggttgctgttctgcactactggagttttgcttagaagactggttcaagagcctgacttaattggggtgagtcatttactagttgacgaaattcatgaacgcggcatgaatgaagattttctcatcataatactgcgtgaccttctaccaagacgtccagatcttcgccttgtactgatgagtgcaactataaatgctgaactattttccatgtactttggagatgctccagtgatgcacatcccggggttcacttttcctgttgctgagttgtttctggaagatgttctagaaaagacacgttacaggatcaattccgaacgtgataattttgcaggtagttcaaggagaaagaggttttcatcagttaagagtgatccactatctgatgtttttgaggacattgacattactaaggagtatggaaattacagcagttcaacaaggcagtcccttgaagcttggtctgctgctgaactagatttgagccttgtggaaaatacaattgaatatatttgtcgctatgaagcagaaggtgcaatccttgtgttccttactggctgggatgaaatttcgaagcttctggacaagattaaagggaataatttccttggcagtcctaatagatttcttgttcttcctttgcatggttctatgccaactgtgaatcaacgcgaaatttttgacagaccaccagctaatatgagaaaaattgttttggcaaccaacattgcggagagtagtatcactatagatgatgttgtctatgtgattgattgtggtaaggccaaggagacaagctatgatgccttgaataagctcgcatgccttcttccgtcatggatatcaaaagcttctgctcatcagaggagaggtcgtgcaggccgcgttcagccaggtttttgctatcggctctatccaaagatcattcacgatgcaatgccacagtttcagttgcctgaaattctcaggactcctttgcaagagctatgccttaccatcaaaagcttacagcttggagcagtatcctcctttttagccaagtcactgcagccaccagatccactttctgttaagaatgctattgagcttcttaaaaccattggcgcactggatgatatggaggagctcacttctcttgggcgacatctctgtactctcccactggacccaaacatcgggaaaatgctgcttatgggatctgtattccagtgcctggatccagtattgacaattgctgctgctctcgcatatcgaaatccatttgtgctcccaatagatagaaaagaagaagctgatgctgtcaaaagatcatttgctggtgactcgtgcagtgatcacattgctcttgttaaggcgtttgtagcatggaaggatgctaaaaggagtggtagagaacgcactttctgttgggaaagttttctgtcccctatgaccctgaagatgatggacgacatgcgaaatcaattttttgatctactatctgatattgggtttgttagcaagacagcaggagtgaaggcatataaccgctatggtaatgatctggagatggtttgcgctgtcttgtgcgctgggctgtacccaaatgttgtgcaatgcaaaaggcgaggcaagaggactgctttctacaccaaagatgtgggaaaagtggacattcatccatcatcagtcaatgcattcgtaaaccaattcccgttacctttcttggtttacagtgagaaggtgaagactgctagcatttatgtaagggactcgacaaatatatcagactatgcccttctactctttggtggttcgcttagtccgagcaaaactggagaaggcattgagatgcttgggggttatcttcatttctcggctccaaagcgtaccatagagttgattcagaaattaagaggtgaattggacaaactccttcagaaaaagattgaggaacctggactcgacatcttttcgcaaggaaagggtgttgtggcggcagctgtagaactgctacacagtcaaaatttcgaccattagatgccaaatattacatgttatcaggacaagtttcacactagacgaaagcaaaatcagcgtattcttttgtaaatctcacctctgcgtgttagcatatttctgttgctttttttagaaaccagaatttgagcccagcaacaaccacaacgatatcgttgcggagaaaggacttatacaaggtgattctctgtctccgatcctctttaatatcgttgcggacatgttggctattttaattgagagagcaaagaataatgttgacctaaaaaaaatgaatttgaatccagtttgtttcactttttctctct

SEQ ID NO: 216728 - DNA, 402 bp, Zea Mays
ccccactagcgctcgttctatgttcgatctgtatcacgggaagcacatctgctggcctacaccagattcttccatggttgtattatcacaatgtcattggtgtttcacatttctttctattagttgaaggagaggctgcaaagccagctgtcacctctgttcttgaatctattcaggatgctagaatggattggatcattcacctcgatactgatgagttgattcatcaagctggtgcccgagagtactccctgaggcgattgcttttagatgttcctgacaacgttgacatggttatcttccccaattatgaaagcagcattgaccgtatgacattaaggatccttttactgagaaatgtttcctcatggtccattctccagcatacaatgtatagccagc

SEQ ID NO: 216729 - DNA, 813 bp, Zea Mays
atctgtatcacgggaagcacatctgctggcctacaccagattcttccatggttgtattatcacaatgtcattggtgtttcacatttctttctattagttgaaggagaggctgcaaagccagctgtcacctctgttcttgaatctattcaggatgctagaatggattggatcattcacctcgatactgatgagttgattcatcaagctggtgcccgagagtactccctgaggcgattgcttttagatgttcctgacaacgttgacatggttatcttccccaattatgaaagcagcattgaccgtatgacattaaggatccttttactgaggcctttataattgcatcgacagcaactgaggaggagatggggaactggtaccgggaacataactatgccccatggctatcattcgtggcctcaaggaacccgacgtctttaccaatgcagtaacatcagcgaaagcacagtcgaaaacgaagccgtcaaacatgggtctcggaaacaaggaggctatggatccaaccgaacgtaactgctggtcagtccacactggaaggtggtcacgagaggttacaggcaaccgtaagaaagatcttggaaatggtggacgcccaggaacaggaagaagcaatgccgccgaggccgtcccctggtttgctcgagctctcggaacgcgccactgctttgtcatgacgacttgacgacgctgtgaggttctggaggcgttattaagcatggactcgggttgtttaaccatgctaggtgatacagcgcccgatagggcgctattttttctagtgaatattcatat

SEQ ID NO: 216730 - DNA, 4387 bp, Zea Mays
ctcacgtgggggcggcaagcgcaggtttgctctctcgggcaaaggacttgggttacgtaattcttttccagagacgccgcctccctaaacccttgccagtctccctcccggcagcggcggcaaggcctaccgccgcaaaccctcttcctcagccgctgcgtacaaaagaagttagcttctttttaagtaggaggcgggagccctaggtagccccatggctccggcggacggcggcggcgagcagccgcacaaggcgcaccgccaacacaagtccggcgccaaggcgcggaagaagaagggcaagggcaagggcgacgccggcgatgacgcaggggggcagcagaagaaccccaaggcttttgcatttcagtcagcagccaaggcgaaacgtctacaagctcgatcagctgagattgaacaacggcgtcttcatgtgccaattatggaccgttccatcggtgaacctcctccttttgttgttgtagttcaaggacctccacaggttgggaagtcactgttgataaaatgtctggtaaagcactacaccaagcaaaacttgcccgaagttcgtggccccatcactgttgtatcaggtaaaagtaggagggtacagttcgtagagtgtccaaatgatatcaatggaatgattgatgctgctaaaatagccgatctcgctttattgcttattgatggaagctatggatttgaaatggatacatttgagtttcttaatatcatgcaagtccatggattccccaaggtgatgggagtgctcacacaccttgataaatttaaagacgtgaaaaaactccggaaaactaagcagcgccttaaacatcgattctgggctgagataaaagagggagcaaaattattctacttgtctggtctgattcatggaaaatacacgaaaagagaagttcataatcttgcaagattcatctctgtaatcaaacctatccaattgagttggcgcatggctcatccttatttgttagttgatagatttgaggatgtcacccctacagaaagtgtgcggttgaacagaaagtgtgacagaacaataacattgtatggttatctccgtggctgtaatatgaaaagagggaccaaggtgcatatcacaggggctggtgatttcagcttgtcaggggtgacgggtttaggtgatccttgccctttgccatcatctgcaaagaaaagaggattgcgtgacaaggaaaaactgttctatgcaccaatgtctggtcttggggatttgctttatgacaaggatgctgtttatattaatatcaatgatcatcttgttcagttttcaaaaagtgatgaaaatgatgcacccaaaaagcaagggaaaggtaaagatgtgggtgtggccctggtaaaaacacttcaaaacccaagatactcccttgatgaaaagttggagcaaagttttataaatttctttggtgggcgtcctgctgctcaatccaaagacagtgatgctcaaggcaatgtcatctctgcaagccaggataatcagagtgacacaaacattttgcagcaagtagatgatggtaacaatagcaatgcagtcaccatggagagcaatgaacattctgaaggctctagtgatagcgaaggggataatgatgatatccagctgagggatcgtgatgttgacttgagggaagaagtagaggtttgcaatggaagattgaggcgaagagctgtatctgctaattttcgagatgactttgatgatgagggtactgatgaagatgcaaatgatgatgaggattctggtgatgaccagttatctggagattctgcatcatcagcagatgatagtggagaagctagtgatccagaggatgaacttgagaacacttcaaaatggaaagaatcccttcttgcaagaacaatgtcccgacggagtgataatttgatgcaacttgtctatggactaccttcaacaaagctaggcagtgttgcagaagaaaatgatgatagtgaagccaacagctcagatgatgaatttttcagaccaaaaggacaaaagcagcaagcaaagaatgaatcaccgagctttggtgatattgatggtgaggattgctccaagtttttcaaagcagagttaaaagattggtctaatgaagatctcatcaaaagcatccgtgatcgttttgtgactggaaattggtcaaaagctactttgagaggacaggatacagatgatcgtggtgaggatgatgaggaaatgtatggagattttgaagatcttgaaactggtgaggtacatatggcccagacagatgaaaatgtggaagcgaaagatgacccagaagttgaagaaagaagacttaagaagcttgcacaaagagcgaaatttgatgcacaatatgatggttctgagttatctgacgatgaagttgatgatgttaagaagaaatccagacgagaacagtccaatgaagggggctattttgacaagctaaaggaggaaatggaactacgcaagcaaatgaatatatctgagctcaatgaccttgatgaagagactcgagtagacattgaaggattcaggactggtacttatgtcaggttagaagtacatggtgtgccatttgagcttgttgagcattttgatccttgccaccccattcttgttggggggattggccttggtgaggagaacacaggattcatgcaggctagtttgaagcgccataggtggcacaggaaagttctgaagacaaaggatccaatcatagtttcaattggttggaggcgatttcaaacaacccctgtgtatgcaatagaggatcggaatggtcgacaccgcatgctgaagtatacacctgagcatatgcattgctttgctatgttttggggaccacttgctccaccgaagagtggtgtattagcagtccagaatctttccaacaatcaggtgccatttaggataactgcaacaggatgggttcaagaattcaacaatactgccagaattgtgaagaagataaagctcacaggcacaccatgcaagatatttaagaagactgcactaatcaagggaatgttcacatccgatttagaggttgctaggtttgaaggtgctgccattcggactgtaagtggaatccgaggacaggttaaaaaggcagcaaagattgagccaggagatatgttgaagagaaaaggggaaaatacagaaggaatcgcaagatgtacatttgaggacagaattcttatgagtgacattgttttcctgcgtgcctgggtcaacgttgaagttcctacgtactctaaccctgtgaccactgctctgcaacctagagagcagacctggcaaggcatgagaacaactgctgagttgcggaaggcacacaatatccctaccccacacaacaaggattcagtttacaagcctatcgagcggaaaccacgcaagttcaatcccgtcgagatccccgcaaagctgcaacagttacttccctttaaatctaagcctaaggacacagcgaagcagaagaaagcaccagttgaaaacagggtgcctgtaatcatgcagcctagtgagaagaagacacacgcagctatacaacagctaaggctgataaaacacgagaaggcaaagaagaagaaaattaaggaacaacagaagaaaaaagcatacgaggcagagaaagccaagaccgagctactgacgaagaagcgccagagggaagagaggcgtgtgagataccgggaagaagataagcagaagaaacgtgcacgcagatgaggcgaggaacggggtatgtgcaccaggaactcagcagcaaccgggcatgctctcttgtgcagaacatatgccaaaatcttagttcatatacggagagctataaaaggtgcagtaccacccatctgggcgaagaagcatgtcaagtcataaccagggcgcggagatgagcaagttaggttgcttgtttaagttatgtatcggttgccctaacgcggaatattgtctgagtgtttggcaaacgcatgtggactcccaagtaaatttggagtcataattttggagtgtatactacctcaggtaccgaatgttaggcaaacgcatgtggtctttagctcccaagcaagtttggtttctatggatcaatttttagtccatctattttagtttctaaattactaaacacatgagctaaaaaaatatctctattttagttcctttgtttaatttagagattaaaatggaggtactaaaaattagtctatagaaaccaaacacctcttaatatgcttttgagccctgttctgtgagcctgtttcgtttgattttaatgtctctattgcttttattgtctctatatattgtagctgtagttgttcaaacaactgattttaatctgat

SEQ ID NO: 216731 - DNA, 4291 bp, Zea Mays
agacgccgcctccctaaacccttgccagtctccctcccggcagcggcggcaaggcctaccgccgcaaaccctcttcctcagccgctgcgtacaaaagaagttagcttctttttaagtaggaggcgggagccctaggtagccccatggctccggcggacggcggcggcgagcagccgcacaaggcgcaccgccaacacaagtccggcgccaaggcgcggaagaagaagggcaagggcaagggcgacgccggcgatgacgcaggggggcagcagaagaaccccaaggcttttgcatttcagtcagcagccaaggcgaaacgtctacaagctcgatcagctgagattgaacaacggcgtcttcatgtgccaattatggaccgttccatcggtgaacctcctccttttgttgttgtagttcaaggacctccacaggttgggaagtcactgttgataaaatgtctggtaaagcactacaccaagcaaaacttgcccgaagttcgtggccccatcactgttgtatcaggtaaaagtaggagggtacagttcgtagagtgtccaaatgatatcaatggaatgattgatgctgctaaaatagccgatctcgctttattgcttattgatggaagctatggatttgaaatggatacatttgagtttcttaatatcatgcaagtccatggattccccaaggtgatgggagtgctcacacaccttgataaatttaaagacgtgaaaaaactccggaaaactaagcagcgccttaaacatcgattctgggctgagataaaagagggagcaaaattattctacttgtctggtctgattcatggaaaatacacgaaaagagaagttcataatcttgcaagattcatctctgtaatcaaacctatccaattgagttggcgcatggctcatccttatttgttagttgatagatttgaggatgtcacccctacagaaagtgtgcggttgaacagaaagtgtgacagaacaataacattgtatggttatctccgtggctgtaatatgaaaagagggaccaaggtgcatatcacaggggctggtgatttcagcttgtcaggggtgacgggtttaggtgatccttgccctttgccatcatctgcaaagaaaagaggattgcgtgacaaggaaaaactgttctatgcaccaatgtctggtcttggggatttgctttatgacaaggatgctgtttatattaatatcaatgatcatcttgttcagttttcaaaaagtgatgaaaatgatgcacccaaaaagcaagggaaaggtaaagatgtgggtgtggccctggtaaaaacacttcaaaacccaagatactcccttgatgaaaagttggagcaaagttttataaatttctttggtgggcgtcctgctgctcaatccaaagacagtgatgctcaaggcaatgtcatctctgcaagccaggataatcagagtgacacaaacattttgcagcaagtagatgatggtaacaatagcaatgcagtcaccatggagagcaatgaacattctgaaggctctagtgatagcgaaggggataatgatgatatccagctgagggatcgtgatgttgacttgagggaagaagtagaggtttgcaatggaagattgaggcgaagagctgtatctgctaattttcgagatgactttgatgatgagggtactgatgaagatgcaaatgatgatgaggattctggtgatgaccagttatctggagattctgcatcatcagcagatgatagtggagaagctagtgatccagaggatgaacttgagaacacttcaaaatggaaagaatcccttcttgcaagaacaatgtcccgacggagtgataatttgatgcaacttgtctatggactaccttcaacaaagctaggcagtgttgcagaagaaaatgatgatagtgaagccaacagctcagatgatgaatttttcagaccaaaaggacaaaagcagcaagcaaagaatgaatcaccgagctttggtgatattgatggtgaggattgctccaagtttttcaaagcagagttaaaagattggtctaatgaagatctcatcaaaagcatccgtgatcgttttgtgactggaaattggtcaaaagctactttgagaggacaggatacagatgatcgtggtgaggatgatgaggaaatgtatggagattttgaagatcttgaaactggtgaggtacatatggcccagacagatgaaaatgtggaagcgaaagatgacccagaagttgaagaaagaagacttaagaagcttgcacaaagagcgaaatttgatgcacaatatgatggttctgagttatctgacgatgaagttgatgatgttaagaagaaatccagacgagaacagtccaatgaagggggctattttgacaagctaaaggaggaaatggaactacgcaagcaaatgaatatatctgagctcaatgaccttgatgaagagactcgagtagacattgaaggattcaggactggtacttatgtcaggttagaagtacatggtgtgccatttgagcttgttgagcattttgatccttgccaccccattcttgttggggggattggccttggtgaggagaacacaggattcatgcaggctagtttgaagcgccataggtggcacaggaaagttctgaagacaaaggatccaatcatagtttcaattggttggaggcgatttcaaacaacccctgtgtatgcaatagaggatcggaatggtcgacaccgcatgctgaagtatacacctgagcatatgcattgctttgctatgttttggggaccacttgctccaccgaagagtggtgtattagcagtccagaatctttccaacaatcaggtgccatttaggataactgcaacaggatgggttcaagaattcaacaatactgccagaattgtgaagaagataaagctcacaggcacaccatgcaagatatttaagaagactgcactaatcaagggaatgttcacatccgatttagaggttgctaggtttgaaggtgctgccattcggactgtaagtggaatccgaggacaggttaaaaaggcagcaaagattgagccaggagatatgttgaagagaaaaggggaaaatacagaaggaatcgcaagatgtacatttgaggacagaattcttatgagtgacattgttttcctgcgtgcctgggtcaacgttgaagttcctacgtactctaaccctgtgaccactgctctgcaacctagagagcagacctggcaaggcatgagaacaactgctgagttgcggaaggcacacaatatccctaccccacacaacaaggattcagtttacaagcctatcgagcggaaaccacgcaagttcaatcccgtcgagatccccgcaaagctgcaacagttacttccctttaaatctaagcctaaggacacagcgaagcagaagaaagcaccagttgaaaacagggtgcctgtaatcatgcagcctagtgagaagaagacacacgcagctatacaacagcaaagaagaagaaaattaaggaacaacagaagaaaaaagcatacgaggcagagaaagccaagaccgagctactgacgaagaagcgccagagggaagagaggcgtgtgagataccgggaagaagataagcagaagaaacgtgcacgcagatgaggcgaggaacggggtatgtgcaccaggaactcagcagcaaccgggcatgctctcttgtgcagaacatatgccaaaatcttagttcatatacggagagctataaaaggtgcagtaccacccatctgggcgaagaagcatgtcaagtcataaccagggcgcggagatgagcaagttaggttgcttgtttaagttatgtatcggttgccctaacgcggaatattgtctgagtgtttggcaaacgcatgtggactcccaagtaaatttggagtcataattttggagtgtatactacctcaggtaccgaatgttaggcaaacgcatgtggtctttagctcccaagcaagtttggtttctatggatcaatttttagtccatctattttagtttctaaattactaaacacatgagctaaaaaaatatctctattttagttcctttgtttaatttagagattaaaatggaggtactaaaaattagtctatagaaaccaaacacctcttaatatgcttttgagccctgttctgtgagcctgtttcgtttgattttaatgtctctattgcttttattgtctctatatattgtagctgtagttgttcaaacaactgattttaatctgat

SEQ ID NO: 216732 - DNA, 4281 bp, Zea Mays
cgcctccctaaacccttgccagtctccctcccggcagcggcggcaaggcctaccgccgcaaaccctcttcctcagccgctgcgtacaaaagaagttagcttctttttaagtaggaggcgggagccctaggtagccccatggctccggcggacggcggcggcgagcagccgcacaaggcgcaccgccaacacaagtccggcgccaaggcgcggaagaagaagggcaagggcaagggcgacgccggcgatgacgcaggggggcagcagaagaaccccaaggcttttgcatttcagtcagcagccaaggcgaaacgtctacaagctcgatcagctgagattgaacaacggcgtcttcatgtgccaattatggaccgttccatcggtgaacctcctccttttgttgttgtagttcaaggacctccacaggttgggaagtcactgttgataaaatgtctggtaaagcactacaccaagcaaaacttgcccgaagttcgtggccccatcactgttgtatcaggatacatttgagtttcttaatatcatgcaagtccatggattccccaaggtgatgggagtgctcacacaccttgataaatttaaagacgtgaaaaaactccggaaaactaagcagcgccttaaacatcgattctgggctgagataaaagagggagcaaaattattctacttgtctggtctgattcatggaaaatacacgaaaagagaagttcataatcttgcaagattcatctctgtaatcaaacctatccaattgagttggcgcatggctcatccttatttgttagttgatagatttgaggatgtcacccctacagaaagtgtgcggttgaacagaaagtgtgacagaacaataacattgtatggttatctccgtggctgtaatatgaaaagagggaccaaggtgcatatcacaggggctggtgatttcagcttgtcaggggtgacgggtttaggtgatccttgccctttgccatcatctgcaaagaaaagaggattgcgtgacaaggaaaaactgttctatgcaccaatgtctggtcttggggatttgctttatgacaaggatgctgtttatattaatatcaatgatcatcttgttcagttttcaaaaagtgatgaaaatgatgcacccaaaaagcaagggaaaggtaaagatgtgggtgtggccctggtaaaaacacttcaaaacccaagatactcccttgatgaaaagttggagcaaagttttataaatttctttggtgggcgtcctgctgctcaatccaaagacagtgatgctcaaggcaatgtcatctctgcaagccaggataatcagagtgacacaaacattttgcagcaagtagatgatggtaacaatagcaatgcagtcaccatggagagcaatgaacattctgaaggctctagtgatagcgaaggggataatgatgatatccagctgagggatcgtgatgttgacttgagggaagaagtagaggtttgcaatggaagattgaggcgaagagctgtatctgctaattttcgagatgactttgatgatgagggtactgatgaagatgcaaatgatgatgaggattctggtgatgaccagttatctggagattctgcatcatcagcagatgatagtggagaagctagtgatccagaggatgaacttgagaacacttcaaaatggaaagaatcccttcttgcaagaacaatgtcccgacggagtgataatttgatgcaacttgtctatggactaccttcaacaaagctaggcagtgttgcagaagaaaatgatgatagtgaagccaacagctcagatgatgaatttttcagaccaaaaggacaaaagcagcaagcaaagaatgaatcaccgagctttggtgatattgatggtgaggattgctccaagtttttcaaagcagagttaaaagattggtctaatgaagatctcatcaaaagcatccgtgatcgttttgtgactggaaattggtcaaaagctactttgagaggacaggatacagatgatcgtggtgaggatgatgaggaaatgtatggagattttgaagatcttgaaactggtgaggtacatatggcccagacagatgaaaatgtggaagcgaaagatgacccagaagttgaagaaagaagacttaagaagcttgcacaaagagcgaaatttgatgcacaatatgatggttctgagttatctgacgatgaagttgatgatgttaagaagaaatccagacgagaacagtccaatgaagggggctattttgacaagctaaaggaggaaatggaactacgcaagcaaatgaatatatctgagctcaatgaccttgatgaagagactcgagtagacattgaaggattcaggactggtacttatgtcaggttagaagtacatggtgtgccatttgagcttgttgagcattttgatccttgccaccccattcttgttggggggattggccttggtgaggagaacacaggattcatgcaggctagtttgaagcgccataggtggcacaggaaagttctgaagacaaaggatccaatcatagtttcaattggttggaggcgatttcaaacaacccctgtgtatgcaatagaggatcggaatggtcgacaccgcatgctgaagtatacacctgagcatatgcattgctttgctatgttttggggaccacttgctccaccgaagagtggtgtattagcagtccagaatctttccaacaatcaggtgccatttaggataactgcaacaggatgggttcaagaattcaacaatactgccagaattgtgaagaagataaagctcacaggcacaccatgcaagatatttaagaagactgcactaatcaagggaatgttcacatccgatttagaggttgctaggtttgaaggtgctgccattcggactgtaagtggaatccgaggacaggttaaaaaggtaatgagtaaataccatgccttgatagtttatcacggttaaatgtaactgttaaacgtaagcatgcaaatagtttcttgttcattacaggcagcaaagattgagccaggagatatgttgaagagaaaaggggaaaatacagaaggaatcgcaagatgtacatttgaggacagaattcttatgagtgacattgttttcctgcgtgcctgggtcaacgttgaagttcctacgtactctaaccctgtgaccactgctctgcaacctagagagcagacctggcaaggcatgagaacaactgctgagttgcggaaggcacacaatatccctaccccacacaacaaggattcagtttacaagcctatcgagcggaaaccacgcaagttcaatcccgtcgagatccccgcaaagctgcaacagttacttccctttaaatctaagcctaaggacacagcgaagcagaagaaagcaccagttgaaaacagggtgcctgtaatcatgcagcctagtgagaagaagacacacgcagctatacaacagctaaggctgataaaacacgagaaggcaaagaagaagaaaattaaggaacaacagaagaaaaaagcatacgaggcagagaaagccaagaccgagctactgacgaagaagcgccagagggaagagaggcgtgtgagataccgggaagaagataagcagaagaaacgtgcacgcagatgaggcgaggaacggggtatgtgcaccaggaactcagcagcaaccgggcatgctctcttgtgcagaacatatgccaaaatcttagttcatatacggagagctataaaaggtgcagtaccacccatctgggcgaagaagcatgtcaagtcataaccagggcgcggagatgagcaagttaggttgcttgtttaagttatgtatcggttgccctaacgcggaatattgtctgagtgtttggcaaacgcatgtggactcccaagtaaatttggagtcataattttggagtgtatactacctcaggtaccgaatgttaggcaaacgcatgtggtctttagctcccaagcaagtttggtttctatggatcaatttttagtccatctattttagtttctaaattactaaacacatgagctaaaaaaatatctctattttagttcctttgtttaatttagagattaaaatggaggtactaaaaattagtctatagaaaccaaacacctcttaatatgcttttgagccctgttctgtgagcctgtttcgtttgattttaatgtctctattgcttttattgtctctatatattgtagctgtagttgttcaaacaactgattttaatctgat

SEQ ID NO: 216733 - DNA, 4410 bp, Zea Mays
cgcctccctaaacccttgccagtctccctcccggcagcggcggcaaggcctaccgccgcaaaccctcttcctcagccgctgcgtacaaaagaagttagcttctttttaagtaggaggcgggagccctaggtagccccatggctccggcggacggcggcggcgagcagccgcacaaggcgcaccgccaacacaagtccggcgccaaggcgcggaagaagaagggcaagggcaagggcgacgccggcgatgacgcaggggggcagcagaagaaccccaaggcttttgcatttcagtcagcagccaaggcgaaacgtctacaagctcgatcagctgagattgaacaacggcgtcttcatgtgccaattatggaccgttccatcggtgaacctcctccttttgttgttgtagttcaaggacctccacaggttgggaagtcactgttgataaaatgtctggtaaagcactacaccaagcaaaacttgcccgaagttcgtggccccatcactgttgtatcaggtaaaagtaggagggtacagttcgtagagtgtccaaatgatatcaatggaatgattgatgctgctaaaatagccgatctcgctttattgcttattgatggaagctatggatttgaaatggatacatttgagtttcttaatatcatgcaagtccatggattccccaaggtgatgggagtgctcacacaccttgataaatttaaagacgtgaaaaaactccggaaaactaagcagcgccttaaacatcgattctgggctgagataaaagagggagcaaaattattctacttgtctggtctgattcatggaaaatacacgaaaagagaagttcataatcttgcaagattcatctctgtaatcaaacctatccaattgagttggcgcatggctcatccttatttgttagttgatagatttgaggatgtcacccctacagaaagtgtgcggttgaacagaaagtgtgacagaacaataacattgtatggttatctccgtggctgtaatatgaaaagagggaccaaggtgcatatcacaggggctggtgatttcagcttgtcaggggtgacgggtttaggtgatccttgccctttgccatcatctgcaaagaaaagaggattgcgtgacaaggaaaaactgttctatgcaccaatgtctggtcttggggatttgctttatgacaaggatgctgtttatattaatatcaatgatcatcttgttcagttttcaaaaagtgatgaaaatgatgcacccaaaaagcaagggaaaggtaaagatgtgggtgtggccctggtaaaaacacttcaaaacccaagatactcccttgatgaaaagttggagcaaagttttataaatttctttggtgggcgtcctgctgctcaatccaaagacagtgatgctcaaggcaatgtcatctctgcaagccaggataatcagagtgacacaaacattttgcagcaagtagatgatggtaacaatagcaatgcagtcaccatggagagcaatgaacattctgaaggctctagtgatagcgaaggggataatgatgatatccagctgagggatcgtgatgttgacttgagggaagaagtagaggtttgcaatggaagattgaggcgaagagctgtatctgctaattttcgagatgactttgatgatgagggtactgatgaagatgcaaatgatgatgaggattctggtgatgaccagttatctggagattctgcatcatcagcagatgatagtggagaagctagtgatccagaggatgaacttgagaacacttcaaaatggaaagaatcccttcttgcaagaacaatgtcccgacggagtgataatttgatgcaacttgtctatggactaccttcaacaaagctaggcagtgttgcagaagaaaatgatgatagtgaagccaacagctcagatgatgaatttttcagaccaaaaggacaaaagcagcaagcaaagaatgaatcaccgagctttggtgatattgatggtgaggattgctccaagtttttcaaagcagagttaaaagattggtctaatgaagatctcatcaaaagcatccgtgatcgttttgtgactggaaattggtcaaaagctactttgagaggacaggatacagatgatcgtggtgaggatgatgaggaaatgtatggagattttgaagatcttgaaactggtgaggtacatatggcccagacagatgaaaatgtggaagcgaaagatgacccagaagttgaagaaagaagacttaagaagcttgcacaaagagcgaaatttgatgcacaatatgatggttctgagttatctgacgatgaagttgatgatgttaagaagaaatccagacgagaacagtccaatgaagggggctattttgacaagctaaaggaggaaatggaactacgcaagcaaatgaatatatctgagctcaatgaccttgatgaagagactcgagtagacattgaaggattcaggactggtacttatgtcaggttagaagtacatggtgtgccatttgagcttgttgagcattttgatccttgccaccccattcttgttggggggattggccttggtgaggagaacacaggattcatgcaggctagtttgaagcgccataggtggcacaggaaagttctgaagacaaaggatccaatcatagtttcaattggttggaggcgatttcaaacaacccctgtgtatgcaatagaggatcggaatggtcgacaccgcatgctgaagtatacacctgagcatatgcattgctttgctatgttttggggaccacttgctccaccgaagagtggtgtattagcagtccagaatctttccaacaatcaggtgccatttaggataactgcaacaggatgggttcaagaattcaacaatactgccagaattgtgaagaagataaagctcacaggcacaccatgcaagatatttaagaagactgcactaatcaagggaatgttcacatccgatttagaggttgctaggtttgaaggtgctgccattcggactgtaagtggaatccgaggacaggttaaaaagtttcttgttcattacaggcagcaaagattgagccaggagatatgttgaagagaaaaggggaaaatacagaaggaatcgcaagatgtacatttgaggacagaattcttatgagtgacattgttttcctgcgtgcctgggtcaacgttgaagttcctacgtactctaaccctgtgaccactgctctgcaacctagagagcagacctggcaaggcatgagaacaactgctgagttgcggaaggcacacaatatccctaccccacacaacaaggattcagtttacaagcctatcgagcggaaaccacgcaagttcaatcccgtcgagatccccgcaaagctgcaacagttacttccctttaaatctaagcctaaggacacagcgaagcagaagaaagcaccagttgaaaacagggtgcctgtaatcatgcagcctagtgagaagaagacacacgcagctatacaacagctaaggctgataaaacacgagaaggcaatgccttaatcacacagcagccagctctactgccagccgttgttctgcctctttctcatgatttccttgtatcctcgcaggcaaagaagaagaaaattaaggaacaacagaagaaaaaagcatacgaggcagagaaagccaagaccgagctactgacgaagaagcgccagagggaagagaggcgtgtgagataccgggaagaagataagcagaagaaacgtgcacgcagatgaggcgaggaacggggtatgtgcaccaggaactcagcagcaaccgggcatgctctcttgtgcagaacatatgccaaaatcttagttcatatacggagagctataaaaggtgcagtaccacccatctgggcgaagaagcatgtcaagtcataaccagggcgcggagatgagcaagttaggttgcttgtttaagttatgtatcggttgccctaacgcggaatattgtctgagtgtttggcaaacgcatgtggactcccaagtaaatttggagtcataattttggagtgtatactacctcaggtaccgaatgttaggcaaacgcatgtggtctttagctcccaagcaagtttggtttctatggatcaatttttagtccatctattttagtttctaaattactaaacacatgagctaaaaaaatatctctattttagttcctttgtttaatttagagattaaaatggaggtactaaaaattagtctatagaaaccaaacacctcttaatatgcttttgagccctgttctgtgagcctgtttcgtttgattttaatgtctctattgcttttattgtctctatatattgtagctgtagttgttcaaacaactgattttaatctgat

SEQ ID NO: 216734 - DNA, 2318 bp, Zea Mays
ctagtctcccgcggggttcctattcctagcctagcgacgcgcacggttccattccatggccgcggccgcaaccacgtccacgaccacggcaaccatcccacccggcccgcaccgcaggcgccagcccaacgacatcgagcgcgacgacgacacctgctgcggcggagccggcgtcgatcgccgcttcccccacgcctgcggcgcgcaacacgacgacgacgccgagcgcggcctccaccacgccgccgctgccacgccctgcggcgggactagggcgctgctgttggcgcggaggaggcgagcgtgggccaccgcggcagcggcagcagcaggcgcgccgccccggacggcctgggcctggacgaggggcgtcgtgctctgcctcctcgccctcgccgcggtcgtcgtcgggttccagctgggctcgcaccggggcggcgggagcacggacgcgggcgccggcggtgacggcggcgtcaggctcttgcacttgcacagggtggagacggccgacgccgatgtcgtcatggagtggacggaggagaacctgtcggcacttgcgcgccgctcgcctcagccgccggttcggttacgctttcttaaaccaggacatgcttactccagggaaaaacaatgcgactgccggttacctggtcgttgatgcgaacggtggcctaaaccagatgagaatgggaataagtgatatggttgcagtggcgaagatcatgaacgcgtcgctggtgatccctactctggatcatcagtcattctggaccgacccaagcgatttcagagatatattcgacatcgaccacttcaaggagtcgttgaaggaagacattgtgatcgtggattcgctaccactggattatagaagggcgaaaccctacgtgagagcacccacctcctggtccagggcttctttctatagagactgcgcgaaagtcctgaggaagttcaaagtggtgaggtttacccacacggattcacggatcgtgaacaacggcctcgctccttctctgcaaaagctccggtgccgcgcgaattacagggcgctccagtacaggaaggagatccaagggctcggcagcactctggtggatcggctgaggaatgggtccgccgagcattacatcgcgctccacctaagatacgagaaggacatgctggccttcaccgggtgcaaccacaacctgacgctgcgcgaggcagcggagctgacgggcatgcggttcaaggtgcggcgctggaaggagaaggacatcgacagcgaggagaagcggctgcagggcgggtgccccatgacgccccgcgaggcggccgtgttccttaaggctatggggtacccctccgccaccaacatctacatcgtggccggcgagatatacggggagcatagcctggacgcgctcaaggctgagtaccccaacacctacacgcactacagcctcgccacggtggacgagctggagccactggagctctaccagaacaggctcgccgccgtggactacatcgtcgccctgcagagcgacgtgttcgtctacacgtacgacggcaacatggcaagggccgtgcaagggcacaggagatttgaagggttcagaaaaaccataaaccctgacaggctgaagtttgtggagcttattgacaagctggatgaaggttccatgtcctggagtgagttccagatcgtggtgaggaagcaccatgagaacagactgggaggtccatatgagaggttgcgtggtgcaagtccaaggcaggaggaatacttctactcaaatccggtccccggatgcctctgcaaaagggttcagagtagatgatacggatctatctggattgagttgaaattgtttagcctggttgatacgtgtccacgatgttcagtgtgatgagtgattgtcaaagagaccatcatctttgattcagtttgagactaaccatgacgtgagtatgtggtgttgtgcaccatgtctcttgatttgtggtacgcagatctggagtacaagagcgatcgaagccaatggtgaaggttaagtgattcgtacttatgaactggaagcggcaaaggacgaacaacaccattagacttggacgagtgaggggctaccgtgggtggccgacatttgtggatatcgatgaaaagtgctcatgaagaagtagatcatgttgactaagtcaaaacaatgattgatagtggatgcgccggatgacttgagtgatcgtgtggtcgtggaaaaccacagtctatgtgtaagtcggaccttgttgatcttggcaataaacaaattgaattggatgttgaattaggc

SEQ ID NO: 216735 - DNA, 2350 bp, Zea Mays
ctagtctcccgcggggttcctattcctagcctagcgacgcgcacggttccattccatggccgcggccgcaaccacgtccacgaccacggcaaccatcccacccggcccgcaccgcaggcgccagcccaacgacatcgagcgcgacgacgacacctgctgcggcggagccggcgtcgatcgccgcttcccccacgcctgcggcgcgcaacacgacgacgacgccgagcgcggcctccaccacgccgccgctgccacgccctgcggcgggactagggcgctgctgttggcgcggaggaggcgagcgtgggccaccgcggcagcggcagcagcaggcgcgccgccccggacggcctgggcctggacgaggggcgtcgtgctctgcctcctcgccctcgccgcggtcgtcgtcgggttccagctgggctcgcaccggggcggcgggagcacggacgcgggcgccggcggtgacggcggcgtcaggctcttgcacttgcacagggtggagacggccgacgccgatgtcgtcatggagtggacggaggagaacctgtcggcacttgcgcgccgctcgcctcagccgccggtacccgagatatggacgaaaccagacagcgagggttacagccagtgcattgaacggccgaagaatcaccgcaggaaaaacaatgcgactgccggttacctggtcgttgatgcgaacggtggcctaaaccagatgagaatgggaataagtgatatggttgcagtggcgaagatcatgaacgcgtcgctggtgatccctactctggatcatcagtcattctggaccgacccaagcgatttcagagatatattcgacatcgaccacttcaaggagtcgttgaaggaagacattgtgatcgtggattcgctaccactggattatagaagggcgaaaccctacgtgagagcacccacctcctggtccagggcttctttctatagagactgcgcgaaagtcctgaggaagttcaaagtggtgaggtttacccacacggattcacggatcgtgaacaacggcctcgctccttctctgcaaaagctccggtgccgcgcgaattacagggcgctccagtacaggaaggagatccaagggctcggcagcactctggtggatcggctgaggaatgggtccgccgagcattacatcgcgctccacctaagatacgagaaggacatgctggccttcaccgggtgcaaccacaacctgacgctgcgcgaggcagcggagctgacgggcatgcggttcaaggtgcggcgctggaaggagaaggacatcgacagcgaggagaagcggctgcagggcgggtgccccatgacgccccgcgaggcggccgtgttccttaaggctatggggtacccctccgccaccaacatctacatcgtggccggcgagatatacggggagcatagcctggacgcgctcaaggctgagtaccccaacacctacacgcactacagcctcgccacggtggacgagctggagccactggagctctaccagaacaggctcgccgccgtggactacatcgtcgccctgcagagcgacgtgttcgtctacacgtacgacggcaacatggcaagggccgtgcaagggcacaggagatttgaagggttcagaaaaaccataaaccctgacaggctgaagtttgtggagcttattgacaagctggatgaaggttccatgtcctggagtgagttccagatcgtggtgaggaagcaccatgagaacagactgggaggtccatatgagaggttgcgtggtgcaagtccaaggcaggaggaatacttctactcaaatccggtccccggatgcctctgcaaaagggttcagagtagatgatacggatctatctggattgagttgaaattgtttagcctggttgatacgtgtccacgatgttcagtgtgatgagtgattgtcaaagagaccatcatctttgattcagtttgagactaaccatgacgtgagtatgtggtgttgtgcaccatgtctcttgatttgtggtacgcagatctggagtacaagagcgatcgaagccaatggtgaaggttaagtgattcgtacttatgaactggaagcggcaaaggacgaacaacaccattagacttggacgagtgaggggctaccgtgggtggccgacatttgtggatatcgatgaaaagtgctcatgaagaagtagatcatgttgactaagtcaaaacaatgattgatagtggatgcgccggatgacttgagtgatcgtgtggtcgtggaaaaccacagtctatgtgtaagtcggaccttgttgatcttggcaataaacaaattgaattggatgttgaattaggc

SEQ ID NO: 216736 - DNA, 1873 bp, Zea Mays
cgcccgcgctcgagtgtcactcgcgagtgcccgcagacccccgatgttgccgctgggttgcattaattgcatgcatggaacaataaaccgtgccaacctgctggttgagacttgagagagagagagagagagagatcagagatagagagaagagagcgaggaggaagacagagatcagcggcggaccggcggcgtggcaggagatcgaggcggccgacccatgtgcttatgccccgttacgacggcagcagcatcgtgcgcgcgtgactgatccgccgaagcagacaccgcgtaccatggaagcgcggccgcggctgctcctagtcgccgccgtggcggtcttcgtgtcagtgtccgccgccgccggggcggccgtcgtcataaacgtgaagaactacggggcccatgggaatggcgtcaacgatgataccaagccgctgatggcagcgtggaaggcagcgtgcggatcagctggcgcggtgacgatggtcgtcgcgccggggacgtactacatcgggccggtgcagttccacggcccctgcaaggcgtccaccttgaccttccagctgcaggggacgctcaaggccgccacggacctgaagcggttcggcaacgactggatcgagttcgggtgggtgaacgggctgaccgtcgccggcggcgtcatcgacggccagggcgccgcctcgtggcctttcaacaagtgccccatccgcaaggactgcaaagtgctgcccacgaacacggtggtgcgcgacgtgacgtcggtgaaccccaagttcttccacatggcgctgctgtcggtgaagaacgtccggatgagcgggctgaggatccgagcgccgcccaacagccccaacacggacggcatccacatcgagcgcagcagcggggtgtccatcgtggacacgcacatcggcacgggcgacgactgcatctccgtcggccagggaaacgacaacgtggaggtctcccgcgtgcagtgcggcccgggccacggcatgagcgtcggcagcctgggccgatactccggcgagggcgacgtcacgcgggtgcacgtccgcgacatgaccttcacgggcaccaccaacggcgtccgcatcaagacctgggagaactcgccgtccaggagcaacgccgcgcacatggtcttcgagaacatggtcatgaaggacgtccagaaccctatcatcatcgaccagaagtactgcccctactacaactgcgagcacaagtacgtgtccggggtcactctcaaggacattcacttcaggaacatcaagggcacggcgactacgccggtggcggtgttgcttcgctgcggcgtgccgtgccagggtctggtgctgcaggacgtggaccttaggtacaaggggcagggtgccacatcggccaagtgcgagaacgccaaggccaagtacgttggctaccagttccccaagccctgcagcccctagcttagataggtgtcgtcgtgtggcgcgaggagatcctctccgtggccggccggccggccccgcttaccactctggtgtacctggctctagctagctagctccagtgtgcggtgaagtgggctttgattcttccatcgtgttgtctagacgtacgtttttcttttggcttttcatgtttgctttcttgattagctgatttttgtgttatgtgtaatcgcaatttctgtcatctgctagttgcctgcatcagtgaattgtgacttcagttggtaaaacctaactcatggttcagttgttaacttgcttgtggcttctatgatgcatgtgctagataagattaccatcccatgtgtgagttattcaatccatgcatctcaattgtcaaatgagctagaagttttacatctaagttaaac

SEQ ID NO: 216737 - DNA, 1000 bp, Zea Mays
cgtatgttttgtcacgcgaggtcgttcagggcgtattaggttaatggaagtggccaattctgtggcgtggctgagatgattggacctgtcgatttcgacagaagtgttgattactggcagcaggataagtggagtggccagttccctgtgaagtggcacataattaaggatgtaccgaacaatcttctgcggcacatcattcttgagaacaatgacaataaacctgtcacaaatagcagggacacacaggaggtgtccctagaaaggccacagtgctacaacaaccaacaggttcaattaggttggcatgatgctggtacctatgacaagaacattatcgagtggcccaagtgcagtggcgctaatggtagcttgagattcaaagtcgagttgaagcatggggccaatgctgatcttgtgaatgctatgaagctgatcccgccttcaacgacgtccgaaccccatccgcgatccatgtctgccgcgccatcctcgcccttccatctcagcgcccccattcgtgcttgaaggaaggcccattcgtgttggaacgaatcctcgctcaaaatccatgcgcatccgatgaggatccagagctgccctgctgcccttccatcctctttgtccctttccatcgtcggcgatccacttctatcggcggcgcccccttctagccccttccatagttgtgcttaggtacttctctctatttgtgaaatctagggttcttagtgtacgattgtcaatatctctataaaagaatagattagtgtacgattgtcgatatattgtttgttttcatgtaattgttgtgcactcgcgttttattaataatttgtgagtcgtcgcaacgcacagatacctaacagataatttgtgagtcgatatatctgtatgatattgatggttgcaatgtagtggtgaaacgagtagattaaaataacaaaatttatatgtatagccaggatcaccaatggattacagaatcttttctcataac

SEQ ID NO: 216738 - DNA, 2967 bp, Zea Mays
ccccacgccgctctcccccttcacccaccagccccccaaatctcacgggctcacgacgatagacccgccctctgtgccacaaaggagctcctctccatcccatctccaacgtcgccccaacccccatcaccgacagggaacccacctctcacgtcgacaccgccagaggaggagatggtggagatacgggcgttgcgatccgaggcagcacgctagagcgacgagagcgtggcgacgtggagatcatgggagtcctgcgcagcgtcgcggcgaggcgcccgtcggggaggcagcgggcacggagagagcggagagtgacggcgacaacgggtcccgcctgtcgcgcgaaccagggaaatatctacatctcgtctgcgccgccgctgggatttattagggttctacttctagcccaggccaactccacaccaatccaatcctggggcgggcgactgcctccttccctcgatttgacgtgcgcttcctcttcctcgctcgctctcggtcgcagtcacaggcccacaacacaagcaactttcttattactgtcggggttccgaagccaacaaaaggacgcatcattccaactaactttcagagcagcgcagcgtgtcttgctttgttggtgccttgcaaaccgcaggaagtatctttgatatataaaaatgagaaataggccaaggagtatgctatcacgatgagccgcccagatatatatatcgtgtgcctccgtcacatcgtgctagctggttcttttcttcatgaggcatatagggtatttattcaaatgcccgcaaagggagggcagtgcactgagtgcatcgggagggctcatagttcttctttgactgcaagggataggcagcaggttcgctgggctgcaactggtgttctccttcacgtcgttgcgcgtgacgagggttggcgaggcgaggaagcgtgctcttgatcccgagtttaaagagggcgggcaacataattggaagcaagttttgtcaaatagcggtattgcaagtatctcggttgtgttgatagcattagtcatcagagggatagataggtgtttagattcaaaagagtcaactcttgttactgctcttattgatggtgttatctgacattatgcttgctataatggagatacatggtcatctgagctcgacattctttgtaaagctaagccacaaattatcacaacattcaagagtgcggaaggctaccattggtggtgtaaccatagatgggcttcttgtagcagcagctggattcttgattgggcttgcatttgtgctgataagatttttcaccactcaatgtgctcctgatgtattctggaaccagctgctagctatacccttggcacagctgccgccctatgtagaagtttgatcgattccttcttgagcgcaacagttcagtatagtgggttctacagtgttcgcaaaaaggtaaagccaacaaagttcaatatttaaaataactcgatgtgtccagggtttgcaagacaagattaagcagctctaagattaagatagttgccatcgatcttgccacaatttttacttgagctgagcagataacaagcggcttgggccagggtctcttggcctacgcgtagacagactccaggaagatgtcgatcttctgcttctccatcaccgtcgttatcatgcagcctgctggaatgccacagcgggacaggagcatggggatgagcaggcgcaagatgactgcaagtggcgccggatcccgacgttcggcgactggaacctgcgggacgacatgcccgtcacccaatacttgcaagcagggacttcttcatcgttgtgccgccggcagagaaggacgacgacgaggatctgttcaaggtgccccagtgttcctgccaagccctacaactacaagaaggctatataaattcaagtaggaatgcaggatggggtgcattcaactcatgcaggtggcaggttcgtatgcaggtggcaactgctatattctgcatctttcgtatgttttgtcacgcgaggtcgttcagggcgtattaggttaatggaagtggccaattctgtggcgtggctgagatgattggacctgtcgatttcgacagaagtgttgattactggcagcaggataagtggagtggccagttccctgtgaagtggcacataattaaggatgtaccgaacaatcttctgcggcacatcattcttgagaacaatgacaataaacctgtcacaaatagcagggacacacaggaggttcaattaggttggcatgatgctggtacctatgacaagaacattatcgagtggcccaagtgcagtggcgctaatggtagcttgagattcaaagtcgagttgaagcatggggccaatgctgatcttgtgaatgctatgaagctgatcccgccttcaacgacgtccgaaccccatccgcgatccatgtctgccgcgccatcctcgcccttccatctcagcgcccccattcgtgcttgaaggaaggcccattcgtgttggaacgaatcctcgctcaaaatccatgcgcatccgatgaggatccagagctgccctgctgcccttccatcctctttgtccctttccatcgtcggcgatccacttctatcggcggcgcccccttctagccccttccatagttgtgcttaggtacttctctctatttgtgaaatctagggttcttagtgtacgattgtcaatatctctataaaagaatagattagtgtacgattgtcgatatattgtttgttttcatgtaattgttgtgcactcgcgttttattaataatttgtgagtcgtcgcaacgcacagatacctaacagataatttgtgagtcgatatatctgtatgatattgatggttgcaatgtagtggtgaaacgagtagattaaaataacaaaatttatatgtatagccaggatcaccaatggattacagaatcttttctcataac

SEQ ID NO: 216739 - DNA, 3743 bp, Zea Mays
cttcacccaccagccccccaaatctcacgggctcacgacgatagacccgccctctgtgccacaaaggagctcctctccatcccatctccaacgtcgccccaacccccatcaccgacagggaacccacctctcacgtcgacaccgccagaggaggagatggtggagatacgggcgttgcgatccgaggcagcacgctagagcgacgagagcgtggcgacgtggagatcatgggagtcctgcgcagcgtcgcggcgaggcgcccgtcggggaggcagcgggcacggagagagcggagagtgacggcgacaacgggtcccgcctgtcgcgcgaaccagggaaatatctacatctcgtctgcgccgccgctgggatttattagggttctacttctagcccaggccaactccacaccaatccaatcctggggcgggcgactgcctccttccctcgatttgacgtgcgcttcctcttcctcgctcgctctcggtcgcagtcacaggtacctacgtcctgttcttcctcgcttatggatttctttccgcgtggaaggtagtagatctctctttgctcgatctgttttcgttttgtaagattcattcacgtctgcgctgtggctatttattcagatttggtcgtcatttctgggtttgaccagcgtaagcattggccccgatctggattctggagcttgactgtatctccttttgtttttttattttgtactatctaacatagattttgcgtctaacaatcattaagttacacgcacgcatgattatatttgaagtttaaccttgccgtgttgtggttaagtgcgcttctgagcacattatgtactgaattctgcaaatcagtaaaggaattataaattgtagagtcaacttccgttagggtacgctaataacatgcccgagaacgtgtatttccttaagaagaagttcttctgcttataaaatactctttgtgtctttgtttctcggaggtgctgcttttctaaaataaatatcacagctttagtgatcagtgattattgactaggttatctgtaaccaccacagaatctctgaaagtagaccagagaaatctagcggtaataatcatcggggtcagcttctttagccatgccccccgactgcccgacggggacttcatggcagattcgaacaccatgtccatgggcttccctgttttccctccccttcccaccgtcactccttggaacgcgctaaacacgtacgggcagccccatgattgaatgggcattcattcccattgcacgtgcaaccaaattcgaattcatgttattcttatcactgtggtttttcatttgccgcaggcccacaacacaagcaactttcttattactgtcggggttccgaagccaacaaaaggacgcatcattccaactaactttcagagcagcgcagcgtgtcttgctttgttggtgccttgcaaaccgcaggaagtatctttgatatataaaaatgagaaataggccaaggagtatgctatcacgatgagccgcccagatatatatatcgtgtgcctccgtcacatcgtgctagctggttcttttcttcatgaggcatatagggtatttattcaaatgcccgcaaagggagggcagtgcactgagtgcatcgggagggctcataggtaagtagtgtttggtgttgtcatatcattcagtttgatggaaagataatgtggcaataagacctatttgtcacaactcatgctttgggatcatgtgaattgtactgtaattcagtttaagtaatttaacactattgtacatgaattcttgtagctatttaaaaccaaaggtctctggttcattgacactaatgtgcatttcaacagttcttctttgactgcaagggataggcagcaggtcttcttcagcctcttttcaattctccctttctgatggaagctggcgtgccggaaggtgccgagcaggtacatgtctcagctgaagaatccgaagactgccaagaaaggcgaggagaccacggtggccaagagcgagaagcgggggcaagaatctaagacgaatgccaagaagaaaatcttaggacgctcacggaagtgtgcccatgccgaacctgatggggagaaccgaaacggttgcagcagcactgatgcagacgagaactcacttgcagaaactgctgcctccgatcaggagaggaaggtggtgctgcaggaattgagaatcgaggtggatacatcacgagctgacaattccaatgacaacaaggagaatctgtcgagtgctccgagtgatgaagaagcattgaacaattcacattctgaaaatgaaaacagacagttggagaacaatgagaacgttcctctgaacgagaatgttgctctgaaggtggctaaactgcagagcaaagtgcatcaagagcaaccaggaaagctcaagaaaactaccaaccctaggccattcaggctaaggactgatgaaagaggagtgcttaaagaagcaaaaccagagaaaaggcagccgttcactgagaataattccacggcagtactcaaggatgcaaacagaggagtgacgaagaaacgaagcacccagattgtaacggctcagcagctcgatgagtccagctccaggccggccgtcaacagcatccaatgcagagctgtgaaaccggagagggtttctagggttgcatcatcaacacgaagagccaaaacagcaagtgaccttatggcaccttcttcccggactgggaagaagaggaaggcggctacggtgaagctgtcgaggatccaaacaccagctgcttgagctcgggcagatcaaggaggaaatgagaaactgccgacaacggtttttgttgtctgctccagcgacgagttctgtatttattactgcgtcgaattcgttttccggattagctatttaaaaccaaaggtctctggttcattgacactaatgtgcatttcaacagttcttctttgactgcaagggataggcagcaggtcttcttcagcctcttttcaattctccctttctgatggaagggctcgcccctaaaattgtgacgacatatcgagttttggacgtgcaggttcgctgggctgcaactggtgttctccttcacgtcgttgcgcgtgacgagggttggcgaggcgaggaagcgtgctcttgatcccgagtttaaagagggcgggcaacataattggaagcaagttttgtcaaatagcggtattgcaagtatctcggttgtgttgatagcattagtcatcagagggatagataggtgtttagattcaaaagagtcaactcttgttactgctcttattgatggtgttatctgacattatgcttgctataatggagatacatggtcatctgagctcgacattctttgtaaagctaagccacaaattatcacaacattcaagagtgcggaaggctaccattggtggtgtaaccatagatgggcttcttgtagcagcagctggattcttgattgggcttgcatttgtgctgataagatttttcaccactcaatgtgctcctgatgtattctggaaccagctgctagctatacccttggcacagctgccgccctatgtagaagtttgatcgattccttcttgagcgcaacagttcagtatagtgggttctacagtgttcgcaaaaaggtggtgggagtagatggtccaatattaacctttaaaattgtgagttagcagtttttgttagtgccttgcctttt

SEQ ID NO: 216740 - DNA, 2050 bp, Zea Mays
cttcacccaccagccccccaaatctcacgggctcacgacgatagacccgccctctgtgccacaaaggagctcctctccatcccatctccaacgtcgccccaacccccatcaccgacagggaacccacctctcacgtcgacaccgccagaggaggagatggtggagatacgggcgttgcgatccgaggcagcacgctagagcgacgagagcgtggcgacgtggagatcatgggagtcctgcgcagcgtcgcggcgaggcgcccgtcggggaggcagcgggcacggagagagcggagagtgacggcgacaacgggtcccgcctgtcgcgcgaaccagggaaatatctacatctcgtctgcgccgccgctgggatttattagggttctacttctagcccaggccaactccacaccaatccaatcctggggcgggcgactgcctccttccctcgatttgacgtgcgcttcctcttcctcgctcgctctcggtcgcagtcacaggcccacaacacaagcaactttcttattactgtcggggttccgaagccaacaaaaggacgcatcattccaactaactttcagagcagcgcagcgtgtcttgctttgttggtgccttgcaaaccgcaggtgctgtgctacaattgcagaaataagttcttctttgactgcaagggataggcagcaggtcttcttcagcctcttttcaattctccctttctgatggaagctggcgtgccggaaggtgccgagcaggtacatgtctcagctgaagaatccgaagactgccaagaaaggcgaggagaccacggtggccaagagcgagaagcgggggcaagaatctaagacgaatgccaagaagaaaatcttaggacgctcacggaagtgtgcccatgccgaacctgatggggagaaccgaaacggttgcagcagcactgatgcagacgagaactcacttgcagaaactgctgcctccgatcaggagaggaaggtggtgctgcaggaattgagaatcgaggtggatacatcacgagctgacaattccaatgacaacaaggagaatctgtcgagtgctccgagtgatgaagaagcattgaacaattcacattctgaaaatgaaaacagacagttggagaacaatgagaacgttcctctgaacgagaatgttgctctgaaggtggctaaactgcagagcaaagtgcatcaagagcaaccaggaaagctcaagaaaactaccaaccctaggccattcaggctaaggactgatgaaagaggagtgcttaaagaagcaaaaccagagaaaaggcagccgttcactgagaataattccacggcagtactcaaggatgcaaacagaggagtgacgaagaaacgaagcacccagattgtaacggctcagcagctcgatgagtccagctccaggccggccgtcaacagcatccaatgcagagctgtgaaaccggagagggtttctagggttgcatcatcaacacgaagagccaaaacagcaagtgaccttatggcaccttcttcccggactgggaagaagaggaaggcggctacggtgaagctgtcgaggatccaaacaccagctgcttgagctcgggcagatcaaggaggaaatgagaaactgccgacaacggtttttgttgtctgctccagcgacgagttctgtatttattactgcgtcgaattcgttttccggattaggtggatttatgtacactgatcatttctttctgcgagtcgtgtggtggaacccctctgctttgttaatgtaccgccaccgaccagattttttcttcttctgtagaatgattcagaatttgattatttttctgtaacttaattgaactggggaaaggaggcccggcccaacccaacccatgaaacatttcaattttagctgtgtactaggatccatttcatcttgctaccatgtgttgttgcccttgatagatatcagaaatagggtgtagtgtatgagaagtagagaaccgatgctcttttatagccctcaatagatatcagtttctttcttttctttgatttaca

SEQ ID NO: 216741 - DNA, 7532 bp, Zea Mays
gttcaattgcgacgggtgggatcagatcttggatgtccgcggcccgtcaggccgtacgagtcttgctttccgccccccttccgtcgcagcgtcctccttccacggtgaagaggagcgaccgcgcgaggacacgagacgagacccctgttcaatccccaatctggaatggtgatccgcgacgagatctgagagagagcgcctcgcaagaggcccgccgtccgcttcccccctccccacggcagccttccacgcgatggcgtcctccgcggcgccgccggcctccccgtcgtcgcgatcgcacggcaatgcggcgggcgccggcagcagcgccacggcgatgatgctcccgggccctccggggcgcggcaacggcggctgcatcgacctcagccccgcgggcctcctggcgcacggcgccgggagcagcgtcgttgtgtccgacccgcgctccatgcagctcctctgcgtgctccccatgccctcctcctcactcgcctccttcgtcaccgccgtccgctgggcgccccccgacacgccctccctcgacgacgacgacgacgaccgtcgcccgctccgcctcgccgcgggggaccgccacggccgcatcgccgtttgggacgcccgcgcgcgggctgtgctccactggctcaacctcgacgaggcgcgcggcgttgcgccgggctccgggggcggggtgcaggacctgtgctgggtccaccacggctccggctggcacctcgcctccatccacggcccctcgctgctctgcatctgggagacgtccaacagcccgcgcgtcctctggatgttcgacgcggcgcccgagtacctctcctgcctccgccgtgatcccttcgacgccaggcacctctgcgccattggccttcgcggcttcctcctctctgcgattcccaggcaggactccgacatctctctgcaggagcaccgggtgaactgcggtgcaggggatgtcgccgacctgcagaggctggagaaggagatttcagcacctgtacccgccccggcgctcgcggcgttcccgctcttttcctcgagaatttgcttctcccccctgtggaggcagatcctcttcgtcaccttccctcgggagctcatcgtctttgacctcagctacagcactgcgctttctgttactccattgcccagggggtttggcaagttctcggatgttatggccgatcctgatatcgacatgctctattgcacccatctcgacggcaagctgagcatctggaggcgcaaggagggtgaacaagtgcatttattatgtgctgtggaagagctcatgccttcaattggtactgttgttccttctccggctgttcttgcagctacaatatggcagtcagagtctattttccgaagcattgaaaaacaatgtcaggatttggcacagccacattctttcatgattgatacaaattcagaccagaatgcttgtcaagggactatgacatatctaacgtcgatatcagaagatggcaagatctggtcgtggcttttgaaatttgacaagtccgcacttcctagcaaagctaatctaggtagaccgagccataacaatgctgcaactgccaacacatgctccaatagacctgattttataataaagattaatttggtgggacaacttcatcttttgtcatctactgtgactacactagcagtgccatccccttcattgcttgccacagtagctcgtggtggaaacaatcctgctccagcagtgccacttgttgctctggggactcagaatggaactattgaagttgtagatgttgtggcaaatgcagtttcagccagtttttccgttcatagcagcacagtgagaggattgagatggcttggcaactcacgtcttgtttcattcacatataatcaggttaatgataaaactggtggatacaataataaacttgttattacatgcttaagaagtgggctaaatcgctcattccgtgtgctccaaaagcctgaacgtgcaccgattagagcattgagggcttcttcatctggacggtaccttctgattctgtttcgcgatgctcctgttgaagtgtgggctatgacaaagaaccccatgatgcttaggtccttggcgcttccttttacagtattagaatggacactgccagctgcacctcggccaggtcaaaatgcatcatctaaacagtcttcaacctccaaggagcgatcagcagaggcttctggtgcagaaagttctgatgaaacatgtgaaagttttgcttttgcattagtcaatggcgctcttggtgtgtttgaagtgcatgggcggcgaatacgagattttaggccaaagtggccctcgtcatcatttgcatcttcagatggtttggttactgctatggcttaccgccttccccatgttgtaatgggggatcgatcaggcaacattagatggtgggatgttacaagtggcctttcttcttcttttagcactcacagggaaggcatcaggaggataaagttttctcctgttgttcatggtgatcgaagcagagggcgcatcgctgtgcttttctatgataatacattttcgatatttgacttggatagtccagatcccttggcaaatgcccttcttcagccgcagtctcctggtacccttgtcttggagcttgattggttgtcaacccgaacaaggaaggatgaaccacttatgttatgcattgccggagctgatagtagcttccgactgattgaggttaacattgatgctaagggcagttctatttcgaagccagtagctacgaaagagaggtttaggccaatgccattttgtttgccagtattatttccaacggcccatgctttggctttgcgaatgatacttcaacttggggtgaagccttcttggtttgaatgcaatagtagtgataaattaactggggacagctttaaggtagcaccaacatttggagatcttcgtagttacatgattgagacaacactccctcctattggtgacgccgttgtggctgaattgctccttaaagtgttggaaccatacagaaaggagggttgcattcttgatgatggaagagccagcctatattcagctatagtgaacaagggagcttgtgcaagatttgcatttgctgctgcgatttttggtgatttccaagaagcacttttctggctacagctgcctcaagctcttcgccacttcctgggtaaatccacaagtagatcaagagagaagatctcacaatcaagtttacatcctgattctgaacaaagctccagatttaatcggatagcttcaagagagagatctgcttctgaaaagttcacgaaaaatgctgcgaattatgggcaattaagctcaatggcatttaatcaagagcaactatggttcaatgcaagtgaaaggataccttggcatgacaagctcgatggtgaagatgctttgcaaaagcatgttcatgagcttgtctctctcgggaacttagaggctgcggtttcattgttactttcaacgccacctgaaggatcaaatttttacccaaatgcattaagagcagttgtgctgtcatctgcagtctcacaatccttgcatgaacttgcagtgaaggttgttgcagccaatatggttagaacggacaaatcgctatctggcacacatcttctatgtgctgttggaagatatcaggaagcatgttcacagcttcaagatgctgggtgttggaatgatgcagctactttggccgcaagccatttgcatggatctgactacgcaagggtgctgcagaggtgggccgattatgttcttcgtggtgagcacaatatgtggagagctcttatcctatacgttgctgctggagcactgccagaggctttggatacacttcgcaagagccagcgcccagataccgcagccatgttcttgctagcttgccacgagacctactcacaagccttatcagaatcagagcccgaggacgacacttccgtgttagcactgacgccgacgccggagcagacggagaagctccggttcccttccaagaatgtggccgacgaggacctgatcgcagtcagtgaggtcttcgggcagtaccagcagaagctggttcatctctgcatggacgccgaaccgacgtctgactgaatcgcacgccttgtcgcatggcagactgatgcgggcgtggattctccgtttttgaagcttattattatcaacaggttgcaaattccttccaagtttctgcgaagctttttgttctgtctgttggtaggtaccagacgtccagacatgacatcgggactgctgatgtggcagaatctgatggcaggaggcaggaacagacatgcagtgctgtatcgtaggtgccaatggttggcactgtttatacatacgtaagcatttgtatttggtacaagctatgttttttttttctttggtgcgcaaagagcgagtgcgcagcgaacttctcttgtggccgagatgagatgagaacagatgccatcgaggcagcagcagacgatatacttacacctgtacacccatgacagtttttgtctgaagattggttattatatgcttatctgcaaatgcatcgcttcaggccctggagacatcgctgtcactggatccatcgtcattgccgatccgtgcagacattgttttggaggtccgaaagctacgttcttgtcgcattcaagccctccatgattatggatgatggataatgataacaggtccagaatctcattgaacgttgccttcagctatatatgaaccagaaagaagtggtggacaccctatctttccaggcaaaaatagaacctagtttcactgagcttgtctggcagaagctcgaggaagagaatcgtgatttttcaaggcatactatgtaaggctgatgcttatgaatcaaataacggccttcaataagctccttgagcagcagtatgagattatgactaaagatcatccttctgggatgccatctgtacctcctgctgctcctaatggctcaaactctaacacattgaaccaaaacatgccctttctgcctgacactatccccagtactgcactgcaagataactcgttgcgcaatggaggttctagtagtatagttaatggtgctccatccgatgaccaatttatgtatactggtaaagttgttcatggccttcctggtggcatggatgcttcatcaagcctgctaacagcacacaatcctgctgttgggcagtttaatggacacaatggagcaacaataaagacagaatttggctactcaagcaactcagattttggattcagcaatgaggccgtgttcctagagcagtcagttggagatgtatcagattcctcgtaatttcagcttttcagatttgacagaggatttcagccaaagcgcagaaatattagagaattatggtcgatcccctttcatcccttccgatgcaaataacttcccagaatctactgctggagaacatactgaaataggaaataggcggctagatacaatatctgagggcattcattttgaagattttggaagtgattaatgaaacctttgatgacactgcacatggttgaggagtgatccatttgtacagactattttgggcagctaaatatctacaattgtggtcgtggaactagctgatttggtggccactgtttcttcttccgtgttaggttttgtgctcttagagtagaagcatggatggcttattattatgatcaaataatccgtattgaagggtggcccaaacaatccgtcttctttgtatcttctctgagggtgatgtggtagcaaatgtattcgttcagttggctatagtggaagctttacgattatgtcaaagttctcctttctgcccccctgttgcacaaggttacgtctgcagtttttcttgtttgtcgcatttcctggttccgttttggttgcgtttcctgactcagatcagtacatatctgcatgatctgcgaccatttgtatttaactatttgtatgatctatggccatagaattaatcaactattgtttagcggaattcaggaaccagaagtgcatcttgcattacctgcctattactctctcacccaagcatccaaattgtacaggttatagttttactaatctgaagttgcatgtgttcaaaaactggaaattggcaaaggattacatccagtttgtagcagggtaacaaacacaaacactcaacattcacccccctgaaaaaagaagtctagttcttggggatgttcttgccgacgatcttggccggcgttatgcggaggaggttcccgggcttccctggcacggcccccttgatcatgagcacccggaggttgttgtcgatcttgacgatcttgagcttcctgatcttggtcttggttcctcccatcctcccgggcatcttcttccccttgtacacgcggcccggcgtcgtcccggctccgatggaacccagctgccggtggctcttggaaccgtgcgtcatcagcccgcgcttgaagttgtgcctcttgatgccacctgcgcagtgccacaagtaaaaccgcgcgcgagcggatcaagaacgttgcaagctaggagattgcacaagtggcatagcaatcgcaaatgcaaacctttgaaactacagctacagcaaatgctgctaaaacttcactctccatgaaacggaacaatgacacatacaaccgaggctggcagatcattagcagaattgctgttgctggcaatgcaatcgcactattggatggaggcgcgagaatcggtgtactaccttggaaccccttgccgatggagttgccggagacgtcgatgaggtcgccctccttgaagaggtcggcgaagtcgaggggctggccgggctcgaaggcgtcgacggcggtgagccggaactcctgcaggtggcgcagcggcggggcgccggccttgcccaggtggcccagctccgggcgggtgagcttgtcctcgcgcacgccgtggtacccgacctggacggcgtcgtacccgtccgtggcggccgtcttcacctgcgtcaccacgttgccgccctcccggaacccgaccacggtcaccggcaccggcttccccgtctccggatcgaagtaggtcatcatccccaccttggtcgccatcacgcccaccccggcctcgtacgacgcgcgcaccgccacgggcgcccgccgccgcccgccgctccaggggacggcgccctggcggcgctgcgggaggaggaacgccactgcgccgcccacgcccacggccgccatggccatgcttgcttcgatttgactgggattagcagaggggagtggcgctctcgttcaatttgactgggatttatgcggatgcggataggccgctcttcctcgcgcctatccccttatccaaggaggacgtctgctcggaagcgactcaaatagatacgcctttctacaaagaaagcgtatatacagttgcttagaaatttgcatggcaagacctccatccattctcctattgtcacgtact

SEQ ID NO: 216742 - DNA, 7480 bp, Zea Mays
gtcttgctttccgccccccttccgtcgcagcgtcctccttccacggtgaagaggagcgaccgcgcgaggacacgagacgagacccctgttcaatccccaatctggaatggtgatccgcgacgagatctgagagagagcgcctcgcaagaggcccgccgtccgcttcccccctccccacggcagccttccacgcgatggcgtcctccgcggcgccgccggcctccccgtcgtcgcgatcgcacggcaatgcggcgggcgccggcagcagcgccacggcgatgatgctcccgggccctccggggcgcggcaacggcggctgcatcgacctcagccccgcgggcctcctggcgcacggcgccgggagcagcgtcgttgtgtccgacccgcgctccatgcagctcctctgcgtgctccccatgccctcctcctcactcgcctccttcgtcaccgccgtccgctgggcgccccccgacacgccctccctcgacgacgacgacgacgaccgtcgcccgctccgcctcgccgcgggggaccgccacggccgcatcgccgtttgggacgcccgcgcgcgggctgtgctccactggctcaacctcgacgaggcgcgcggcgttgcgccgggctccgggggcggggtgcaggacctgtgctgggtccaccacggctccggctggcacctcgcctccatccacggcccctcgctgctctgcatctgggagacgtccaacagcccgcgcgtcctctggatgttcgacgcggcgcccgagtacctctcctgcctccgccgtgatcccttcgacgccaggcacctctgcgccattggccttcgcggcttcctcctctctgcgattcccaggcaggactccgacatctctctgcaggagcaccgggtgaactgcggtgcaggggatgtcgccgacctgcagaggctggagaaggagatttcagcacctgtacccgccccggcgctcgcggcgttcccgctcttttcctcgagaatttgcttctcccccctgtggaggcagatcctcttcgtcaccttccctcgggagctcatcgtctttgacctcagctacagcactgcgctttctgttactccattgcccagggggtttggcaagttctcggatgttatggccgatcctgatatcgacatgctctattgcacccatctcgacggcaagctgagcatctggaggcgcaaggagggtgaacaagtgcatttattatgtgctgtggaagagctcatgccttcaattggtactgttgttccttctccggctgttcttgcagctacaatatggcagtcagagtctattttccgaagcattgaaaaacaatgtcaggatttggcacagccacattctttcatgattgatacaaattcagaccagaatgcttgtcaagggactatgacatatctaacgtcgatatcagaagatggcaagatctggtcgtggcttttgaaatttgacaagtccgcacttcctagcaaagctaatctaggaaccaggtagaccgagccataacaatgctgcaactgccaacacatgctccaatagacctgattttataataaagattaatttggtgggacaacttcatcttttgtcatctactgtgactacactagcagtgccatccccttcattgcttgccacagtagctcgtggtggaaacaatcctgctccagcagtgccacttgttgctctggggactcagaatggaactattgaagttgtagatgttgtggcaaatgcagtttcagccagtttttccgttcatagcagcacagtgagaggattgagatggcttggcaactcacgtcttgtttcattcacatataatcaggttaatgataaaactggtggatacaataataaacttgttattacatgcttaagaagtgggctaaatcgctcattccgtgtgctccaaaagcctgaacgtgcaccgattagagcattgagggcttcttcatctggacggtaccttctgattctgtttcgcgatgctcctgttgaagtgtgggctatgacaaagaaccccatgatgcttaggtccttggcgcttccttttacagtattagaatggacactgccagctgcacctcggccaggtcaaaatgcatcatctaaacagtcttcaacctccaaggagcgatcagcagaggcttctggtgcagaaagttctgatgaaacatgtgaaagttttgcttttgcattagtcaatggcgctcttggtgtgtttgaagtgcatgggcggcgaatacgagattttaggccaaagtggccctcgtcatcatttgcatcttcagatggtttggttactgctatggcttaccgccttccccatgttgtaatgggggatcgatcaggcaacattagatggtgggatgttacaagtggcctttcttcttcttttagcactcacagggaaggcatcaggaggataaagttttctcctgttgttcatggtgatcgaagcagagggcgcatcgctgtgcttttctatgataatacattttcgatatttgacttggatagtccagatcccttggcaaatgcccttcttcagccgcagtctcctggtacccttgtcttggagcttgattggttgtcaacccgaacaaggaaggatgaaccacttatgttatgcattgccggagctgatagtagcttccgactgattgaggttaacattgatgctaagggcagttctatttcgaagccagtagctacgaaagagaggtttaggccaatgccattttgtttgccagtattatttccaacggcccatgctttggctttgcgaatgatacttcaacttggggtgaagccttcttggtttgaatgcaatagtagtgataaattaactggggacagctttaaggtagcaccaacatttggagatcttcgtagttacatgattgagacaacactccctcctattggtgacgccgttgtggctgaattgctccttaaagtgttggaaccatacagaaaggagggttgcattcttgatgatggaagagccagcctatattcagctatagtgaacaagggagcttgtgcaagatttgcatttgctgctgcgatttttggtgatttccaagaagcacttttctggctacagctgcctcaagctcttcgccacttcctgggtaaatccacaagtagatcaagagagaagatctcacaatcaagtttacatcctgattctgaacaaagctccagatttaatcggatagcttcaagagagagatctgcttctgaaaagttcacgaaaaatgctgcgaattatgggcaattaagctcaatggcatttaatcaagagcaactatggttcaatgcaagtgaaaggataccttggcatgacaagctcgatggtgaagatgctttgcaaaagcatgttcatgagcttgtctctctcgggaacttagaggctgcggtttcattgttactttcaacgccacctgaaggatcaaatttttacccaaatgcattaagagcagttgtgctgtcatctgcagtctcacaatccttgcatgaacttgcagtgaaggttgttgcagccaatatggttagaacggacaaatcgctatctggcacacatcttctatgtgctgttggaagatatcaggaagcatgttcacagcttcaagatgctgggtgttggaatgatgcagctactttggccgcaagccatttgcatggatctgactacgcaagggtgctgcagaggtgggccgattatgttcttcgtggtgagcacaatatgtggagagctcttatcctatacgttgctgctggagcactgccagaggctttggatacacttcgcaagagccagcgcccagataccgcagccatgttcttgctagcttgccacgagacctactcacaagccttatcagaatcagagcccgaggacgacacttccgtgttagcactgacgccgacgccggagcagacggagaagctccggttcccttccaagaatgtggccgacgaggacctgatcgcagtcagtgaggtcttcgggcagtaccagcagaagctggttcatctctgcatggacgccgaaccgacgtctgactgaatcgcacgccttgtcgcatggcagactgatgcgggcgtggattctccgtttttgaagcttattattatcaacaggttgcaaattccttccaagtttctgcgaagctttttgttctgtctgttggtaggtaccagacgtccagacatgacatcgggactgctgatgtggcagaatctgatggcaggaggcaggaacagacatgcagtgctgtatcgtaggtgccaatggttggcactgtttatacatacgtaagcatttgtatttggtacaagctatgttttttttttctttggtgcgcaaagagcgagtgcgcagcgaacttctcttgtggccgagatgagatgagaacagatgccatcgaggcagcagcagacgatatacttacacctgtacacccatgacagtttttgtctgaagattggttattatatgcttatctgcaaatgcatcgcttcaggccctggagacatcgctgtcactggatccatcgtcattgccgatccgtgcagacattgttttggaggtccgaaagctacgttcttgtcgcattcaagccctccatgattatggatgatggataatgataacaggtccagaatctcattgaacgttgccttcagctatatatgaaccagaaagaagtggtggacaccctatctttccaggcaaaaatagaacctagtttcactgagcttgtctggcagaagctcgaggaagagaatcgtgatttttcaaggcatactatgtaaggctgatgcttatgaatcaaataacggccttcaataagctccttgagcagcagtatgagattatgactaaagatcatccttctgggatgccatctgtacctcctgctgctcctaatggctcaaactctaacacattgaaccaaaacatgccctttctgcctgacactatccccagtactgcactgcaagataactcgttgcgcaatggaggttctagtagtatagttaatggtgctccatccgatgaccaatttatgtatactggtaaagttgttcatggccttcctggtggcatggatgcttcatcaagcctgctaacagcacacaatcctgctgttgggcagtttaatggacacaatggagcaacaataaagacagaatttggctactcaagcaactcagattttggattcagcaatgaggccgtgttcctagagcagtcagttggagatgtatcagattcctcgtaatttcagcttttcagatttgacagaggatttcagccaaagcgcagaaatattagagaattatggtcgatcccctttcatcccttccgatgcaaataacttcccagaatctactgctggagaacatactgaaataggaaataggcggctagatacaatatctgagggcattcattttgaagattttggaagtgattaatgaaacctttgatgacactgcacatggttgaggagtgatccatttgtacagactattttgggcagctaaatatctacaattgtggtcgtggaactagctgatttggtggccactgtttcttcttccgtgttaggttttgtgctcttagagtagaagcatggatggcttattattatgatcaaataatccgtattgaagggtggcccaaacaatccgtcttctttgtatcttctctgagggtgatgtggtagcaaatgtattcgttcagttggctatagtggaagctttacgattatgtcaaagttctcctttctgcccccctgttgcacaaggttacgtctgcagtttttcttgtttgtcgcatttcctggttccgttttggttgcgtttcctgactcagatcagtacatatctgcatgatctgcgaccatttgtatttaactatttgtatgatctatggccatagaattaatcaactattgtttagcggaattcaggaaccagaagtgcatcttgcattacctgcctattactctctcacccaagcatccaaattgtacaggttatagttttactaatctgaagttgcatgtgttcaaaaactggaaattggcaaaggattacatccagtttgtagcagggtaacaaacacaaacactcaacattcacccccctgaaaaaagaagtctagttcttggggatgttcttgccgacgatcttggccggcgttatgcggaggaggttcccgggcttccctggcacggcccccttgatcatgagcacccggaggttgttgtcgatcttgacgatcttgagcttcctgatcttggtcttggttcctcccatcctcccgggcatcttcttccccttgtacacgcggcccggcgtcgtcccggctccgatggaacccagctgccggtggctcttggaaccgtgcgtcatcagcccgcgcttgaagttgtgcctcttgatgccacctgcgcagtgccacaagtaaaaccgcgcgcgagcggatcaagaacgttgcaagctaggagattgcacaagtggcatagcaatcgcaaatgcaaacctttgaaactacagctacagcaaatgctgctaaaacttcactctccatgaaacggaacaatgacacatacaaccgaggctggcagatcattagcagaattgctgttgctggcaatgcaatcgcactattggatggaggcgcgagaatcggtgtactaccttggaaccccttgccgatggagttgccggagacgtcgatgaggtcgccctccttgaagaggtcggcgaagtcgaggggctggccgggctcgaaggcgtcgacggcggtgagccggaactcctgcaggtggcgcagcggcggggcgccggccttgcccaggtggcccagctccgggcgggtgagcttgtcctcgcgcacgccgtggtacccgacctggacggcgtcgtacccgtccgtggcggccgtcttcacctgcgtcaccacgttgccgccctcccggaacccgaccacggtcaccggcaccggcttccccgtctccggatcgaagtaggtcatcatccccaccttggtcgccatcacgcccaccccggcctcgtacgacgcgcgcaccgccacgggcgcccgccgccgcccgccgctccaggggacggcgccctggcggcgctgcgggaggaggaacgccactgcgccgcccacgcccacggccgccatggccatgcttgcttcgatttgactgggattagcagaggggagtggcgctctcgttcaatttgactgggatttatgcggatgcggataggccgctcttcctcgcgcctatccccttatccaaggaggacgtctgctcggaagcgactcaaatagatacgcctttctacaaagaaagcgtatatacagttgcttagaaatttgcatggcaagacctccatccattctcctattgtcacgtact

SEQ ID NO: 216743 - DNA, 2021 bp, Zea Mays
cgcccgcatcccgccccgcatcccgcgaccttcttcctctgctgcctcctgcccgcatcctgccggcggacgcaccccgccccgcatcccgcgaccttcttcctctgttgcctccacgggagccttctcacctccacgcgtcgttgcgtcagatccgtctgtcgctagagaaaaccctacccaatgaccacatgcattcttactgggacgacgccactattggcgcagaggagcagatatggcgcatcgcatgtactccgtcgctgtcctcctcgaatccgcctctaatttctccaacgccataggcaaggagatgcctgcccaccgccccggcaccccccgccctcgccgcgcacaccccaagccccgcggatcacagtcgcctctaccctagcgggagccgcgcccgcacccacattacccgcacgatggcaagaggcagcggcacaaggccacggcgactcctcgagcagaggaacccgaccgagcgcagcaacgcaaatcttcaatctcaaatccgtgctgcgagaaaagtttcactcctctggctgctccttgtgtgtgtgtgtccactaatgcgttcagcattgcaactgctgctgccaaatgctgagcattcgttgccaacatagatggtcactctgataaaactgtcaccttcaatgggaggatgctcagaaatttggtggctggtggatctacttaagaatcaaaagtcagacaaggtggacatcaccatccaaccggaggagcaggaagccatgaatgatgttctagcagccagccatgaccgcgtccacgtcatcaactttgacatcaagcaggggctacagtggccgggcctcctccagaaaaagaggaattgaagcagtatctgactcgaacatttttgtagaaaacttggtagaaaaagaggaattcctgcatacattttcgaaggaatgtgaatatatcagaactgcagtgacaaatggtagtgccattaagcatgatggctcatatgaatcagatcctgcagttgagattgttcgagttgaactccaaggtgctgctgcatttcttttattctcgtctggttccacgcctatatatattggagaacatggatgggaaatgcttctggtagtaaaaaaggcaacacaagaggctggttcaaaatttgaactgctaggttttgcatctgtgcataacttctatcattatcctgagagtattcgcttacgaatcagccagatacttgtgttgccaccttatcagggtgaaggccatggtcttggtcttcttgaagcaatcaattatattgcacagtctgagaacatttacgatgttacaatagaaagcccttctgattacctgcagtatgtgagatcatccattgactgcctctgtttgctcatgtttgatccgatcaaacctgcacttggtgctattgtctcgtctctgaaggagaccaacctgtcaaaaagggcccaaagtttgagaatggttccaccggttgacctgatggagactcagccagaggatctcaggacgcaggagcaacagctcaatgagctcgtggacatccaaatcgaggagattgatggggtcgccaagaacgtcacttcacgtggcaaggataagatggcagagctggcggttcaatgaatctgggtgaggttcctacttcaaacgatgttaaaatgttgtcgtagcttatctggtgaggtctcttttacgagttggcttcttggtagaaagggaatgtcacggcataggcactgagtagattgtcacgacagattattatatacttcaattctggaatatttgatggaaatgctattttagattgcttggtaagtgggaaccgcctcaaatcacagaagtagaagcagcttccgattcagccggaaccatttcttcaaaaatgttctattatagaataaacaaggcttaggagatagaaaacattatttacaatataaatatgtaatattattataaatgtaccgactcaaataaaatgaactggtattgaa

SEQ ID NO: 216744 - DNA, 1855 bp, Zea Mays
cgcccgcatcccgccccgcatcccgcgaccttcttcctctgctgcctcctgcccgcatcctgccggcggacgcaccccgccccgcatcccgcgaccttcttcctctgttgcctccacgggagccttctcacctccacgcgtcgttgcgtcagatccgtctgtcgctagagaaaaccctacccaatgaccacatgcattcttactgggacgacgccactattggcgcagaggagcagatatggcgcatcgcatgtactccgtcgctgtcctcctcgaatccgcctctaatttctccaacgccataggcaaggagatgcctgcccaccgccccggcaccccccgccctcgccgcgcacaccccaagccccgcggatcacagtcgcctctaccctagcgggagccgcgcccgcacccacattacccgcacgatggcaagaggcagcggcacaaggccacggcgactcctcgagcagaggaacccgaccgagcgcagcaacgcaaatcttcaatctcaaatccgtgctgcgagaaaagtttcactcctctggctgctccttgtgtgtgtgtgtccactaatgcgttcagcattgcaactgctgctgccaaatgctgaggcagcagtatacataactggttcaatttgtgcagcattcgttgccaacatagatggtcactctgataaaactgtcaccttcaatgggaggatgctcagttggaaaaagttagattcgcaggttttgagaccgaacctatatgtaccaccaaaacaatatcctaattgcaagaagcatgatatggttactttctcttactgctacagaactgcagtgacaaatggtagtgccattaagcatgatggctcatatgaatcagatcctgcagttgagattgttcgagttgaactccaaggttccacgcctatatatattggagaacatggatgggaaatgcttctggtagtaaaaaaggcaacacaagaggctggttcaaaatttgaactgctaggttttgcatctgtgcataacttctatcattatcctgagagtattcgcttacgaatcagccagatacttgtgttgccaccttatcagggtgaaggccatggtcttggtcttcttgaagcaatcaattatattgcacagtctgagaacatttacgatgttacaatagaaagcccttctgattacctgcagtatgtgagatcatccattgactgcctctgtttgctcatgtttgatccgatcaaacctgcacttggtgctattgtctcgtctctgaaggagaccaacctgtcaaaaagggcccaaagtttgagaatggttccaccggttgacctgatggagactcagccagaggatctcaggacgcaggagcaacagctcaatgagctcgtggacatccaaatcgaggagattgatggggtcgccaagaacgtcacttcacgtggcaaggataagatggcagagctggcggttcaatgaatctgggtgaggttcctacttcaaacgatgttaaaatgttgtcgtagcttatctggtgaggtctcttttacgagttggcttcttggtagaaagggaatgtcacggcataggcactgagtagattgtcacgacagattattatatacttcaattctggaatatttgatggaaatgctattttagattgcttggtaagtgggaaccgcctcaaatcacagaagtagaagcagcttccgattcagccggaaccatttcttcaaaaatgttctattatagaataaacaaggcttaggagatagaaaacattatttacaatataaatatgtaatattattataaatgtaccgactcaaataaaatgaactggtattgaa

SEQ ID NO: 216745 - DNA, 2282 bp, Zea Mays
cgcccgcatcccgccccgcatcccgcgaccttcttcctctgctgcctcctgcccgcatcctgccggcggacgcaccccgccccgcatcccgcgaccttcttcctctgttgcctccacgggagccttctcacctccacgcgtcgttgcgtcagatccgtctgtcgctagagaaaaccctacccaatgaccacatgcattcttactgggacgacgccactattggcgcagaggagcagatatggcgcatcgcatgtactccgtcgctgtcctcctcgaatccgcctctaatttctccaacgccataggcaaggagatgcctgcccaccgccccggcaccccccgccctcgccgcgcacaccccaagccccgcggatcacagtcgcctctaccctagcgggagccgcgcccgcacccacattacccgcacgatggcaagaggcagcggcacaaggccacggcgactcctcgagcagaggaacccgaccgagcgcagcaacgcaaatcttcaatctcaaatccgtgctgcgagaaaagtttcactcctctggctgctccttgtgtgtgtgtgtccactaatgcgttcagcattgcaactgctgctgccaaatgctgagcattcgttgccaacatagatggtcactctgataaaactgtcaccttcaatgggaggatgctcaggttttgagaccgaacctatatgtaccaccaaaacaatatcctaattgcaaggaaggtgaccttcctctcatcatcgcgattgactagcaaccaatggccctgataggtgttatgcaagtgtagggcgacatcactaatgctcggacaacggatgtggcatttcgatggatgcaaagcagacttggttgtttgcgatggaggcttcggatagtaagatatcatatgagtgcaagagaactactctcaccattaactataacaaattttgtcaccaaaatttggtggctggtggatctacttaagaatcaaaagtcagacaaggtggacatcaccatccaaccggaggagcaggaagccatgaatgatgttctagcagccagccatgaccgcgtccacgtcatcaactttgacatcaagcaggggctacagtggccgggcctcctccagaaaaagaggaattgaagcagtatctgactcgaaaacttggtagaaaaagaggaattcctgcatacattttcgaaggaatgtgaatatatcagaactgcagtgacaaatggtagtgccattaagcatgatggctcatatgaatcagatcctgcagttgagattgttcgagttgaactccaaggtgctgctgcatttcttttattctcgtctggttccacgcctatatatattggagaacatggatgggaaatgcttctggtagtaaaaaaggcaacacaagaggctggttcaaaatttgaactgctaggttttgcatctgtgcataacttctatcattatcctgagagtattcgcttacgaatcagccagatacttgtgttgccaccttatcagggtgaaggccatggtcttggtcttcttgaagcaatcaattatattgcacagtctgagaacatttacgatgttacaatagaaagcccttctgattacctgcagtatgtgagatcatccattgactgcctctgtttgctcatgtttgatccgatcaaacctgcacttggtgctattgtctcgtctctgaaggagaccaacctgtcaaaaagggcccaaagtttgagaatggttccaccggttgacctgatggagactcagccagaggatctcaggacgcaggagcaacagctcaatgagctcgtggacatccaaatcgaggagattgatggggtcgccaagaacgtcacttcacgtggcaaggataagatggcagagctggcggttcaatgaatctgggtgaggttcctacttcaaacgatgttaaaatgttgtcgtagcttatctggtgaggtctcttttacgagttggcttcttggtagaaagggaatgtcacggcataggcactgagtagattgtcacgacagattattatatacttcaattctggaatatttgatggaaatgctattttagattgcttggtaagtgggaaccgcctcaaatcacagaagtagaagcagcttccgattcagccggaaccatttcttcaaaaatgttctattatagaataaacaaggcttaggagatagaaaacattatttacaatataaatatgtaatattattataaatgtaccgactcaaataaaatgaactggtattgaa

SEQ ID NO: 216746 - DNA, 1829 bp, Zea Mays
cgcccgcatcccgccccgcatcccgcgaccttcttcctctgctgcctcctgcccgcatcctgccggcggacgcaccccgccccgcatcccgcgaccttcttcctctgttgcctccacgggagccttctcacctccacgcgtcgttgcgtcagatccgtctgtcgctagagaaaaccctacccaatgaccacatgcattcttactgggacgacgccactattggcgcagaggagcagatatggcgcatcgcatgtactccgtcgctgtcctcctcgaatccgcctctaatttctccaacgccataggcaaggagatgcctgcccaccgccccggcaccccccgccctcgccgcgcacaccccaagccccgcggatcacagtcgcctctaccctagcgggagccgcgcccgcacccacattacccgcacgatggcaagaggcagcggcacaaggccacggcgactcctcgagcagaggaacccgaccgagcgcagcaacgcaaatcttcaatctcaaatccgtgctgcgagaaaagtttcactcctctggctgctccttgtgtgtgtgtgtccactaatgcgttcagcattgcaactgctgctgccaaatgctgagcattcgttgccaacatagatggtcactctgataaaactgtcaccttcaatgggaggatgctcaggttttgagaccgaacctatatgtaccaccaaaacaatatcctaattgcaagaagcatgatatggttactttctcttactgctacagaactgcagtgacaaatggtagtgccattaagcatgatggctcatatgaatcagatcctgcagttgagattgttcgagttgaactccaaggtgctgctgcatttcttttattctcgtctggttccacgcctatatatattggagaacatggatgggaaatgcttctggtagtaaaaaaggcaacacaagaggctggttcaaaatttgaactgctaggttttgcatctgtgcataacttctatcattatcctgagagtattcgcttacgaatcagccagatacttgtgttgccaccttatcagggtgaaggccatggtcttggtcttcttgaagcaatcaattatattgcacagtctgagaacatttacgatgttacaatagaaagcccttctgattacctgcagtatgtgagatcatccattgactgcctctgtttgctcatgtttgatccgatcaaacctgcacttggtgctattgtctcgtctctgaaggagaccaacctgtcaaaaagggcccaaagtttgagaatggttccaccggttgacctgatggagactcagccagaggatctcaggacgcaggagcaacagctcaatgagctcgtggacatccaaatcgaggagattgatggggtcgccaagaacgtcacttcacgtggcaaggataagatggcagagctggcggttcaatgaatctgggtgaggttcctacttcaaacgatgttaaaatgttgtcgtagcttatctggtgaggtctcttttacgagttggcttcttggtagaaagggaatgtcacggcataggcactgagtagattgtcacgacagattattatatacttcaattctggaatatttgatggaaatgctattttagattgcttggtaagtgggaaccgcctcaaatcacagaagtagaagcagcttccgattcagccggaaccatttcttcaaaaatgttctattatagaataaacaaggcttaggagatagaaaacattatttacaatataaatatgtaatattattataaatgtaccgactcaaataaaatgaactggtattgaa

SEQ ID NO: 216747 - DNA, 2295 bp, Zea Mays
cgcccgcatcccgccccgcatcccgcgaccttcttcctctgctgcctcctgcccgcatcctgccggcggacgcaccccgccccgcatcccgcgaccttcttcctctgttgcctccacgggagccttctcacctccacgcgtcgttgcgtcagatccgtctgtcgctagagaaaaccctacccaatgaccacatgcattcttactgggacgacgccactattggcgcagaggagcagatatggcgcatcgcatgtactccgtcgctgtcctcctcgaatccgcctctaatttctccaacgccataggcaaggagatgcctgcccaccgccccggcaccccccgccctcgccgcgcacaccccaagccccgcggatcacagtcgcctctaccctagcgggagccgcgcccgcacccacattacccgcacgatggcaagaggcagcggcacaaggccacggcgactcctcgagcagaggaacccgaccgagcgcagcaacgcaaatcttcaatctcaaatccgtgctgcgagaaaagtttcactcctctggctgctccttgtgtgtgtgtgtccactaatgcgttcagcattgcaactgctgctgccaaatgctgagcattcgttgccaacatagatggtcactctgataaaactgtcaccttcaatgggaggatgctcaggttttgagaccgaacctatatgtaccaccaaaacaatatcctaattgcaaggaaggtgaccttcctctcatcatcgcgattgactagcaaccaatggccctgataggtgttatgcaagtgtagggcgacatcactaatgctcggacaacggatgtggcatttcgatggatgcaaagcagacttggttgtttgcgatggaggcttcggatagtaagatatcatatgagtgcaagagaactactctcaccattaactataacaaattttgtcaccaaaatttggtggctggtggatctacttaagaatcaaaagtcagacaaggtggacatcaccatccaaccggaggagcaggaagccatgaatgatgttctagcagccagccatgaccgcgtccacgtcatcaactttgacatcaagcaggggctacagtggccgggcctcctccagaaaaagaggaattgaagcagtatctgactcgaacatttttgtagaaaacttggtagaaaaagaggaattcctgcatacattttcgaaggaatgtgaatatatcagaactgcagtgacaaatggtagtgccattaagcatgatggctcatatgaatcagatcctgcagttgagattgttcgagttgaactccaaggtgctgctgcatttcttttattctcgtctggttccacgcctatatatattggagaacatggatgggaaatgcttctggtagtaaaaaaggcaacacaagaggctggttcaaaatttgaactgctaggttttgcatctgtgcataacttctatcattatcctgagagtattcgcttacgaatcagccagatacttgtgttgccaccttatcagggtgaaggccatggtcttggtcttcttgaagcaatcaattatattgcacagtctgagaacatttacgatgttacaatagaaagcccttctgattacctgcagtatgtgagatcatccattgactgcctctgtttgctcatgtttgatccgatcaaacctgcacttggtgctattgtctcgtctctgaaggagaccaacctgtcaaaaagggcccaaagtttgagaatggttccaccggttgacctgatggagactcagccagaggatctcaggacgcaggagcaacagctcaatgagctcgtggacatccaaatcgaggagattgatggggtcgccaagaacgtcacttcacgtggcaaggataagatggcagagctggcggttcaatgaatctgggtgaggttcctacttcaaacgatgttaaaatgttgtcgtagcttatctggtgaggtctcttttacgagttggcttcttggtagaaagggaatgtcacggcataggcactgagtagattgtcacgacagattattatatacttcaattctggaatatttgatggaaatgctattttagattgcttggtaagtgggaaccgcctcaaatcacagaagtagaagcagcttccgattcagccggaaccatttcttcaaaaatgttctattatagaataaacaaggcttaggagatagaaaacattatttacaatataaatatgtaatattattataaatgtaccgactcaaataaaatgaactggtattgaa

SEQ ID NO: 216748 - DNA, 2265 bp, Zea Mays
cgcccgcatcccgccccgcatcccgcgaccttcttcctctgctgcctcctgcccgcatcctgccggcggacgcaccccgccccgcatcccgcgaccttcttcctctgttgcctccacgggagccttctcacctccacgcgtcgttgcgtcagatccgtctgtcgctagagaaaaccctacccaatgaccacatgcattcttactgggacgacgccactattggcgcagaggagcagatatggcgcatcgcatgtactccgtcgctgtcctcctcgaatccgcctctaatttctccaacgccataggcaaggagatgcctgcccaccgccccggcaccccccgccctcgccgcgcacaccccaagccccgcggatcacagtcgcctctaccctagcgggagccgcgcccgcacccacattacccgcacgatggcaagaggcagcggcacaaggccacggcgactcctcgagcagaggaacccgaccgagcgcagcaacgcaaatcttcaatctcaaatccgtgctgcgagaaaagtttcactcctctggctgctccttgtgtgtgtgtgtccactaatgcgttcagcattgcaactgctgctgccaaatgctgaggcagcagtatacataactggttcaatttgtgcagcattcgttgccaacatagatggtcactctgataaaactgtcaccttcaatgggaggatgctcaggttttgagaccgaacctatatgtaccaccaaaacaatatcctaattgcaaggaaggtgaccttcctctcatcatcgcgattgactagcaaccaatggccctgataggtgttatgcaagtgtagggcgacatcactaatgctcggacaacggatgtggcatttcgatggatgcaaagcagacttggttgtttgcgatggaggcttcggataaaatttggtggctggtggatctacttaagaatcaaaagtcagacaaggtggacatcaccatccaaccggaggagcaggaagccatgaatgatgttctagcagccagccatgaccgcgtccacgtcatcaactttgacatcaagcaggggctacagtggccgggcctcctccagaaaaagaggaattgaagcagtatctgactcgaacatttttgtagaaaacttggtagaaaaagaggaattcctgcatacattttcgaaggaatgtgaatatatcagaactgcagtgacaaatggtagtgccattaagcatgatggctcatatgaatcagatcctgcagttgagattgttcgagttgaactccaaggtgctgctgcatttcttttattctcgtctggttccacgcctatatatattggagaacatggatgggaaatgcttctggtagtaaaaaaggcaacacaagaggctggttcaaaatttgaactgctaggttttgcatctgtgcataacttctatcattatcctgagagtattcgcttacgaatcagccagatacttgtgttgccaccttatcagggtgaaggccatggtcttggtcttcttgaagcaatcaattatattgcacagtctgagaacatttacgatgttacaatagaaagcccttctgattacctgcagtatgtgagatcatccattgactgcctctgtttgctcatgtttgatccgatcaaacctgcacttggtgctattgtctcgtctctgaaggagaccaacctgtcaaaaagggcccaaagtttgagaatggttccaccggttgacctgatggagactcagccagaggatctcaggacgcaggagcaacagctcaatgagctcgtggacatccaaatcgaggagattgatggggtcgccaagaacgtcacttcacgtggcaaggataagatggcagagctggcggttcaatgaatctgggtgaggttcctacttcaaacgatgttaaaatgttgtcgtagcttatctggtgaggtctcttttacgagttggcttcttggtagaaagggaatgtcacggcataggcactgagtagattgtcacgacagattattatatacttcaattctggaatatttgatggaaatgctattttagattgcttggtaagtgggaaccgcctcaaatcacagaagtagaagcagcttccgattcagccggaaccatttcttcaaaaatgttctattatagaataaacaaggcttaggagatagaaaacattatttacaatataaatatgtaatattattataaatgtaccgactcaaataaaatgaactggtattgaa

SEQ ID NO: 216749 - DNA, 2346 bp, Zea Mays
cgcccgcatcccgccccgcatcccgcgaccttcttcctctgctgcctcctgcccgcatcctgccggcggacgcaccccgccccgcatcccgcgaccttcttcctctgttgcctccacgggagccttctcacctccacgcgtcgttgcgtcagatccgtctgtcgctagagaaaaccctacccaatgaccacatgcattcttactgggacgacgccactattggcgcagaggagcagatatggcgcatcgcatgtactccgtcgctgtcctcctcgaatccgcctctaatttctccaacgccataggcaaggagatgcctgcccaccgccccggcaccccccgccctcgccgcgcacaccccaagccccgcggatcacagtcgcctctaccctagcgggagccgcgcccgcacccacattacccgcacgatggcaagaggcagcggcacaaggccacggcgactcctcgagcagaggaacccgaccgagcgcagcaacgcaaatcttcaatctcaaatccgtgctgcgagaaaagtttcactcctctggctgctccttgtgtgtgtgtgtccactaatgcgttcagcattgcaactgctgctgccaaatgctgaggcagcagtatacataactggttcaatttgtgcagcattcgttgccaacatagatggtcactctgataaaactgtcaccttcaatgggaggatgctcagttggaaaaagttagattcgcaggttttgagaccgaacctatatgtaccaccaaaacaatatcctaattgcaagtgaccttcctctcatcatcgcgattgactagcaaccaatggccctgataggtgttatgcaagtgtagggcgacatcactaatgctcggacaacggatgtggcatttcgatggatgcaaagcagacttggttgtttgcgatggaggcttcggatagtaagatatcatatgagtgcaagagaactactctcaccattaactataacaaattttgtcaccaaaatttggtggctggtggatctacttaagaatcaaaagtcagacaaggtggacatcaccatccaaccggaggagcaggaagccatgaatgatgttctagcagccagccatgaccgcgtccacgtcatcaactttgacatcaagcaggggctacagtggccgggcctcctccagaaaaagaggaattgaagcagtatctgactcgaacatttttgtagaaaacttggtagaaaaagaggaattcctgcatacattttcgaaggaatgtgaatatatcagaactgcagtgacaaatggtagtgccattaagcatgatggctcatatgaatcagatcctgcagttgagattgttcgagttgaactccaaggtgctgctgcatttcttttattctcgtctggttccacgcctatatatattggagaacatggatgggaaatgcttctggtagtaaaaaaggcaacacaagaggctggttcaaaatttgaactgctaggttttgcatctgtgcataacttctatcattatcctgagagtattcgcttacgaatcagccagatacttgtgttgccaccttatcagggtgaaggccatggtcttggtcttcttgaagcaatcaattatattgcacagtctgagaacatttacgatgttacaatagaaagcccttctgattacctgcagtatgtgagatcatccattgactgcctctgtttgctcatgtttgatccgatcaaacctgcacttggtgctattgtctcgtctctgaaggagaccaacctgtcaaaaagggcccaaagtttgagaatggttccaccggttgacctgatggagactcagccagaggatctcaggacgcaggagcaacagctcaatgagctcgtggacatccaaatcgaggagattgatggggtcgccaagaacgtcacttcacgtggcaaggataagatggcagagctggcggttcaatgaatctgggtgaggttcctacttcaaacgatgttaaaatgttgtcgtagcttatctggtgaggtctcttttacgagttggcttcttggtagaaagggaatgtcacggcataggcactgagtagattgtcacgacagattattatatacttcaattctggaatatttgatggaaatgctattttagattgcttggtaagtgggaaccgcctcaaatcacagaagtagaagcagcttccgattcagccggaaccatttcttcaaaaatgttctattatagaataaacaaggcttaggagatagaaaacattatttacaatataaatatgtaatattattataaatgtaccgactcaaataaaatgaactggtattgaa

SEQ ID NO: 216750 - DNA, 1297 bp, Zea Mays
atggagtcggccaatgaagagcggaaggaggagagggtcaacgggggctcaatagctggttggtgtagatgttgctggtttgagaatagtggcggcaagatctcatggagagaagctatgcggactcccagaaaaggcgaaatcatcgtgcgattgtggagattgtcgatgggaggctccaccagcgctagggtgcggccaacaagacgctgctcgccaccgcttgagtcggtagtgagatcttagggggagaagccctgcagcccccatgctcccactccctcctgcaccccacgcttaccggcgagccgctcgacctcattggagcttgccaagccgtcatgtgccccagtgcggtggtcgacatcatccacggcgtcgaccgcgtgctggtcctgcgctcaatgcaggagtccttcaactggcggcggtggagcaaccgtactaccacagcgcgtacacaggacgcagagaacaactccagaaggcgagccccaacccctagatctgcgatgcagtcttctcaactgaaaaaagagggcagagaacaactccagaaggcgagccccaaccccagatctgcgttgtagtcttctcgactgaaaaaagagggcatctctaccgccaccaaccactagcaggcggcagacgttgctggcaataggcaatggcatgcatcaggaaatgccaggcgatggtgcatgcatgatgaagctgttgtccattatattgacatgattgatcagaccacgcttggtcaccggatgatcaagaaacaattcaacaagactccaagagctggctggcaaatcgatccttttggacattctgcagttcaagcttatttgcttggagcagaggatgacatactgatgtttgactataatgttgaagaacgagttaatgattttgttgttgtagccatagaacaggatggccaagtgcatgcactgtattctaccccatccatttacacagatgcaaaacatttgtcaaatgtatcttggccagtaaaatatgatgagtatttcccctatgctgattcaaaaaattcatattggactgggtactatacaagccgtccaactttcaagcgatatgttcgagtgttgagtggttattacctggctgcacgtcaaatagaatttttagtaggtaggaggagttccttagggttgttcacgaccagcttggaagacccaatggcaattgcccagcatcatgatgcagtctcaggtacaacaaacaacacacgacagatgactacttgaaacaccttgctcttggagcatctaag

SEQ ID NO: 216751 - DNA, 1655 bp, Zea Mays
atggagtcggccaatgaagagcggaaggaggagagggtcaacgggggctcaatagctggttggtgtagatgttgctggtttgagaatagtggcggcaagatctcatggagagaagctatgcggactcccagaaaaggcgaaatcatcgtgcgattgtggagattgtcgatgggaggctccaccagcgctagggtgcggccaacaagacgctgctcgccaccgcttgagtcggtagtgagatcttagggggagaagccctgcagcccccatgctcccactccctcctgcaccccacgcttaccggcgagccgctcgacctcattggagcttgccaagccgtcatgtgccccagtgcggtggtcgacatcatccacggcgtcgaccgcgtgctggtcctgcgctcaatgcaggagtccttcaactggcggcggtggagcaaccgtactaccacagcgcgtacacaggacgcagagaacaactccagaaggcgagccccaacccctagatctgcgatgcagtcttctcaactgaaaaaagagggcagagaacaactccagaaggcgagccccaaccccagatctgcgttgtagtcttctcgactgaaaaaagagggcatctctaccgccaccaaccactagcaggcggcagacgttgctggcaataggcaatggcatgcatcagggacggagatctgtcgtcgaagaccacctcattgtttctcatggcaggcttgcttgctctagcttggcacaatatgtcgcttcaggcttcagtcggttatgtgatcaccagaacattatgggctctaaagtaggacttttgagaaatgccaggcgatggtgcatgcatgatgaagctgttgtccattatattgacatgattgatcagaccacgcttggtcaccggatgatcaagaaacaattcaacaagactccaagagctggctggcaaatcgatccttttggacattctgcagttcaagcttatttgcttggagcagaggatgacatactgatgtttgactataatgttgaagaacgagttaatgattttgttgttgtagccatagaacaggtaaactttcaatattgttgccacaggctgtagttcactagagcaattaattatgcttcgttcaaagtaagaaattggatttaattaacttgtgatgatcaggcaaattttacgcgtacaaaccacataatgtggaccatgggagatgattttagttatcagtatgcagaatcttggttccggaatatggacaaacttatctatcatgtgaacaaggatggccaagtgcatgcactgtattctaccccatccatttacacagatgcaaaacatttgtcaaatgtatcttggccagtaaaatatgatgagtatttcccctatgctgattcaaaaaattcatattggactgggtactatacaagccgtccaactttcaagcgatatgttcgagtgttgagtggttattacctggctgcacgtcaaatagaatttttagtaggtaggaggagttccttagggttgttcacgaccagcttggaagacccaatggcaattgcccagcatcatgatgcagtctcaggtacaacaaacaacacacgacagatgactacttgaaacaccttgctcttggagcatctaag

SEQ ID NO: 216752 - DNA, 2241 bp, Zea Mays
atggagtcggccaatgaagagcggaaggaggagagggtcaacgggggctcaatagctggttggtgtagatgttgctggtttgagaatagtggcggcaagatctcatggagagaagctatgcggactcccagaaaaggcgaaatcatcgtgcgattgtggagattgtcgatgggaggctccaccagcgctagggtgcggccaacaagacgctgctcgccaccgcttgagtcggtagtgagatcttagggggagaagccctgcagcccccatgctcccactccctcctgcaccccacgcttaccggcgagccgctcgacctcattggagcttgccaagccgtcatgtgccccagtgcggtggtcgacatcatccacggcgtcgaccgcgtgctggtcctgcgctcaatgcaggagtccttcaactggcggcggtggagcaaccgtactaccacagcgcgtacacaggacgcagagaacaactccagaaggcgagccccaacccctagatctgcgatgcagtcttctcaactgaaaaaagagggcagagaacaactccagaaggcgagccccaaccccagatctgcgttgtagtcttctcgactgaaaaaagagggcatctctaccgccaccaaccactagcaggcggcagacgttgctggcaataggcaatggcatgcatcagggacggagatctgtcgtcgaagaccacctcattgtttctcatggcaggcttgcttgctctagcttggcacaatatgtcgcttcaggcttcagtcggttatgtgatcaccagaacattatgggctctaaagtaggacttttgagaaatgccaggcgatggtgcatgcatgatgaagctgttgtccattatattgacatgattgatcagaccacgcttggtcaccggatgatcaagaaacaattcaacaagactccaagagctggctggcaaatcgatccttttggacattctgcagttcaagcttatttgcttggagcagaggtaactactattaacatcatatttgggatgaagccatttttttaccaaaaccagtatgataagctcctacatttttctaaacagaaaatacaattctcataattatcatttttcagtctggcattgtaggcacatgatatactaattaaagttactaaatgaatattatatttgtacggtggatgcaaatgttaagccttagtgattttcctgtgtttaattctcaatacattttttttcttgacaatcaacatgcgactgtgcaaaacatatgaatataacattttttattgcaaactgtagcttggcttcgattctttgcattttgcaagaatcgattaccaagataagaaaaagtgtaaagctggcaaaggcttagaggttatatagtgtggctcaagaacttttggttcatcttcacaggttcttattcttcttacaccacaattagttctgtctattccattcattagcacaatggatcgaattttgatttttttgaagggaatttgactctgtggtggttaaattgcatatatttacaaatgtatttcctgtcgattatagccctccagatggctttggctttgaagttttagatgaaaatatcttgcatgtctaggtacatgtacgcaaccatttccatgctcctcgaaccttacatgcatcttagattgaaatttgtaggatgacatactgatgtttgactataatgttgaagaacgagttaatgattttgttgttgtagccatagaacaggtaaactttcaatattgttgccacaggctgtagttcactagagcaattaattatgcttcgttcaaagtaagaaattggatttaattaacttgtgatgatcaggcaaattttacgcgtacaaaccacataatgtggaccatgggagatgattttagttatcagtatgcagaatcttggttccggaatatggacaaacttatctatcatgtgaacaagctatgctgattcaaaaaattcatattggactgggtactatacaagccgtccaactttcaagcgatatgttcgagtgttgagtggttattacctggctgcacgtcaaatagaatttttagtaggtaggaggagttccttagggttgttcacgaccagcttggaagacccaatggcaattgcccagcatcatgatgcagtctcaggtacaacaaacaacacacgacagatgactacttgaaacaccttgctcttggagcatctaag

SEQ ID NO: 216753 - DNA, 866 bp, Zea Mays
atggagtcggccaatgaagagcggaaggaggagagggtcaacgggggctcaatagctggttggtgtagatgttgctggtttgagaatagtggcggcaagatctcatggagagaagctatgcggactcccagaaaaggcgaaatcatcgtgcgattgtggagattgtcgatgggaggctccaccagcgctagggcacaatatgtcgcttcaggcttcagtcggttatgtgatcaccagaacattatgggctctaaagtaggacttttgagaaatgccaggcgatggtgcatgcatgatgaagctgttgtccattatattgacatgattgatcagaccacgcttggtcaccggatgatcaagaaacaattcaacaagactccaagagctggctggcaaatcgatccttttggacattctgcagttcaagcttatttgcttggagcagagtatgcagaatcttggttccggaatatggacaaacttatctatcatgtgaacaaggatggccaagtgcatgcactgtattctaccccatccatttacacagatgcaaaacatttgtcaaatgtatcttggccagtaaaatatgatgagtatttcccctatgctgattcaaaaaattcatattggactgggtactatacaagccgtccaactttcaagcgatatgttcgagtgttgagtggttattacctggctgcacgtcaaatagaatttttagtaggtaggaggagttccttagggttgttcacgaccagcttggaagacccaatggcaattgcccagcatcatgatgcagtctcaggtacaacaaacaacacacgacagatgactacttgaaacaccttgctcttggagcatctaag

SEQ ID NO: 216754 - DNA, 2078 bp, Zea Mays
atggagtcggccaatgaagagcggaaggaggagagggtcaacgggggctcaatagctggttggtgtagatgttgctggtttgagaatagtggcggcaagatctcatggagagaagctatgcggactcccagaaaaggcgaaatcatcgtgcgattgtggagattgtcgatgggaggctccaccagcgctagggtgcggccaacaagacgctgctcgccaccgcttgagtcggtagtgagatcttagggggagaagccctgcagcccccatgctcccactccctcctgcaccccacgcttaccggcgagccgctcgacctcattggagcttgccaagccgtcatgtgccccagtgcggtggtcgacatcatccacggcgtcgaccgcgtgctggtcctgcgctcaatgcaggagtccttcaactggcggcggtggagcaaccgtactaccacagcgcgtacacaggacgcagagaacaactccagaaggcgagccccaacccctagatctgcgatgcagtcttctcaactgaaaaaagagggcagagaacaactccagaaggcgagccccaaccccagatctgcgttgtagtcttctcgactgaaaaaagagggcatctctaccgccaccaaccactagcaggcggcagacgttgctggcaataggcaatggcatgcatcagggacggagatctgtcgtcgaagaccacctcattgtttctcatggcaggcttgcttgctctagcttggcacaatatgtcgcttcaggcttcagtcggttatgtgatcaccagaacattatgggctctaaagtaggacttttgagaaatgccaggcgatggtgcatgcatgatgaagctgttgtccattatattgacatgattgatcagaccacgcttggtcaccggatgatcaagaaacaattcaacaagactccaagagctggctggcaaatcgatccttttggacattctgcagttcaagcttatttgcttggagcagaggtaactactattaacatcatatttgggatgaagccatttttttaccaaaaccagtatgataagctcctacatttttctaaacagaaaatacaattctcataattatcatttttcagtctggcattgtaggcacatgatatactaattaaagttactaaatgaatattatatttgtacggtggatgcaaatgttaagccttagtgattttcctgtgtttaattctcaatacattttttttcttgacaatcaacatgcgactgtgcaaaacatatgaatataacattttttattgcaaactgtagcttggcttcgattctttgcattttgcaagaatcgattaccaagataagaaaaagtgtaaagctggcaaaggcttagaggttatatagtgtggctcaagaacttttggttcatcttcacaggatgacatactgatgtttgactataatgttgaagaacgagttaatgattttgttgttgtagccatagaacaggtaaactttcaatattgttgccacaggctgtagttcactagagcaattaattatgcttcgttcaaagtaagaaattggatttaattaacttgtgatgatcaggcaaattttacgcgtacaaaccacataatgtggaccatgggagatgattttagttatcagtatgcagaatcttggttccggaatatggacaaacttatctatcatgtgaacaaggatggccaagtgcatgcactgtattctaccccatccatttacacagatgcaaaacatttgtcaaatgtatcttggccagtaaaatatgatgagtatttcccctatgctgattcaaaaaattcatattggactgggtactatacaagccgtccaactttcaagcgatatgttcgagtgttgagtggttattacctggctgcacgtcaaatagaatttttagtaggtaggaggagttccttagggttgttcacgaccagcttggaagacccaatggcaattgcccagcatcatgatgcagtctcaggtacaacaaacaacacacgacagatgactacttgaaacaccttgctcttggagcatctaag

SEQ ID NO: 216755 - DNA, 1274 bp, Zea Mays
ctttcgtaggtgctagctactaccatataccatatactctcacacaaagattagtacagctagcatggctaatgactccttgacgaggggccacataatcggggatgtcttagacccgtttactagctcagtgtctctaagtgtcctgtatgatggcagaccagtgtttgatgggatggagtttcgggcgtcggcggtgtcggtgaaacctagagttgagattggaggtgatgattttcgagtggcctataccctagtaagccatcacgtactccgcagatcgagtccatttggcgcgcggtaggccatatctatggccaagatgtctcgactactctccaaactctcatgtccaagtgacatccatggcttttggctcactgtgtgtgacggctaaatcagtctcctcgatcgtgcccatagctcggttgactacaaagattggctcatgctaataaatatatagtagtattatacactgagagagacactaacacccccccccccaaaaaaaaagtgcagggatttctgatcagcccagccccgaaaaaatgctcaggtttacttttaattccctaacatgttgaccatgtgtttgtgttaatgtaaatatattaggttatggtggatcctgatgcgcctaatcccagcaaccctagcctgcgggaatacttgcattggatggttactgacatcccagcatcaacagatgatagcttcggccgagagctcataccatatgagagcccaagccccaccatgggcatccaccgtcttgtgttggtgctctaccagcaattggggcggggcacggtgtttgcgccgcaagttcgtcagaacttcaacttgcgtaatttcgcacgccgtttcaacctcggcaagcctgtggccgcgacgtacttcaactgtcagcggcaaacaggcacaggtgggagaaggttcacttgtgtttttgatcatgtcgttcaaggtgaaggccggcaagcttgaacctactactactagtaacgttcgcgtgtgcttatatggccgtatcggcgtacactacgtagcatgaaagctagctagaaataaataaagatgtatttctttcgcacatgtagctaggcttttataaaggcgtacctccaagggtattatgtccggcttttaattaataatcgcgtgataagggtggttagtataccgagtttgtactgctgtgatatttctgtcacaccttggcaataattgatatatatatatatatatatatatatatatatggatctctg

SEQ ID NO: 216756 - DNA, 4558 bp, Zea Mays
agcacagaaaatcccaaattcccaccacgcaggtcgcaggcgcacccgtctctcccttcttcctcctctccctcttctacacccgacaggcacaggcacaggcacaacgcatcgtccccctccctttccagcgccccaaccacaaggaacagccgaacaggtcggggtcaagccatcggaccttgattccgcttgccctcctgctttatcccgccgccgccgtcgtcgtctcaaccgcccactccttcctctccctgccgctcctgcgaatcgcgaaatcggagacccccggaccgccctccaatgacgaccatgagcgacgatggtgaccgcacctgcccgctctgtgccgaggagatggacatcactgaccagcagctcaagccatgcaaatgcggttatgatatttgtgtttggtgctggcaccacatcatagacatggctgagaaggaggaaacagtgggccgctgccctgcatgccgcacatgctatgacaaggacaggatcgtcaagatggctgccacttgtgacaggacagtggcagagaaaaatgcagagaagaagcacaggacccaaaaggttaagccaaaggcagcaccttcagcagcagcaacatcaactgtagaatctaagaagcatctggctagtgtcagggttatccagagaaatctggtgtatataattgggctacctgcacatttatgcaatgagagcgtacttgagtgtagggagtactttggccaatatgggaaaattttgaaggtttcagtttcccgtccgactgggcctccctctcagcaggcatcagcaaacagcaatattagtgtctatattacttatgccaaagaagaagaggccatccggtgtattcaagctgtacacaattttgtcttggaagggaaagtgttaagggcatgttttggtactacgaagtattgccatgcatggctgcgaaacatgacatgtgggaatccagattgtctctatttgcatgatgtaggcagtcaggaggatagttttactaaagatgagatcatctcagcatatacaaggactagagtccctcagatggcatctggtgtttcgcaaagacgcacaggcactgtgttgcctcctccaggagatgatttctcttacagtgcggtggtttcagccaagcatacatttaagaatggaacacttaataccaccagtcagcccagactttcacctccaaacagtagttctgggaggtccacgcttccatcagctgcctcatgggggcagcgtgatttgaatgccaggacaacagctactggagcgacatcgtcacaatctcatacaaaaccaaaatcagaatcacaaagtaatccattttcaagttcttcagtattttcctgtacaaaaacaccctcttcatggaatgatgatacaagtacagcagcaaaaatatctgaaggacagcaactgtcagaaaaagagtctagaaccttgcagccgtataagcctggtatttcaaaggaaacacaagctttatcatcactggagtcatcactggacatagacttctcaacaataccttcagcttggaatgacgatgacattgtagtaccagatgtgatgccaaaaggaagtgatgaaaatcaagttgcaaataaaaatggtgagctaacccatccagcatccaagtcactggttttatctaagaaagacataaaaatgaacattaccagcaaaactccttcagattttgtatcaagtccagcaatatctaaatcagatgtaagtactagtgatggtgaccactcactcaccaatattactcctaaatgccttgcttcaaatgctgtagaatgccaatctagtcatactgctgtggagaaaatgttggaggatattggatccaaggacactgacatggagaagctatctgctcagatatcttcagtaacattaggtggcaacgacgagattcagagtatggcaggaaatcaacaaccagatgtaatgccatgcacatctgttgatgtgctcatggatcagaattttggcagagacctagctcatcccaatcctgacgagctcttattgccttctgaaaataaggatagtattgtttcttgtcaatatagttctgataagcgtcttgattggagtttggagatgcaaaattgtagcgttactcctttaaatgatagaatggactctgcactgctcactgacaaaattcatagtagacagctggatggttcagagcaatcatcatattcatcatttgttgaatttcctagtacagtggatacctcattgtggaatgatacagaaaataacgctgcattgacgattgacaatataacttcttcacagatgcagccagggttttcttcaactgataacacttatgccttgctaaatggaggtcaagatgggctaggtactgtatatacacatgataatgtttctgtatatacacatggcaatgtttctggacatcctggaatgggaagtcatcaccatagagcaatgggttcattaagaaacaatagtataggaagttttgacaagaccataagcgtaaataagtatgaaagaagaataatttctgatacgttgtcagagtttaatccatgggatgattcatattcgactgctaacaattttgctaggatgcttagggaatctaaaaataatgatgtccattgcattgcgccttcatggaaatcaggaaccgggatcaaagagtccagattttcatttgctagacaggataaccaaggaaacttgtttgattcatctctcagaaactgtggtactggtactgagcagaatttcagtttgctaccccagaattctcgaggaaatatttaccagaatggccttgcattccaatctctagagaatgaattttcaaacaataactctcctggtgtattagatatggcaactactgaatttgctttctcaggtacatcgatgtctaaaatatctgcccccccaggattttcggcaccaacaagagtaccccctcctggattttctactgcatttccatcccaggatagtttgaaccccactcctgtgtttccttctggaattttgtgccatggcgggtctatcccccctcctagattctcttcattttcttctggaatttcaactcaggaagtgtctaagcctcctactagaccgccttctccattttcttctagattttcatcacaggacggtcttgacccctcttctagattccctttttcttctggattttcatcacatgatgggtctaatcagtcgtatggctcaacgaacccaggtttgtttcctgcctcttattttcctagaactagtttgatttctcatcatgccttttgtggtgcttcgcagaaaatcttctccggggtactgttcagggtggcaacagtaatcattatcaatctcagtttggaaggcactcaagtgacatggagtttgatgatcctgctatattagccatgggcaaagggctgatgcctggaattggcgattcagggctggagatgaaaaatactcctgcttttcaagcacagttgcaaccagcaagtagtgatccaagatttcagttacatgtacagccaaatgtgcagtctcgtcaaaacatgagattcacagaccctatgcaagatggtttgaaccatatgaacgataattacctggcatccagatttttagctcagaaccagggtcctctatctccttatgtgcagattccgcaacaacccagaaactcgcaggttataaatggtcactgggacgggtggagtgatttgagacaagggaataacgctcctatgtcagacatgtccaggatattatatccaagtgaagtgaacaagttgcatatgctgggttcaaatgatgtccataacagagcctttggaatgtgatcgtctcctgggataatgtgcgactttgagctgacatgttcaacttggggcgttttgtgcaagtaactggttgcacaacacatagtatacctgaggtggttaatggtgttgtgctcatgagctggcacacgactatttattgctgttggagttgaccaaaatgaaccttagttttggtccatccatttggaattaccaggttcattctcgtctatgatttgtgaagcttgaatgaaaagaaagattacgtgcctgagaagaacaaggcagctgaagttgaaatagatagagatatgtctattatgggatgtggtgtgacttgcgagcgaaagagatgaagaagattaggtgggcttggcttgatggcagcttgttttttcttgtgtcttgtacatgatgatattggtcggtggttgtatatgacttgtgatcgacggtggctgcattaacctgtagtggttgcccttgctccttcctgcctgttttgtttgcagctcctcctgttttgcatagtttatgctgattaagggaattggtgaaagtctagtgttacccatggtataataatagggaactggtttctttgttagcattacttcatttgtctaaaaaaaatccgttaaccggctctgataccaattgaaagtcgactagag

SEQ ID NO: 216757 - DNA, 4510 bp, Zea Mays
agcacagaaaatcccaaattcccaccacgcaggtcgcaggcgcacccgtctctcccttcttcctcctctccctcttctacacccgacaggcacaggcacaggcacaacgcatcgtccccctccctttccagcgccccaaccacaaggaacagccgaacaggtcggggtcaagccatcggaccttgattccgcttgccctcctgctttatcccgccgccgccgtcgtcgtctcaaccgcccactccttcctctccctgccgctcctgcgaatcgcgaaatcggagacccccggaccgccctccaatgacgaccatgagcgacgatggtgaccgcacctgcccgctctgtgccgaggagatggacatcactgaccagcagctcaagccatgcaaatgcggttatgatatttgtgtttggtgctggcaccacatcatagacatggctgagaaggaggaaacagtgggccgctgccctgcatgccgcacatgctatgacaaggacaggatcgtcaagatggctgccacttgtgacaggacagtggcagagaaaaatgcagagaagaagcacaggacccaaaaggttaagccaaaggcagcaccttcagcagcagcaacatcaactgtagaatctaagaagcatctggctagtgtcagggttatccagagaaatctggtgtatataattgggctacctgcacatttatgcaatgagagcgtacttgagtgtagggagtactttggccaatatgggaaaattttgaaggtttcagtttcccgtccgactgggcctccctctcagcaggcatcagcaaacagcaatattagtgtctatattacttatgccaaagaagaagaggccatccggtgtattcaagctgtacacaattttgtcttggaagggaaagtgttaagggcatgttttggtactacgaagtattgccatgcatggctgcgaaacatgacatgtgggaatccagattgtctctatttgcatgatgtaggcagtcaggaggatagttttactaaagatgagatcatctcagcatatacaaggactagagtccctcagatggcatctggtgtttcgcaaagacgcacaggcactgtgttgcctcctccaggagatgatttctcttacagtgcggtggtttcagccaagcatacatttaagaatggaacacttaataccaccagtcagcccagactttcacctccaaacagtagttctgggaggtccacgcttccatcagctgcctcatgggggcagcgtgatttgaatgccaggacaacagctactggagcgacatcgtcacaatctcatacaaaaccaaaatcagaatcacaaagtaatccattttcaagttcttcagtattttcctgtacaaaaacaccctcttcatggaatgatgatacaagtacagcagcaaaaatatctgaaggacagcaactgtcagaaaaagagtctagaaccttgcagccgtataagcctggtatttcaaaggaaacacaagctttatcatcactggagtcatcactggacatagacttctcaacaataccttcagcttggaatgacgatgacattgtagtaccagatgtgatgccaaaaggaagtgatgaaaatcaagttgcaaataaaaatggtgagctaacccatccagcatccaagtcactggttttatctaagaaagacataaaaatgaacattaccagcaaaactccttcagattttgtatcaagtccagcaatatctaaatcagatgtaagtactagtgatggtgaccactcactcaccaatattactcctaaatgccttgcttcaaatgctgtagaatgccaatctagtcatactgctgtggagaaaatgttggaggatattggatccaaggacactgacatggagaagctatctgctcagatatcttcagtaacattaggtggcaacgacgagattcagagtatggcaggaaatcaacaaccagatgtaatgccatgcacatctgttgatgtgctcatggatcagaattttggcagagacctagctcatcccaatcctgacgagctcttattgccttctgaaaataaggatagtattgtttcttgtcaatatagttctgataagcgtcttgattggagtttggagatgcaaaattgtagcgttactcctttaaatgatagaatggactctgcactgctcactgacaaaattcatagtagacagctggatggttcagagcaatcatcatattcatcatttgttgaatttcctagtacagtggatacctcattgtggaatgatacagaaaataacgctgcattgacgattgacaatataacttcttcacagatgcagccagggttttcttcaactgataacacttatgccttgctaaatggaggtcaagatgggctaggtactgtatatacacatgataatgtttctgtatatacacatggcaatgtttctggacatcctggaatgggaagtcatcaccatagagcaatgggttcattaagaaacaatagtataggaagttttgacaagaccataagcgtaaataagtatgaaagaagaataatttctgatacgttgtcagagtttaatccatgggatgattcatattcgactgctaacaattttgctaggatgcttagggaatctaaaaataatgatgtccattgcattgcgccttcatggaaatcaggaaccgggatcaaagagtccagattttcatttgctagacaggataaccaaggaaacttgtttgattcatctctcagaaactgtggtactggtactgagcagaatttcagtttgctaccccagaattctcgaggaaatatttaccagaatggccttgcattccaatctctagagaatgaattttcaaacaataactctcctggtgtattagatatggcaactactggattttcggcaccaacaagagtaccccctcctggattttctactgcatttccatcccaggatagtttgaaccccactcctgtgtttccttctggaattttgtgccatggcgggtctatcccccctcctagattctcttcattttcttctggaatttcaactcaggaagtgtctaagcctcctactagaccgccttctccattttcttctagattttcatcacaggacggtcttgacccctcttctagattccctttttcttctggattttcatcacatgatgggtctaatcagtcgtatggctcaacgaacccaggtttgtttcctgcctcttattttcctagaactagtttgatttctcatcatgccttttgtggtgcttcgcagaaaatcttctccggggtactgttcagggtggcaacagtaatcattatcaatctcagtttggaaggcactcaagtgacatggagtttgatgatcctgctatattagccatgggcaaagggctgatgcctggaattggcgattcagggctggagatgaaaaatactcctgcttttcaagcacagttgcaaccagcaagtagtgatccaagatttcagttacatgtacagccaaatgtgcagtctcgtcaaaacatgagattcacagaccctatgcaagatggtttgaaccatatgaacgataattacctggcatccagatttttagctcagaaccagggtcctctatctccttatgtgcagattccgcaacaacccagaaactcgcaggttataaatggtcactgggacgggtggagtgatttgagacaagggaataacgctcctatgtcagacatgtccaggatattatatccaagtgaagtgaacaagttgcatatgctgggttcaaatgatgtccataacagagcctttggaatgtgatcgtctcctgggataatgtgcgactttgagctgacatgttcaacttggggcgttttgtgcaagtaactggttgcacaacacatagtatacctgaggtggttaatggtgttgtgctcatgagctggcacacgactatttattgctgttggagttgaccaaaatgaaccttagttttggtccatccatttggaattaccaggttcattctcgtctatgatttgtgaagcttgaatgaaaagaaagattacgtgcctgagaagaacaaggcagctgaagttgaaatagatagagatatgtctattatgggatgtggtgtgacttgcgagcgaaagagatgaagaagattaggtgggcttggcttgatggcagcttgttttttcttgtgtcttgtacatgatgatattggtcggtggttgtatatgacttgtgatcgacggtggctgcattaacctgtagtggttgcccttgctccttcctgcctgttttgtttgcagctcctcctgttttgcatagtttatgctgattaagggaattggtgaaagtctagtgttacccatggtataataatagggaactggtttctttgttagcattacttcatttgtctaaaaaaaatccgttaaccggctctgataccaattgaaagtcgactagag

SEQ ID NO: 216758 - DNA, 4431 bp, Zea Mays
cacgcaggtcgcaggcgcacccgtctctcccttcttcctcctctccctcttctacacccgacaggcacaggcacaggcacaacgcatcgtccccctccctttccagcgccccaaccacaaggaacagccgaacaggtcggggtcaagccatcggaccttgattccgcttgccctcctgctttatcccgccgccgccgtcgtcgtctcaaccgcccactccttcctctccctgccgctcctgcgaatcgcgaaatcggagacccccggaccgccctccaatgacgaccatgagcgacgatggtgaccgcacctgcccgctctgtgccgaggagatggacatcactgaccagcagctcaagccatgcaaatgcggttatgatatttgtgtttggtgctggcaccacatcatagacatggctgagaaggaggaaacagtgggccgctgccctgcatgccgcacatgctatgacaaggacaggatcgtcaagatggctgccacttgtgacaggacagtggcagagaaaaatgcagagaagaagcacaggacccaaaaggttaagccaaaggcagcaccttcagcagcagcaacatcaactgtagaatctaagaagcatctggctagtgtcagggttatccagagaaatctggtgtatataattgggctacctgcacatttatgcaatgagagcgtacttgagtgtagggagtactttggccaatatgggaaaattttgaaggtttcagtttcccgtccgactgggcctccctctcagcaggcatcagcaaacagcaatattagtgtctatattacttatgccaaagaagaagaggccatccggtgtattcaagctgtacacaattttgtcttggaagggaaagtgttaagggcatgttttggtactacgaagtattgccatgcatggctgcgaaacatgattgtctctatttgcatgatgtaggcagtcaggaggatagttttactaaagatgagatcatctcagcatatacaaggactagagtccctcagatggcatctggtgtttcgcaaagacgcacaggcactgtgttgcctcctccaggagatgatttctcttacagtgcggtggtttcagccaagcatacatttaagaatggaacacttaataccaccagtcagcccagactttcacctccaaacagtagttctgggaggtccacgcttccatcagctgcctcatgggggcagcgtgatttgaatgccaggacaacagctactggagcgacatcgtcacaatctcatacaaaaccaaaatcagaatcacaaagtaatccattttcaagttcttcagtattttcctgtacaaaaacaccctcttcatggaatgatgatacaagtacagcagcaaaaatatctgaaggacagcaactgtcagaaaaagagtctagaaccttgcagccgtataagcctggtatttcaaaggaaacacaagctttatcatcactggagtcatcactggacatagacttctcaacaataccttcagcttggaatgacgatgacattgtagtaccagatgtgatgccaaaaggaagtgatgaaaatcaagttgcaaataaaaatggtgagctaacccatccagcatccaagtcactggttttatctaagaaagacataaaaatgaacattaccagcaaaactccttcagattttgtatcaagtccagcaatatctaaatcagatgtaagtactagtgatggtgaccactcactcaccaatattactcctaaatgccttgcttcaaatgctgtagaatgccaatctagtcatactgctgtggagaaaatgttggaggatattggatccaaggacactgacatggagaagctatctgctcagatatcttcagtaacattaggtggcaacgacgagattcagagtatggcaggaaatcaacaaccagatgtaatgccatgcacatctgttgatgtgctcatggatcagaattttggcagagacctagctcatcccaatcctgacgagctcttattgccttctgaaaataaggatagtattgtttcttgtcaatatagttctgataagcgtcttgattggagtttggagatgcaaaattgtagcgttactcctttaaatgatagaatggactctgcactgctcactgacaaaattcatagtagacagctggatggttcagagcaatcatcatattcatcatttgttgaatttcctagtacagtggatacctcattgtggaatgatacagaaaataacgctgcattgacgattgacaatataacttcttcacagatgcagccagggttttcttcaactgataacacttatgccttgctaaatggaggtcaagatgggctaggtactgtatatacacatgataatgtttctgtatatacacatggcaatgtttctggacatcctggaatgggaagtcatcaccatagagcaatgggttcattaagaaacaatagtataggaagttttgacaagaccataagcgtaaataagtatgaaagaagaataatttctgatacgttgtcagagtttaatccatgggatgattcatattcgactgctaacaattttgctaggatgcttagggaatctaaaaataatgatgtccattgcattgcgccttcatggaaatcaggaaccgggatcaaagagtccagattttcatttgctagacaggataaccaaggaaacttgtttgattcatctctcagaaactgtggtactggtactgagcagaatttcagtttgctaccccagaattctcgaggaaatatttaccagaatggccttgcattccaatctctagagaatgaattttcaaacaataactctcctggtgtattagatatggcaactactggtacatcgatgtctaaaatatctgcccccccaggattttcggcaccaacaagagtaccccctcctggattttctactgcatttccatcccaggatagtttgaaccccactcctgtgtttccttctggaattttgtgccatggcgggtctatcccccctcctagattctcttcattttcttctggaatttcaactcaggaagtgtctaagcctcctactagaccgccttctccattttcttctagattttcatcacaggacggtcttgacccctcttctagattccctttttcttctggattttcatcacatgatgggtctaatcagtcgtatggctcaacgaacccagaaaatcttctccggggtactgttcagggtggcaacagtaatcattatcaatctcagtttggaaggcactcaagtgacatggagtttgatgatcctgctatattagccatgggcaaagggctgatgcctggaattggcgattcagggctggagatgaaaaatactcctgcttttcaagcacagttgcaaccagcaagtagtgatccaagatttcagttacatgtacagccaaatgtgcagtctcgtcaaaacatgagattcacagaccctatgcaagatggtttgaaccatatgaacgataattacctggcatccagatttttagctcagaaccagggtcctctatctccttatgtgcagattccgcaacaacccagaaactcgcaggttataaatggtcactgggacgggtggagtgatttgagacaagggaataacgctcctatgtcagacatgtccaggatattatatccaagtgaagtgaacaagttgcatatgctgggttcaaatgatgtccataacagagcctttggaatgtgatcgtctcctgggataatgtgcgactttgagctgacatgttcaacttggggcgttttgtgcaagtaactggttgcacaacacatagtatacctgaggtggttaatggtgttgtgctcatgagctggcacacgactatttattgctgttggagttgaccaaaatgaaccttagttttggtccatccatttggaattaccaggttcattctcgtctatgatttgtgaagcttgaatgaaaagaaagattacgtgcctgagaagaacaaggcagctgaagttgaaatagatagagatatgtctattatgggatgtggtgtgacttgcgagcgaaagagatgaagaagattaggtgggcttggcttgatggcagcttgttttttcttgtgtcttgtacatgatgatattggtcggtggttgtatatgacttgtgatcgacggtggctgcattaacctgtagtggttgcccttgctccttcctgcctgttttgtttgcagctcctcctgttttgcatagtttatgctgattaagggaattggtgaaagtctagtgttacccatggtataataatagggaactggtttctttgttagcattacttcatttgtctaaaaaaaatccgttaaccggctctgataccaattgaaagtcgactagag

SEQ ID NO: 216759 - DNA, 4207 bp, Zea Mays
caaggatttgttgattgatgccttacctgttcgagtctaggacgaccatgagcgacgatggtgaccgcacctgcccgctctgtgccgaggagatggacatcactgaccagcagctcaagccatgcaaatgcggttatgatatttgtgtttggtgctggcaccacatcatagacatggctgagaaggaggaaacagtgggccgctgccctgcatgccgcacatgctatgacaaggacaggatcgtcaagatggctgccacttgtgacaggacagtggcagagaaaaatgcagagaagaagcacaggacccaaaaggttaagccaaaggcagcaccttcagcagcagcaacatcaactgtagaatctaagaagcatctggctagtgtcagggttatccagagaaatctggtgtatataattgggctacctgcacatttatgcaatgagagcgtacttgagtgtagggagtactttggccaatatgggaaaattttgaaggtttcagtttcccgtccgactgggcctccctctcagcaggcatcagcaaacagcaatattagtgtctatattacttatgccaaagaagaagaggccatccggtgtattcaagctgtacacaattttgtcttggaagggaaagtgttaagggcatgttttggtactacgaagtattgccatgcatggctgcgaaacatgacatgtgggaatccagattgtctctatttgcatgatgtaggcagtcaggaggatagttttactaaagatgagatcatctcagcatatacaaggactagagtccctcagatggcatctggtgtttcgcaaagacgcacaggcactgtgttgcctcctccaggagatgatttctcttacagtgcggtggtttcagccaagcatacatttaagaatggaacacttaataccaccagtcagcccagactttcacctccaaacagtagttctgggaggtccacgcttccatcagctgcctcatgggggcagcgtgatttgaatgccaggacaacagctactggagcgacatcgtcacaatctcatacaaaaccaaaatcagaatcacaaagtaatccattttcaagttcttcagtattttcctgtacaaaaacaccctcttcatggaatgatgatacaagtacagcagcaaaaatatctgaaggacagcaactgtcagaaaaagagtctagaaccttgcagccgtataagcctggtatttcaaaggaaacacaagctttatcatcactggagtcatcactggacatagacttctcaacaataccttcagcttggaatgacgatgacattgtagtaccagatgtgatgccaaaaggaagtgatgaaaatcaagttgcaaataaaaatggtgagctaacccatccagcatccaagtcactggttttatctaagaaagacataaaaatgaacattaccagcaaaactccttcagattttgtatcaagtccagcaatatctaaatcagatgtaagtactagtgatggtgaccactcactcaccaatattactcctaaatgccttgcttcaaatgctgtagaatgccaatctagtcatactgctgtggagaaaatgttggaggatattggatccaaggacactgacatggagaagctatctgctcagatatcttcagtaacattaggtggcaacgacgagattcagagtatggcaggaaatcaacaaccagatgtaatgccatgcacatctgttgatgtgctcatggatcagaattttggcagagacctagctcatcccaatcctgacgagctcttattgccttctgaaaataaggatagtattgtttcttgtcaatatagttctgataagcgtcttgattggagtttggagatgcaaaattgtagcgttactcctttaaatgatagaatggactctgcactgctcactgacaaaattcatagtagacagctggatggttcagagcaatcatcatattcatcatttgttgaatttcctagtacagtggatacctcattgtggaatgatacagaaaataacgctgcattgacgattgacaatataacttcttcacagatgcagccagggttttcttcaactgataacacttatgccttgctaaatggaggtcaagatgggctaggtactgtatatacacatgataatgtttctgtatatacacatggcaatgtttctggacatcctggaatgggaagtcatcaccatagagcaatgggttcattaagaaacaatagtataggaagttttgacaagaccataagcgtaaataagtatgaaagaagaataatttctgatacgttgtcagagtttaatccatgggatgattcatattcgactgctaacaattttgctaggatgcttagggaatctaaaaataatgatgtccattgcattgcgccttcatggaaatcaggaaccgggatcaaagagtccagattttcatttgctagacaggataaccaaggaaacttgtttgattcatctctcagaaactgtggtactggtactgagcagaatttcagtttgctaccccagaattctcgaggaaatatttaccagaatggccttgcattccaatctctagagaatgaattttcaaacaataactctcctggtgtattagatatggcaactactggtacatcgatgtctaaaatatctgcccccccaggattttcggcaccaacaagagtaccccctcctggattttctactgcatttccatcccaggatagtttgaaccccactcctgtgtttccttctggaattttgtgccatggcgggtctatcccccctcctagattctcttcattttcttctggaatttcaactcaggaagtgtctaagcctcctactagaccgccttctccattttcttctagattttcatcacaggacggtcttgacccctcttctagattccctttttcttctggattttcatcacatgatgggtctaatcagtcgtatggctcaacgaacccagaaaatcttctccggggtactgttcagggtggcaacagtaatcattatcaatctcagtttggaaggcactcaagtgacatggagtttgatgatcctgctatattagccatgggcaaagggctgatgcctggaattggcgattcagggctggagatgaaaaatactcctgcttttcaagcacagttgcaaccagcaagtagtgatccaagatttcagttacatgtacagccaaatgtgcagtctcgtcaaaacatgagattcacagaccctatgcaagatggtttgaaccatatgaacgataattacctggcatccagatttttagctcagaaccagggtcctctatctccttatgtgcagattccgcaacaacccagaaactcgcaggttataaatggtcactgggacgggtggagtgatttgagacaagggaataacgctcctatgtcagacatgtccaggatattatatccaagtgaagtgaacaagttgcatatgctgggttcaaatgatgtccataacagagcctttggaatgtgatcgtctcctgggataatgtgcgactttgagctgacatgttcaacttggggcgttttgtgcaagtaactggttgcacaacacatagtatacctgaggtggttaatggtgttgtgctcatgagctggcacacgactatttattgctgttggagttgaccaaaatgaaccttagttttggtccatccatttggaattaccaggttcattctcgtctatgatttgtgaagcttgaatgaaaagaaagattacgtgcctgagaagaacaaggcagctgaagttgaaatagatagagatatgtctattatgggatgtggtgtgacttgcgagcgaaagagatgaagaagattaggtgggcttggcttgatggcagcttgttttttcttgtgtcttgtacatgatgatattggtcggtggttgtatatgacttgtgatcgacggtggctgcattaacctgtagtggttgcccttgctccttcctgcctgttttgtttgcagctcctcctgttttgcatagtttatgctgattaagggaattggtgaaagtctagtgttacccatggtataataatagggaactggtttctttgttagcattacttcatttgtctaaaaaaaatccgttaaccggctctgataccaattgaaagtcgactagag

SEQ ID NO: 216760 - DNA, 1000 bp, Zea Mays
atggatatgatagtactagccattaccaactcggtcgtttcgtcttctctccgatatcttcgccaggctcagagcggagttgtttcagttcagccaccgtctacggcgctgcagacacgtatggagaacgcgaacgagtccgaggaggaggcacagcgacgacgagtgcaggaggaagaagacagtagcagcagggcggcgacaaggtgggtggcggccaccgctgtcgagatcgaactggaggttttggagtgccccgtctgctaccggcctctcaagcctccggtgttccagtgtgcagttgggcatgcggtatgctcgtgttgctgcgccaagctcgccggcagaaactgccacacgtgcgggcgtgcggcggcgccaccggcttcagccgctgcttcgcgctggagcacgtcgtggagtccgtccgggtcccgtgcgccaacgcccggcgcgggtgccccgccaagacggcgtaccacggcaaggaagagcacgagaaggcatgcccgcacgccgagggcgaggccgacgccggccctgccattccacagcgcccagctgagcaaggtggaaacaggggcagtagagcccgaaacttggtcgtcgtagtactagtgcttgccagtattccagttgcgatccccgctgtccgtggcatcgtcgagcattttggcctaccagatccttgctcgtgcgtggcaacatgaatcttcacacagcgtttggtcttctgtgagcactctctaactttaccttctccgtcgtccatcgtccgtccttctgttaacgttttatcctagctgtttgttcgtgatttgaattctcggtgcaatcacgaacaattagttactttaccatggcagcttcttagtgtactaattgctgggcctgaaatttcacgtcttttggtgggtacgaaaattttaacatttccagaatcctaacccttgcgcatagttgattgatggttcagccaatataaagaagccatcgtttg

SEQ ID NO: 216761 - DNA, 1409 bp, Zea Mays
atctcagcaaagtgtccatcagatacacagcgtccgggaggacaaaacacgcggcgaggaccaggatggcgattgtgcgggaggaggcagtggacacgtccatcagcccaagggccgggatggatgcaattaggaatggttatacaagatacactcctaatgctgggactttggagctgaggaaggctatttgtactaaactccaggaggagaacggggtatcctacctcccagatgaggtgctggtgagcaatggagctaagcaatgcatcacacaagctgtgcttgcagtttgctcacctggtgatgaggttttgattccagccccatattgggtcagttatcctgagatggctagactggctgatgcgactccagtgattcttcctacaaacatatcagagaatttcttgttaaggccagagttgcttaccgacaagatcaatgagaaatcgaggctcttaattctctgctctccatctaatccaacagggtcagtatatccaaaggagttgcttgagaaaatagctgatatagtcaagaagcatccgaggcttttggttttatctgatgaaatttatgagcatattatctatcagcctgcaaaacacacaagctttgcttcactacctggaatgtgggaaagaacattaactgtaaatggtttttctaaggcttttgcaatgacgggttggcgtcttggttaccttgcagcccctaaacattttgttgcagcatgtggaaagatccaaagccagttcacctcaggtgccagcagcatatcacagaaggcaggggttgccgctctgaatcttggctatgctggtggtgaagcagtatcaactatggtcaaagcattccaggaacgccgtgactatcttgtgaaaaatttcaaggaactgcctggtgtgaaaatatcagaacctcagggtgccttttatttgttcattgacttcagcgcctactatgggtctgaagtagaggggtttggcactatcaagaattccgagtccctttgcatcttcctattagagaaagcacaggttgcccttgtccctggtgacgcatttggggatgacaagtgcattcgtatttcatatgctgcatccctaactacacttcagactgcgatgtcaaaattaaaggaagctgttgctctgctcaagccctgtgttgctgcgtagcaagatcactaaattgcaataaggagtgaccaaggcacctttaactaacctttcacattattttaaacacaatgttcgaattgttgggcagacttggtctgttgtttttatatgtaacattatggatttatgatgtgtacatgcaaataaaaatgttttgtttagaaaaggctaggttgtggtactatgcgaattaccttctatacaaaagaagatggtcgctgg

SEQ ID NO: 216762 - DNA, 390 bp, Zea Mays
gtggagccgccggggatctcaggtccgttcaccggccaaccccgcctaccttggacctggcctcaggagtatataagcaggaccaaggtgtccctccatccatcgacctcgggtcacagtgagatttgggagaatgttgtggtcatcatcgtgagtagaggggaccatgggtccgtcgccgcaagcaaatcttcgattttgccgttgccaaggcttcaacgacggcctgggtgcttcactagggagcgctaatcggggtcaatgctgtttcgagtatgggaagccacaacatggacgtgaattgctcgtcggagtaatctctccaccgccatgccgcactgctttgtgggcggaccagatccggacttcatcccttttcgcctccaagtt

SEQ ID NO: 216763 - DNA, 772 bp, Zea Mays
ccgtaatcctggctccgcccctgatccgcccattccgcccgccgcgttctctgctcctgcggcggctcaccctcggcggctcggcgtctctaaacaagggtgcagtttgcgcggcggccgtcggcctaccagtagtcctgccggtggtgcacgtgatggccaatgggcacgctttcgttggtagccaggaagcgatgatgcttacctgatgtcctctgctcaaccacaattggatttattatttgcatgaggctgacccatgggaagtttgcacaaagttccaggacacgtcatgtcaaggatttgaggattgtgggcgcttaacaatggtggctgctagtagtcaaactgtcatttttggtcacagtctttcctcattggcaaaactgtccttgctctccaaggattgacggtggctatcaaggttcagcaaaagaaaagaaaaaaatggcaaaactcagtaatcttctgaataagaaaaaacaaggctgtttggattgctatagtcgtaatccatggagacaaaaacaatgtagaaataatagaagccggtacagattaaagttaagtgaacaagctgctagtagtatcgttgatagcggggtgaacgaagtttctagagccctcatggttttggtatggctctagaaaatatatcagtgcatgaagcattgaagcactgttgtttttgtatttagtactagtatgtattgtactagaactatgtgccttatagctggtcatctggcctggacgcctggacagaagttcg

SEQ ID NO: 216764 - DNA, 675 bp, Zea Mays
atccgcccattccgcccgccgcgttctctgctcctgcggcggctcaccctcggcggctcggcgtctctaaacaagggtgcagtttgcgcggcggccgtcggcctaccagtagtcctgccggtggtgcacgtgatggccaatgggcacgctttcgttggtagccaggaagcgatgatgcttacctgatgtcctctgctcaaccacaattgaggattgtgggcgcttaacaatggtggctgctagtagtcaaactgtcatttttggtcacagtctttcctcattggcaaaactgtccttgctctccaaggattgacggtggctatcaaggttcagcaaaagaaaagaaaaaaatggcaaaactcagtaatcttctgaataagaaaaaacaaggctgtttggattgctatagtcgtaatccatggagacaaaaacaatgtagaaataatagaagccggtacagattaaagttaagtgaacaagctgctagtagtatcgttgatagcggggtgaacgaagtttctagagccctcatggttttggtatggctctagaaaatatatcagtgcatgaagcattgaagcactgttgtttttgtatttagtactagtatgtattgtactagaactatgtgccttatagctggtcatctggcctggacgcctggacagaagttcg

SEQ ID NO: 216765 - DNA, 816 bp, Zea Mays
gcttaatttatgaaggggcagcatgtggctttgcatgaccctaaaccggagcctggtgtcataggcctcatcaatataagattatccccaatccaggtggctcaagctgcttgtgaagatgcccgttctgtctgtttaagggaatatgtatcagctcctgatattaacatttatggcgatccaaattttacatttccatacgtcacattacacctacacctgatgttatttgaattggtgaagaactctctccgtgcggtgcaagaatgttatatgaactctgataaagatgttcccccagttagaattatagttgctgatggagaagtggatgtcactatcaaggttagcgataaaggtggctggataccaagaagcggcctcccaagaattttcacgtatctgtacagcactgcaaagaatcctcctgagctagatagacctaatactgaaggggtaactatggagtatcacatctgttggagagaatggccttcaagagcacagtgaatcggacccacttacggttagttcgtgaggtagaagccattggaggaaatgtctctgcatcagcttcccgtgaacaaatgagctatacatatgatgcattgaagagctatacaccagaaatggttgaagttctcattgacaatgtgaggaatccagcattccttgattgggaggtcaaagagcagacccatgatagattagcttgtattgttgagatgaagagaatgcaagtttgaatggctctgtgccacttgatgtacatgagagattgggtaggcgctctactaattatttaccatatttaaa

SEQ ID NO: 216766 - DNA, 1486 bp, Zea Mays
caatgatcgcgcacgtccctgtccggagagtccagaccagccctatcgccgccggagccgcacgcagccacaggaagctgatggccgcgccgaaaagcagtccaatcagccagccattcaattcaatacaagtggcctgaatcgaaaacaggacaggcgcgcacctctggagactggactcatccgttcgggtcgtcatgaaaagccagtccacgccactgccacaaactccgacgccgacggcggccccaggaggaggaggaggaggacatgagcagcccgtggctccgggcggccggctcgccgcgctcctgccaagggggacgatggcgaggcggcgagccgcgctggcggcgctgctagtgctgctgctgctggcggcgtgcacggcggcggcggccgccgtgaccgtgtcgcggaagcagcggcagcggcaccaccccggcggggcgtcggcgtcggcggcgcggtcctgcgaccccttcgcggcggcaggcgcgtgggtggaggacgggtcgtacccgctctacgactcggcgcgctgccccttcatccgcgacgagttcgcgtgcgcgcgcttcggccgccccgacacggcgtacctccggtaccggtggcggctggacgcgccgtgcgcgcagcccgccttcgacggggccgcgctgctccggatgtggcgcggcaagacggccatgttcgtcggcgactcgctggcgctcaaccagtacgagtcgctgctctgcatgctccacgccgccgcgggccccgccgcgcggaccaccctgtcgccgccgtccgggaagatcgacccctcctccaccgtccgcttcgaggggccaggactggggcgcgtcgccgaagaagacgtgcatgggggagacgcggccgctcaacgccacggggccctacccgggcggcccgatcccgcagcaggcgatcctgcgcggcgtgctggcggccatggccaagcccgtctacctgctcgacttcacctacctctcgcagctgcgcaaggacgcgcaccccaccaagtacgacggcggcatcttcggcggcgactgcacgcactggtgcgtcgccggcctccccgacacctggaacgtcctcttctacgccgcgctcaccgccgggcaggggcacaactgatggatgagtactacgttttttctttctttcctttttctttttaccgacacgcagtgttacgtagctcaataagtaaaggaaaagaaaaagatagcagattgatttcgtatagttacgagggggccttcaaaagatttttcaacctaaatgagttgatagaagaatatcaaaagagaatattgtaattcattcccgaattcagttggcatttttcctgggggtgctggcatttaatttcctgaattcaattgcaaatttatccagttttcttggatggctcattttcgttcaaacgaaggatttatattttgtatgaaaaaataaagttctttttatccag

SEQ ID NO: 216767 - DNA, 1780 bp, Zea Mays
gccgccggagccgcacgcagccacaggaagctgatggccgcgccgaaaagcagtccaatcagccagccattcaattcaatacaagtggcctgaatcgaaaacaggacaggcgcgcacctctggagactggactcatccgttcgggtcgtcatgaaaagccagtccacgccactgccacaaactccgacgccgacggcggccccaggaggaggaggaggaggacatgagcagcccgtggctccgggcggccggctcgccgcgctcctgccaagggggacgatggcgaggcggcgagccgcgctggcggcgctgctagtgctgctgctgctggcggcgtgcacggcggcggcggccgccgtgaccgtgtcgcggaagcagcggcagcggcaccaccccggcggggcgtcggcgtcggcggcgcggtcctgcgaccccttcgcggcggcaggcgcgtgggtggaggacgggtcgtacccgctctacgactcggcgcgctgccccttcatccgcgacgagttcgcgtgcgcgcgcttcggccgccccgacacggcgtacctccggtaccggtggcggctggacgcgccgtgcgcgcagcccgccttcgacggggccgcgctgctccggatgtggcgcggcaagacggccatgttcgtcggcgactcgctggcgctcaaccagtacgagtcgctgctctgcatgctccacgccgccgcgggccccgccgcgcggaccaccctgtcgccgccgtccgggaagatcgacccctcctccaccgtccgcttcgaggactacaacgtgaccgtcgtgtactacctgacgcactacctggtggacctcgtgacggagccgcacaccggccggcgcgtcctcaagctggacgccatcgaccaggcccgcgactggctcgccgccgacgtgctcgtcttcgactcctggcactggtggccgcgcaccggcgccacgcagccctgggactacatccaggtgggcgacacggtggtgaaggacatggaccgcacgcaggccttcgccaaggcgctgcacacctgggccaggtgggtcgacgccaaccttgtccagaccgacaccaaggtcttcttccaggggatctcgccttcccactacaggggccaggactggggcgcgtcgccgaagaagacgtgcatgggggagacgcggccgctcaacgccacggggccctacccgggcggcccgatcccgcagcaggcgatcctgcgcggcgtgctggcggccatggccaagcccgtctacctgctcgacttcacctacctctcgcagctgcgcaaggacgcgcaccccaccaagtacgacggcggcatcttcggcggcgactgcacgcactggtgcgtcgccggcctccccgacacctggaacgtcctcttctacgccgcgctcaccgccgggcaggggcacaactgatggatgagtactacgttttttctttctttcctttttctttttaccgacacgcagtgttacgtagctcaataagtaaaggaaaagaaaaagatagcagattgatttcgtatagttacgagggggccttcaaaagatttttcaacctaaatgagttgatagaagaatatcaaaagagaatattgtaattcattcccgaattcagttggcatttttcctgggggtgctggcatttaatttcctgaattcaattgcaaatttatccagttttcttggatggctcattttcgttcaaacgaaggatttatattttgtatgaaaaaataaagttctttttatccag

SEQ ID NO: 216768 - DNA, 1177 bp, Zea Mays
ctgaatcgaaaacaggacaggcgcgcacctctggagactggactcatccgttcgggtcgtcatgaaaagccagtccacgccactgccacaaactccgacgccgacggcggccccaggaggaggaggaggaggacatgagcagcccgtggctccgggcggccggctcgccgcgctcctgccaaggactacaacgtgaccgtcgtgtactacctgacgcactacctggtggacctcgtgacggagccgcacaccggccggcgcgtcctcaagctggacgccatcgaccaggcccgcgactggctcgccgccgacgtgctcgtcttcgactcctggcactggtggccgcgcaccggcgccacgcagccctgggactacatccaggtgggcgacacggtggtgaaggacatggaccgcacgcaggccttcgccaaggcgctgcacacctgggccaggtgggtcgacgccaaccttgtccagaccgacaccaaggtcttcttccaggggatctcgccttcccactacaggggccaggactggggcgcgtcgccgaagaagacgtgcatgggggagacgcggccgctcaacgccacggggccctacccgggcggcccgatcccgcagcaggcgatcctgcgcggcgtgctggcggccatggccaagcccgtctacctgctcgacttcacctacctctcgcagctgcgcaaggacgcgcaccccaccaagtacgacggcggcatcttcggcggcgactgcacgcactggtgcgtcgccggcctccccgacacctggaacgtcctcttctacgccgcgctcaccgccgggcaggggcacaactgatggatgagtactacgttttttctttctttcctttttctttttaccgacacgcagtgttacgtagctcaataagtaaaggaaaagaaaaagatagcagattgatttcgtatagttacgagggggccttcaaaagatttttcaacctaaatgagttgatagaagaatatcaaaagagaatattgtaattcattcccgaattcagttggcatttttcctgggggtgctggcatttaatttcctgaattcaattgcaaatttatccagttttcttggatggctcattttcgttcaaacgaaggatttatattttgtatgaaaaaataaagttctttttatccag

SEQ ID NO: 216769 - DNA, 1599 bp, Zea Mays
gttcgttcacccgtgcacggacggacacggacgcgccgaaagcaagcaatcagtaactagagggagtacgtgaaactgccaatgatgatcaggggacgatggcgaggcggcgagccgcgctggcggcgctgctagtgctgctgctgctggcggcgtgcacggcggcggcggccgccgtgaccgtgtcgcggaagcagcggcagcggcaccaccccggcggggcgtcggcgtcggcggcgcggtcctgcgaccccttcgcggcggcaggcgcgtgggtggaggacgggtcgtacccgctctacgactcggcgcgctgccccttcatccgcgacgagttcgcgtgcgcgcgcttcggccgccccgacacggcgtacctccggtaccggtggcggctggacgcgccgtgcgcgcagcccgccttcgacggggccgcgctgctccggatgtggcgcggcaagacggccatgttcgtcggcgactcgctggcgctcaaccagtacgagtcgctgctctgcatgctccacgccgccgcgggccccgccgcgcggaccaccctgtcgccgccgtccgggaagatcgacccctcctccaccgtccgcttcgaggactacaacgtgaccgtcgtgtactacctgacgcactacctggtggacctcgtgacggagccgcacaccggccggcgcgtcctcaagctggacgccatcgaccaggcccgcgactggctcgccgccgacgtgctcgtcttcgactcctggcactggtggccgcgcaccggcgccacgcagccctgggactacatccaggtgggcgacacggtggtgaaggacatggaccgcacgcaggccttcgccaaggcgctgcacacctgggccaggtgggtcgacgccaaccttgtccagaccgacaccaaggtcttcttccaggggatctcgccttcccactacaggggccaggactggggcgcgtcgccgaagaagacgtgcatgggggagacgcggccgctcaacgccacggggccctacccgggcggcccgatcccgcagcaggcgatcctgcgcggcgtgctggcggccatggccaagcccgtctacctgctcgacttcacctacctctcgcagctgcgcaaggacgcgcaccccaccaagtacgacggcggcatcttcggcggcgactgcacgcactggtgcgtcgccggcctccccgacacctggaacgtcctcttctacgccgcgctcaccgccgggcaggggcacaactgatggatgagtactacgttttttctttctttcctttttctttttaccgacacgcagtgttacgtagctcaataagtaaaggaaaagaaaaagatagcagattgatttcgtatagttacgagggggccttcaaaagatttttcaacctaaatgagttgatagaagaatatcaaaagagaatattgtaattcattcccgaattcagttggcatttttcctgggggtgctggcatttaatttcctgaattcaattgcaaatttatccagttttcttggatggctcattttcgttcaaacgaaggatttatattttgtatgaaaaaataaagttctttttatccag

SEQ ID NO: 216770 - DNA, 2582 bp, Zea Mays
cgaccgcgacgacgcaacagcagggcatgcagaattgcagattgcagaggcaggaactcaaaccggtcggactccacgacgagtcgacgacgcacacaaaaaaaaaacagcaggcgaggcgggatttagaagctgcgcagcgcgcatccctcccccaatcccgacccgacccgaccccgtccccgtcgccagatctcgcgccccctccccggggctcgatcggatcagcggcggccggtgatacggggacggggagatctcgccgaggtttgggccgggccgggccgggctggtgggagcaggggagccatggcgtcggcgcaggcgccgtcctccgccgccgcgccgtcgcgcaaggaccatctcgaggccgggaagaagcggctcgagcagttccgcaagaaaaaagcggcgaagaaggccaatgcagctggtgcagagcaggcaaaagtgcctgctcctgatgtagagccaaaccaagcgagcacgtcttcggtgccatgggctgtatatgagaatggcccagagagtgcttccagcggtgcagaattcctgtcaaatgctccggtcaatgtatatacttctgttggtgttagtagtgttagaccccagcaagatgctgttactgatggaggaagtaagttctatgggaacttaagcttctctgatcttgttaatggtcatcatgagaactggagaggcgatgaagcccgtaaaagggatgagcacagccctgacaaggatgtgcaatcaacatctaaattaagtgcctttgggaacagcagtttaactttaccttctactgacaacatgccaagttggggaagaatttctttatcaagtcaagtacatgataccaagcaatctagttcatattcatccagcaccctttttggaaagtctgaaaatgcttactctcaggactactccacaaagagtgatacctctagtcagttgagagatacctccaaagactcttcccaagtggagcaatctctgtatgccagcactcgggattatggcaatgccttcaatagttcaaggactattgttactgtagagcatgatacaaatgttggaataactcggacatctgcagattccgcacctggtgttaattttgaaagacaggatccttttctgtcatctggttatccaactacatacactcgttcaaggccatcgtttcttgattcaattggagtacaaagagtccctccaacaactcaagcctcatatagggagcctgcaaaggctaatcaactatcccacaattcgaattatcagagttcatttgtgaagcaatcaaatcaacaacccacttcaagtaatgctgcagatatttcttttgcatcagaaagtcaggaatatagtcatgaaaaggggtcatatggcagctccaaccatcctgatttctcacttcctaaagaagaaagaagtatacaacatggtaaacaaacattccaaaattttgcaactcatgggaaagatgacgattttgcaacattagagcagctcattgaagatttaacaaaagagaagttttccttacaacgatctcttcagaaatctcaagagctagcagaaactttggccacagataactctgcactaactgacaagttcaaccaacaggcacatgtaatcagccagttgacatctgacatggagagattgcaggaagaaattcaagctcaattgctggctctggagtctgtcaggaccgagtatgctaatgcacaactagaatgcagtgctgcagatgagagggcaaaagtacttgcagctgaagtcattctactagaagataaggctttgagactgagatcaagtgagctaaaacttgaaaaggaagttgaaggtttgcattctgagatttctgcttacaggcgcaaagtttctagtctagaaaaggagcgccagcatcttcaatccactgttgaagctcttcaagaagaaaagaagctcctatattctaaattgaggaacattcctgtgaatgagagggcaactactgtagagaaaccttcagttgataaaaaagatgcatcaaccgtgacagaagatttagatactggggaaatcagctcttcagagacactgaccagcactgttgacatattggaagacgctggaacatctgttttgcgttccaacattgtgtctgattttccttcctcggaacaggtctcatctagcattccagatgatcagcttagaatgattgacaacatcaattctttgatgtcagagttagcagtggagagagaagaactgctgcgagcactgagaattgagtcatccaactgctccaagctgaaggaattgaacaaggacctaacacaaaagctggaggttcagacacagaggcttgaactattgacttctcaaaggatggctaacgagaatgccctggcgaaaccaattgacacacgccccatcaacgaggcaacaatgtatgcggatgaaggagacgaggttgttgaacgggtgcttggctggataatgaagctcttcccaggtgggccaaagcggcgaaccagcaagcttctgtaatgaaaatagagctcctaagatcgaca

SEQ ID NO: 216771 - DNA, 2581 bp, Zea Mays
tagaccaactgcaaatcaagagacaattttgacccaagtagcccatccccatgcccactccttgctcagttgctcttgctcttgctcttgtattcttgcttatactgtgggccatgctcgggaactagggctgaagattgatgcagtgccattgtgccaataagcaagaaaggcccactaaagggcaattgacgctgggcggcgacggcggggggagactgagcggccgaggagccggtgtggcatcggtgcatcgcagcggcctgaggtcgcgagcagcacagcagggtgcgccaggcgccgacgcggtacggggcaccgcgcgacgcgtgagcgcgtggccggtctcagcaccaagacgcatcaaagccggcgctaggcagggcactatcgcgctgctgcgcagctgtgcctgcgctggtccctggaggattagtgacagcactcaccaatttgtgttttgcagaattgggagaaatcaaataacttcacaacagatcaggaagctttagagcttggcaatggagatgagagcccgggaatctgtaagcatgtcgaaggatctaactggggaaatcacaccttttgccactgccctacatgatgtgttcctccactcccattgctcatcatgcttcaccaagttacttccacaaaccccttgtgtcatgtcttgcatgacatgctgttctcttcgatactgctgttcagagtgcttacgtgcggattcagtggtgcatgtttcctctggtgaatgttgcttttttgtggatcacctcaagagagcctccccttcctatgttactgaaggaacgagtgatttgcgtgctgccctccgccttctgtgtgtgcttgagatacatggtcttgtttcgcctgattcaatcaatcactacagtagaattggtggactttcagcaagtggtattgaggaagctttgaaggaaggtgaggttattgctgagaggatactggaggggagcttattgatgtcatctgctagaaaatcgagggcacagacttgtgttattttttcagacaggcttaaacttgagaagatggcattatgggcagtgattatcaatagcgtcgaggtgcaacttagtgaagggttagctttgggagttgcagtgtatggcccgagtttctcatggttcaaccatagttgctttcccagtgcttcttaccggtttgtactggctccaaggaatgaagactgtgcttcacagaaatcaaaatccagtgtagtccctgctagcaaaggagttgcagctgatgtgtggcatgcttggcaatacgaagatcattctactcatggaagcaagacattcggatttgtggtcaaagtataaatttatttgttcttgcaggcgatgtattgcatcaccagagccatacactgatcttattctgaattgtgatgtgagggacttggataaagcagaagcagagggtactgttacacctccagcaattgagaatttgggtgatgtcctacaacaggcaatatctgagtacacgtcaaatgatgaccctgaagcttgctgtgatatgattgaaaccatgctttccaacaggttggtgagtggtttgaagcaagaggatatttcagggagaaaacatatactacagcctcttcaccatatctgtcttactgcttacatgacacttgcctctgcttaccggtttcgcgccttaagtttagaagaagctgtccgttcagatggagaaaatactgatgaattttttagaatggctaaagcagcagcagcgtattccctggtacttgcagggagtacacaccatttgttcttatcagaatgttctcttatgatccccctgtctcattttttgttaaacactggacagtctctgttatatcttgttgagtctatcaagggaaagacaaggcaaaatatatccgaggccaggctcagcttttcttcatgtccagcaagttctacagacaatgattctccaccgtaccatgtgttcagatcaacctgtgaagcgtttggcaagcaaatgttatccctgtcactgcggtgctggtcatttctagtgcgaggtttaccctgcctggaaaagataaagagccccatggaatttagtatgcccggaacaacaatatttcagtctgtcctttctgaggaagaccatgccaacctttccgcgcacgagccagtaggtttcacggagagacaagcggggtgcatccttagtttggctctatgttgtatcacctactgcaaatatcttgctaccatatgctacggcccacatcattatctggcagaccatgcaaaatatctacttgaaggtatcgatcctgcacaatgaatcttctttcttggcataggtgtgttgtgaaatcttatgctcttatgagttaatgtaaaacgtgtcgtgattatcaaggctgttgagcttattttctatatgattgtatgctgagctcgttatttattattttgtatggaagcaccatttttctaaaaaaatttggtcactgggaagttgtatcactgatcttgcacctttcctggctttttctgtttgtatgaagaagagttactaattt

SEQ ID NO: 216772 - DNA, 3251 bp, Zea Mays
attttcattcccaaatttacagccaaccaatctttgcgtgtgtggaatggctcccgcactcaccctgcggtgatcgagcgctcatgcacgcgcgtaggaaacattggttgtgttagagagcccgacgattcgccggagatgacatcatcggcggggtacgcggatggcggcacaggaggtctgggggacggggaccccccggtgccgccattgaggaagcagccgtcacggatcgcttcggggatgcgtcggctggcgtccaaggtatcggcggcggtgccagagatgcgtggcctcaagcgtacacactccggcacacagtcaggtttgcgcggtctacgcttcctcgacaagacgtctgccggcaaagacggctggaagtccgtcgagaagcggttcgacgagatgaacaccgaaggccggctgcagagggagaacttcgccaagtgcatcggtatggctgattcaaacgagtttgcaagcgaggtgtttgtggcattggctaggagaacacacatcaatccggacgatggcgtaacaaaagaacaactgaagcaattttgggaggagatgacagaccagaactttgattctcggctacgaattttctttgacatgtgtgacaagaacggtgatggtaagcttacagaagatgaggtcaaggaggtcattgtgctaagtgcctcagcaaacaagcttgctaaactgaagaaacacgctgcgacgtacgcctctctgatcatggaagagctggatcctgatcaccgcggctacattgagatctggcagctggagaccttgctacgcgggatggtgaccgcctcagcgccgccagagaagatgaacatggcgtcagcgtccctcgcgaggacgatggtgccctctagccaccggagcccgctgcagcggcgcatcaacaaggccgtggactttgtccacgagaactggaagaggatatgggtgctctccctctggggcgtcctctgcatcgccctcttcgtattcaagttcatccagtaccggaggcgcgcggtgttcgaggtgatgggctactgcgtctgcatcgccaagggcgcagcggagaccctcaagctcaacatggcgctcatattgcttccggtgtgccggaacacgctcacaaggctgcgttccaccgcgctcagcaaggtggtgccgttcgacgacaacataaacttccacaaggtcatcgcgctcgcaatcgccatcgggtctgcgacccatacgctcgcgcacgtgctctgcgacttccccaggctggtggcgtgccccaaggacaagttcatggagaagctggggcccttcttcaactacgtccaaccgacatggccgactctgctggcgagcatcccgggatggaccggaatcctgctcatcctcataatgtccttctccttcacgctcgcgacgcactccttccggaggagcgtggtgaagctgccgtcgccgctgcatcacctggccggcttcaacgccttctggtatgcccaccacctgctggtgatcgcctatgtcctactggtgatgcactcctacttcatattcctcaccaagcagtggtacaagagaacgacgtggatgtacttggcagtccctgtcgtcttctatgcctccgagagaagtatcagaaaaattcgtgagcaaagctatcgcgtgagcatcataaaggcggcaatctacccgggaaacgtgctctcactttacatgacgaagccaccaggcttcaagtacaaaagcgggatgtacatgtttgtaaaatgcccagacgtttcgcctttcgaatggcaccccttctccatcacttcggctcctggagatgactacttgagcgtgcatatccgtacgttaggtgattggacatcagaactcaggaatctgtttgggaaggcttgtgaagctgaagtaacttcaaagaaggctacactagctagactcgaaacaactgttgtggcacatggtctggcagaggatactaggtttcctaaagtcttcatagatggcccttacggtgcaccggctcaaaactacaggaaatacgacattcttttgcttattgggctcgggattggtgcgactcctttcatcagcatactcaaggatctcctgaacaacataaagtccaacgaggagatgcatgacgccgagttaggttgcagtttgaagaccaatgggccaggaagagcctacttctactgggttacaagagagcaaggctccttcgagtggttcaaaggtgttatgaacgacgttgccgagagtgatcgcgacgatgtaatcgagatgcacaattacctgaccagcgtgtacgaggaaggcgacgccaggtcagccctgattgccatggtccagtcacttcagcatgctaagaatggcgtggatatcgtctcaggcagcaagattcgaacgcattttgcaaggccaaactggagaaaagtgttctctgatttggccaatgcccacaagaactcacgcatcggcgttttctactgtggatctccaacactgaccaagaccctgagagatctttcgatagagttcagcagtaccacgacgactcggttccatttccacaaagagaatttctaagaagcaacggcacggctcgtgtggcccgccggtgcattcattggtgatcaacgggcacaaggctgtgtgcctatgcaagccagatttgagtccttggttactttggggaacagggagcggggctttaccggaccaagagccatgagctagccttttgcttcgtccgcttgctgggagctagctgcttgttcagatttggtgttggaggaggcgtgcatgcgcaagctgaaccggaaattcagcatgggaagttccatgtaggaaactgataattgtaatgcaatttttttctctctagccatgtctttagttgaatgccgaattgggacgagatcaagtgtgactgtttggatagggactcgaagtagacttgagcatgggccacccgacccgtccaaaaaaatctgactcggtcgggtcgggtctgtgtgttgggcgtcgttggtacatgtaacctgtcaaattttttaggtcaggatcaggcgttaaaattaagcttgcgggctggcccgttggcccgtaatctgtactggtgatctgcgttttgaaatctgaacttttgatagcatttatcattctggaagctggataactagcagactactttagtagtacttagagcatctccaataattatgtaaacttag

SEQ ID NO: 216773 - DNA, 1498 bp, Zea Mays
cgatgaaatgaagtgcatgcaaacaacaaagcaataggaagaccctcccatggagatgactgacatgaaaccagaggagatgagccaccctcccatggaccagctgctcggaatggagtactgcatagactccaacccgtcctggggaggagctgttttgctgggcttccagcatttcatcctttgcttggggacggcagtgatgatccccaccttgttggttcccctcatgggaggaaatgctcatgacaaggcaaaggtagtacagacagtgctattcgtgactggaataaatacaatgctccaaactctgtttggaactcgtctaccgaccgtcatcggtgggtcttatgcattcctagtcccagtcatgtcagtaatcagtgaccactcactgatacaaattgctgataaccatacaaggttcaaaatgaccatgagagccatacagggggccctgataatatcatcctgcattcagataatacttggcttcagccaattgtggggggtatgctccaggttcttcagcccacttgggatggttccagttattgcattggttgggcttggccttttcgagagagggttcccagtgattggaacatgcgtggagatcggtgttcctatgcttgtcttgtttgtggcactttcccagtatctgaagcatgtacaagtgcatccttttccgatattggagaggttctcagtgctcatcaccattgcagttgtctggttatatgcccacatcctcaccgtgagtggggcatacaaacatagttcgcaggtcacccagctcaactgccgaaccgaccgtgccagcctcatcacaaccatgccatggtttgatattccatacccactgcaatggggtcccccgagtttcagtgcagatcattcattcggcatgatggctgctgtgttggtgtcattggtagagtctaccggagcgtttaaggctgctgcccggttggcaagtgcgacgccgcccccaccatttgtcctaagcaggggaattggatggcagggaatcgggctgctattagatggcctatttggtactgccagcggctctactgtctctgtggagaacgtgggtctcctaggatcaaccaggattggtagcagaagagtcattcagatctccgctggtttcatgatcttcttctctatcctagggaaattcggagggctgttcgcctcaattccattcacggtgtttgctgctatatactgtgtattgtttggctacgtcggtgctgtggggctctcctttatgcagttcaccaacatgaactcgatgcgcaacctcttcattatcggcacgtcactgttcctcggtatctccatcccggagtacttcttccactatgatcatggaccgtcacatactagagctggatggttcaatgacctcatcaacaccatcttctcctcacccccgaccgttggtttcatcatctcggtggtcctagataacacgctggacgtgaggaac

SEQ ID NO: 216774 - DNA, 1786 bp, Zea Mays
gcccattcctctctctctcggtctctcctaaccccgtcctgtgtgtgattccctcgtttgctccgttcccagctttcctcctcctcgcacaggctcccctctaaaaccctctgcctccactgtaaatctttgcaaagctgatttctaacagcaagaattcgctgtttctgttaccgcaccctccaggggcctatacatccagcgcctgcctggcttgcttcattcgtggatctgagagcattttgctgcattcagtaacattctcggaggggatttctccgtgctgcttctgtggatttctctgagaattgtcagcgggatttaggaagaccctcccatggagatgactgacatgaaaccagaggagatgagccaccctcccatggaccagctgctcggaatggagtactgcatagactccaacccgtcctggggaggagctgttttgctgggcttccagcatttcatcctttgcttggggacggcagtgatgatccccaccttgttggttcccctcatgggaggaaatgctcatgacaaggcaaaggtagtacagacagtgctattcgtgactggaataaatacaatgctccaaactctgtttggaactcgtctaccgaccgtcatcggtgggtcttatgcattcctagtcccagtcatgtcagtaatcagtgaccactcactgatacaaattgctgataaccatacaaggttcaaaatgaccatgagagccatacagggggccctgataatatcatcctgcattcagataatacttggcttcagccaattgtggggggtatgctccaggttcttcagcccacttgggatggttccagttattgcattggttgggcttggccttttcgagagagggttcccagtgattggaacatgcgtggagatcggtgttcctatgcttgtcttgtttgtggcactttcccagtatctgaagcatgtacaagtgcatccttttccgatattggagaggttctcagtgctcatcaccattgcagttgtctggttatatgcccacatcctcaccgtgagtggggcatacaaacatagttcgcaggtcacccagctcaactgccgaaccgaccgtgccagcctcatcacaaccatgccatggtttgatattccatacccactgcaatggggtcccccgagtttcagtgcagatcattcattcggcatgatggctgctgtgttggtgtcattggtagagtctaccggagcgtttaaggctgctgcccggttggcaagtgcgacgccgcccccaccatttgtcctaagcaggggaattggatggcagggaatcgggctgctattagatggcctatttggtactgccagcggctctactgtctctgtggagaacgtgggtctcctaggatcaaccaggattggtagcagaagagtcattcagatctccgctggtttcatgatcttcttctctatcctagggaaattcggagggctgttcgcctcaattccattcacggtgtttgctgctatatactgtgtattgtttggctacgtcggtgctgtggggctctcctttatgcagttcaccaacatgaactcgatgcgcaacctcttcattatcggcacgtcactgttcctcggtatctccatcccggagtacttcttccactatgatcatggaccgtcacatactagagctggatggttcaatgacctcatcaacaccatcttctcctcacccccgaccgttggtttcatcatctcggtggtcctagataacacgctggacgtgaggaac

SEQ ID NO: 216775 - DNA, 2725 bp, Zea Mays
gcacccctctgccccccgcctcttcgccggcgagcggcgacgagccgccgtggaggagctcagcgtggagtggcttcctctggtgtgggagacgctgccgaatttctttgacctggtcgtcgttacggtgtgccgccgagaaaagagtttttcaaagggtctctctcctttgcggcactggcctcttagagttagtttattaggaggcggctcgcccacgtttcggaagcgacccggtcgtcgccgccgccaccgccgcgtgttcccgtagtcgccgtctcggggctggctgtggtgatgagttcagtcgtatcctagggtttttgaattctgacggcttcgtcgagctgcgcaaggcgtcgagaaggagatggtgccgagtgggttgttcgggtgggcgtcgccccatgtacagccgctcacacccgtatccgaggtctccgagccgccggagtcgccgtcgccgtacggggacgggccggcgggggatgccggcgtggggacgagggagggggaaggcgctggcgccggagaggaggaagtggaggacgacgaggtcgagccgccgcccgcggcggtgtcattctggaggctttttgagtttgccgatggggtcgactgggcccttatggctgctggggcgcttgctgctgctgcgcatggcgcggcgctggttgtgtaccttcactacttcgggagggctctgaatttgctcgactctgagcgggttgggtcgtctctctatggacgcggcgaggaactgctccaccggtttaaggagcatgccttgtatattgtctttatagctgctggtgttttcgtcgcaggatggatagcaggaggaatatctaacatattccttcataggctggccgaaaacattcaagatgcatatgcagaagcggctagcattgctgaacaggccatcttatacatcaggactctgtatgcttttacaaatgagactcttgcaaagtactcctatgccacctcacttcaagccacacttagatatggaattttgattagccttgtccaaggaattggtcttggatttacatatggactcgccatttgctcttgtgctttgcaactttgggttggaagacatctgatccatcgtggaaaagctgatggtggtgaagttgtggtagctttattctctgtaattctgagcggccttggtttgaatcaagcagctacaaacttctattcattcgagcaaggacgcattgctgcttatagactatatgagatgattagtcgttcaacctccagcaccaatcaagaaggggcaaccttaccccaggtgcaggggaatattgaatttcgaaatgtgtactttagctacctgtctcgccctgagatcccaatattaagtggattcttcctcactgtaccggcgagaaaaactgtggcacttgttggtagaaatggctccgggaaaagcagtataattcctcttatggagagattctatgacccaacattaggtgaagttcttttggatggggaaaacataaaaaatttgaaagtagaatggttaagaagccaaattggtctggtgacacaagaaccagccttattgagtttgagcattcgggaaaacattgcttatggaagatctggtacctttgaccagatagaagaggcagcaaaaacagcccatgcccatgggttcatcagttcacttgaaaaggggtatgaaacccaggttggtctagctggtgtagccctcactgatgaacagaaaatcaaaatttctattgctcgtgctgtgctttcgaatccatccattctgttgcttgatgaggtcacgggaggacttgattttgaagctgaaaaggctgtacaagaagcattagatgttctcatgttgggaaggtcaaccattataattgctagacgtctttgcctcattaaaaatgctgattatatagctgtaatggaggagggtcatcttgttgaaatgggaacacatgatgaacttttaaacttggatggcctttatgctgaacttttaaggtgtgaggaagcaacaaaacttcccaaaaggatgcctaccaagaatagcagggagcgtaagtcgcttcaagcggaggacacatcggtgagccaatactttcaagaatcgtcctctcctaagatggcaaaatcaccttcactacaaaggacacacggcatgcttcaattttggcgatcagataccaacagaaactctcatgattcaccaaaggatccaagtccaccttctgaacaaactatagacaacgggataccgatggttgcaattgaaacagaaaggacaccatccattaagagacaagatagttttgaaatgaagttacctgaccttcctaaagttgatgtccatcgtatacagcggcagtcatctaagaattcagatcctgactcacccatatctcctcttttgacttctgatcctaaaaacgagcgttcacattcacagacttttagcagaccccagagtgaacgggatgatacgagttctgaacacagtgaactcgatgaggttcagcaccagaaaccgccatctttttggcgtcttgcaacacttagtattgctgagtggccttatgctcttttaggtacaattggtgctgctgtatttggctcatttaatccactgcttgcttacacaatagcacttatagtgtcagcatactatcaaattgaaatccgtgatatgcgccatgaagtgaga

SEQ ID NO: 216776 - DNA, 8857 bp, Zea Mays
gagagtaagatgtaccttgataccatcaccagcagcactgtgtcttctcttggtttacataattcgaagagttgctggcttaaaacagcggtgtgggtcgtgtttcctacttgttttagtcggtgatccgtagaacttctaagggttattcgaagattgaatttgaaagagcagtggactgacttgtcactccactttataactttgtactctctgaggtcaactatatctgaaaatgttcgtgcacaaaatcatttcagaagtatagggggactggaggttctattagatggactgggactgccatcaagcaaattttcagtctcgaagcagtcttttgttcccagtgatgaaaggagtggcattctccagctccagatactatatttggaaattctgagggaagcagtgtatcctgtcccattatttttaagtgcttatcatcagcaaaaaattcttaatgctcaggccatcctgaaagctgataaagaaagcactgggccttcaccaacattggaatctttctcaaatcctgtagatattcttgatacatcagaatggaacgagtattctgtaaaattaagcataacactttgctcatttctccttcctcccaaggagatcaaatactgccctgctccaactgatgttacccaaatttcactatccatctcattggcttactgggagcaatgtgcaaggtggattataaaggttctttcaacagttttcccgtgcatgaaagcttgtgctagtgaaactgatttgcctaaccatataaggattttagcaaataccatgcagcattacatgctttgcacgtttaggaaggttcttatttcagcaccagctctacttaaatcttttcgagaggagggtctctgggatctgatattttcagagaaatttttctactttggatcatctttggactacattcaacagaatgatcaacttattgatgctcccaaatcaatcgattccaaaagtttcagtgaaaccgatgtcaacgttcttcaagcagaagctatttccttcttggagtttgctgcaacactcaatgaaaactcaaataacttgccagaatgcttagcattggtaggtgcacttgaacattgtacctatgatcctggattggccggtggtattgttaagagctttcacgtgatcctacaacttgcaactgaacaaactctagcttctttcaagtcaattgatgtgctcactagagtcctgaaggttgcatgccttcaagcacaagaaataaggaagctgtcccaagatgacttaaatcaaaatggttctcaatccagaaatgctcagacgacttattcagatgagagaattaagaacacttgtgcatttgtgaaactggctttcaaccttttcaaggagtatgccacaatatctgacattggaaggattacagttttatgcaatgctaattgcatcgagtgtttatttgatttgttccaagaagaatacctcaggaaacacatattggagcaagtacttgccttatttaggttaccttcgtcatcagcacaacaccacgcagcaaagatgctactatgctccaaatatcttgagactttcactcgtgcaaaagaaaaggaaaaggcttttgcagaattgtcaattgatctattagtcaatatgagagaggtcataatgatagaccgtgtgtattatcaaaatctgtttcgcaatggggagtgcttcttgcatatagtctctttgctgaatggaacttttgatgaagcagttggggagcaattggttcttaatgtccttcggacactgactgctctacttgctgaaaatgatgagtcaaaggctgccttcagattgctggtcggtgcaggttatcaaacactgcaaagcttgctattggacttctgtaagtggattccaagtcctaaactcctggatgccctacttgacatgcttgtcgatgggacatttgacataaatgaaaaagcaacaataaagaatgaagatgtgattatgctattaataaatgttctgcaaaagagcagcacttcactccagcattatgggcttatggtcttgcaacagttgctcaaggggtccattacaaatagaacttcttgtttcagagcagggttgcttagtttccttcttgattggtttaaagttgagaaagggaatgacattgtaatgaaaatcgcagaaataattcagatcattggtggacacagtatttgtggaaaggatattcgaaaattttttgccctccttcgtgacgaggagattattgcaaagcagcagcacagttcattgcttttgacaagtgttagtcacatgctcaaggaaaagggtcctgaagctttctttgagtttagtggtcatgactctggcattgaaattaaatcatcagttcaatggccttacaataaaggtttatctttctgttgctggctaagggtggaaagtttccctgagaagggtttgatgggtctttactctttcttcactgaaaatggaaaaggatgtttagctatgattgggaataatactctaatctatgagtctgtcaatccaaagcatcagtgtgttttgttatctctaagcctccctatcaagcaatggaaattcctttgtgttactcatacaattgggagaaccttctctggagggagtcagctgagatgctatgtagatggcgatctagtatcaagtgaaaagtgcaggtacacaaaagtaaatgaactaatgactcgctgtagtgttggtacagaattgatgcccatcggtgaagaaccttcttctcttggctttgagaacactcttgcttttactggtcaaatgggccctgtttatgcattttccgatgctctctcccctgaacaaataaggggcatttataacctaggaccaagttacatgtactctttccttggtgatcagaatttgcttacaaatgatgactcacggtacaagggaatacttgatgcaaaggatggcatttcatcgaaaatgatttttggcttgaatgcacaggctagtaacaatcggactttgtttaatgtatcatctgcactggatggtcttgacaagagtaagtttgaggcaaccaccatgggtgggacaaaattatgctcccggcgcctgctgcaagaaataatctattgtgttggtggcgtttctgtatttttccctcttctgatccactttgatgatgctgtggttcagaatggagagtttgccaccagagatcaattggctggtcaagttattgagcttgttgcatctgttctagatggaaatatagcaaatcagcaacagatgcatcttctttctggattttctattttagggttcctgttccagtctgtttcaccgcagctgctaaatatcaagactctttcagcatcgaaatacatgtttactattttgaagacctctagcatgtcagatattctattgagagatgctctttcacagttttacttgaatccacatatctgggcatatgcaacctatcaagtacagagagaactttttttgtttctgatacaatattttgaagctgatgggaaatttttaccagtattatgtgcgctccctaggatcattgatgtcataaaacagttctactcggaaaagctagatccaaggttttctaagcctttgctggtaagcaaaaaggtgactggggagagaccaagcatggaagaaattcgcaagatccgacttctcctgttgagtctggcagaaatgagcttaaagctaaaggtttctcaacatgatatcagagctcttgtttcctttcttgaacgaagtcaagatgttgcatgtgttgaggatatactccatatgattatccgcgccctttcacagaactcgcttgtaccatctttcttggagcaagtaaattcacttggtggttgttacattttcatcaatcttcttaagagggaatttgagccaatccgcctattgggccttcagcttcttggaaagcttttggttggggttccatctgagaaaagagggccaaaaatttttggcctccctgtaggacgacctagatccattgctgaagatataaggaaaggggcaacagcagcacctcaactgtttttttattcaatatctgatagacttttcaaatttccactttcagatcatttatgtgctagtctttttgatgttcttcttggtggagccagtcctaagcaggttttacagaaacgttcccaatctgatgctttaaaagataggagcatggctcctttttttgtccctcagattctggtttgcatttttaaatatattcaatcttgtcgagatgcttcagtgcgtacaaagattttaagtgatcttcttgatttgctggattcaaatcctgtgaatgttgaatcccttatggagtatggttggagctcttggcttgaaacatctgcgaagcttgatgtacttaggaactacaaatcgaattctgtagccaaggctgacggtttggagaccaatgagctgattcttgtgaggaacatgtattcgttggttctctcctattgcatattctctgtgaaaggtggctggcatcaactggaagatacaacaaatttccttctactgaaaattgagcaggggcagttaccaaattcctccatgctccgagacatttttgaagatctcattggaagccttcttgagacatcttctgaagaaagtgttttcaattctcagccatgccgtgataatatcttgtatcttttaaatcttagtcatgaactctttgttgaccaaattggaattaaactcttgtttccttcacctgacatgtctgcacatttgtcatctgatgacatcaactcggcagttctagaaattatgaatactgagggcaatggtctgcttacaagtcttccttggagtaatatattatttaatgatggagaaaagttgactgatgattggtggagcttttttgacaagatatggacgcttctgtgctatttgaatggcaaaggccaaaccagattaacaccaaagggtttaaatacagctggaccatctattgggcaacgggcccgcggattagtagagtccctcaatatcccagctgcagaaatggctgctgtagttgtaacaggaggcatcagtagcgcattaggtggaaagactaacaaagttgctgacaaagctatgatgctaagaggggagagatttccaagaattatcttccatctcatcattatgtatctctgcaaagctggcttagaaaacgcatccaaatgtgttcagcaatttatatcactgctccctaatattatctctgaagatgatcagtgcaaaaatagactgcatttcttgatttggtccttactaagggtaagatcccagtatgggcaacttgatgatggtgcacgtttccatgtcatgtcacacttgattcttgaaactgtgatctatggaaagtctatgcttacaactaatatagtaggcagagatgattctactgaagcaaataacagtaaggaggctgggttcattcttaatcttgtacagaaggaccgggttctcactgcggctactgatgaggcaaagtacatgaaggatgcaattgctgatcgcatgaagctggtccaggaactccattctaaacttgatgaacgctcaattcaagacgttgaacaactgcaaagttttgaggatgatgtacagtttgccaagactgctgctatagctgcggacgacagtagaaaagcagctttccagctagcatttgacgaggatcagcaaattgttgcagacaagtggattcatattctccgtgctctgagtgatgagagggggccatggtctgctgctccttttccaaataatattgtgacatactggaaacttgacaaaactgaagataaatggcggcgccgactgaagctcaagcggaactataagtttgatgagtgcctttgtcatccatcatccatcaaatctagtaacgataatgctgccccaactgttgacccatctgctaatgccaagataacagaaaaaatgaagcacttacttttgaaaggagtgcgtggaattacaggggatatcagttctgaatcatgtgaggatagcaacgacatgattgatcctccccagaatgtcccgccagagaaccacactgttagtgatacttctgattctgcagattcctcagattatcctgctattgttcaaaatagaaaagaaagttcatcaaccagtagtgataatgattatatcgaggtgctatcatcagttcactgtgttcttgtaacccccaaaagaaaactagctgggcaattgactatcacacgaaatgccctacatttttcttttgaatttctagttgaagggactgggggatcatctgttttcgacagatttcatgataaaaaagattcagactccaagaatgagatgggaggtgtggaaaaactgaagggcaatcttgatggaggacgaggcaatgctgctgaatctagcgacactcaaattaaaaatcaatctggtaaaatcaaacaccatagaaggtggaaaataactaggataaaagcagttcattggacacggtacctactacaatatactgccacagagatattctttgatgatgcaaacgcaccagtatttcttaacttttcatcccaaaatgatgctaaaagtgttgggtctcttttagtttccctgaggaatgatgctttgttccccaaaggaacaaccagagacaagaatagtttaatttcctttgttgacagaaaggttgcccttgaaatgtctgagagtgctagggaaagttggagaagaagagaaataagcaactttgagtaccttatgattctcaacactcttgctggacgatcttacaacgatttaactcaatatcctatatttccttggatattggctgactactcttcagaaaagcttgattttaacaaatcatctacattcagggacctttcaaaaccagtaggtgccttggatgcaaagcgctttaaggcttttgaagatagatatcttaattttgttgatccggatataccaagtttttactatggatcccactactctagcatgggaattgttctttattaccttctaaggcttgagccttttactgcgctgcaccgcaatcttcagggtggtaagtttgaccatgcagatcgtctatttcagagcattgaaagcacatacagcaactgcctatcaaatacaagtgatgtcaaagagcttatacctgaattcttttacatgcctgagtttcttgagaattcaaattcatatcaccttggcataaagcaggatggtgaaccattaggtgatgttggtctccctccatgggcaaagggttccccagaagaatttattcatatcagtcgagaagcccttgaaagtgaatatgtaagctctaatctacatcattggattgatctcatatttggttacaagcagcgaggcaagcctgcagttgaggcagcaaacatattttattatctgacatatgagggtgccgttgatttggagaacatggatgatatgttacaaaagtccgctattgaggaccaaattgcaaattttggacaaacaccaattcaaatttttcggaagaaacacccaaggagaggtcctcctataccaattgtgcatccactatattttgcgccacaatcgataacagtgacttctgttgtcccgaccatagtcacccctttatctgtattattcattggtttgttggactcaaacgttgtcatgatgaatgaggggctcatactctctgtaaagctttggctaacaacacagttgcagtctggtggaaacttcacattttctggatcactggaacctttcttcggaattggttctgatgttatttctccgaggaaaattggcacttctttggctgaaaatgttgagtttggaagacaatgcttagcaactgttcaaattcgtggtgacaattacttaattttgtgtggtaattgggagaatagtttccagatcatatctctaagtgatggaaaaattgtgcagagcatccggcagcataaagatgtagttagttgtgtggcagtttcatctgacggaagtgtgattgcaacgggaagctatgacacaactgttatgatctggtatgcatttcaagggagatcaaatgacaaaagatataggaatgcaaattacgatctatcaactaaggatcatgtcatcattgaaagcccttgccatatcttatgtggccatgatgatattatcacatgcttatttgtcagcacggaattagacattgttatcagtgggtcaaaggacgggacttgtatgttccatacactgcgtgaggggacatatgttcgatcgattcgacatccgtcaggtgctggtttgtcaaaaatggtaacatcacagcatggcaggttagtgatatactctgatagtgacctttctttgcatatgtattccataaatggaaagcatattgcttcttcggaatccaattgtcgtctcaattgcatggagctaagttgctgtggagagtttatggtatgtgctggtgatcatggtcaaattgttctccgctccatgcattctcttgatgttgtttggaggtacgagggagctgggaaaacaataacttccttagttgtgactcctgaggagtgcttcttggcgggaaccaaggatggtagcttgattgttttttcaatagaaaaccctttgcttcgtaaaaacgccatgcaacggcacaaggcaaaaccttccattggtggttagaggtgtagatcaaaacagtaccagaacttcttgctgcatttcaaataaagggatgtttatgggcctttataatatt

SEQ ID NO: 216777 - DNA, 2369 bp, Zea Mays
atggtcggtcgctgtacgctcatgatacaaaaggattataggggaaggtggaggtatgtgttgggagctgtagaaacatttctagatgctattccgtcagctggatttttccaagagactataacggtggtcaacaacacattagtaaatggtacaacaaaaagtggcgcaacaactatatcaacaccaagtctgcatgacctccagatctacgtcctcttctcaatactatgcatttacattggcgtctccattgcgccagagcctggtgcttcaaagggaatcactgggttgagcatcgtcacacttgcggagaactggggttcagagtaccaacctacaaacgatgctggtgttcctgatccaaatggatcgatatactgggatttcaatgcattgctaggactctttttcccggcagtcaccggaatcatggctggttcaaaccggtctgcatcactaagagacacacagagttccataccagttggaacgttaagtgctaccctttcgactactgtgatgtacctgctatctgtgtttatttttggagccttggctacaagagaagagcttctaactgacaggcttctcgctgcagcgatcgcgtggcctggtccagcaatgatctacattggaatcattctgtccaccttgggcgcagcgctacagagcatgacaggggctccgaggttactcgcggcgatagcgaacgacgacatcctccccatcctcaactgtttcaaggcctacgaagggtctgagcctcatgtggcgactctgttcacgagcttcatatgcgttgcctgtgtcgtgatcgggaacctggatctgatcacgcccaccatcaccatgttcttccttctgtgctatgctggtgttaacttgtcgtgctttcttctggatctcctggacgctcctagctggcgccctcgctggaagatacaccactggctcctctcgctggtcggtgcaactcaatgtatcgttatcatgtttatgatctcatggacatttaccgtggtgtccctcgccctcgcaagcctaatctactactacgtgagcttaaaaggaaaggctggggactggggagatggattcaaaagcgcatactttcagctggctctgcgaagcctcagatcgctgggagcaaacagcgtacatccaaagaactggtacccgattcctctcatattctgccgcccttggggcaagcttccagagaacgtcccgtgccatccgaagctcgcggacttcgccaactgcatgaagaagaagggccgcggcatgtccatcttcgtctcgatcatcgacggcgactaccacgaatcggtcgaggaagccaacgcggcgtaccgccagctcagcgcctacatcgactacaagcagtgcgagggcgtcgcggagatcatcgtggctcgctccatatccgacggtttccgcagcatcgtccagatcatggggctcggcaacctcaagccgaacatcgtcgtcatgcggtacccggagatatggcggcgcgagaacctggcgcagattccgtcgtcgttcaccagcatcataaacgactgcatcatcgcgaacaaggccatcgtcatcgtgaaagggctggacgagtggccgaacgagttccagaggctgtacgggaccattgacctgtactggatcgtgagggacgggggcctgatgcttctgctgtctcagctcctgctcgccagagacggcttcgagagctgcaagatccaggtgttctgcatcgcggaagagggcacggaagccgaggagctgaaggctgacgtcaagaagttcctgtatgatctgaggatgcgagctgaggtcatcgttgtgaccatgaagtcgatggaagcgcactctgagatcagccctaacgctaagaaggatccccaggaagagtacgcgagcgcccaggatagaatcagagcgtacctgtcgcagatgaaggaggatgcgcagagggaaggtcggccattgatggaggacggcaggcaggtcgtggttaacgaagagaaggtcgagaagttcctctacacgatgctgaagctgaatacaaccatcgtcaagtactccatgatggcagccgtggtgctggtgagcctcccgccgccgccgctgaaccacccggcctactgctacatggaatacatggatctgctcgtcgtcaacgtcccacggatgctgatagttaggggatatagaagagacgttgtcacacttttcacgtgattatatattgggtttttgatgtactgcactgcacatttataagacaagctagctagatgtagcaaagaaatataaataaaatcgacgctcgtgattattgggtttgaattggaataagcacaggg

SEQ ID NO: 216778 - DNA, 1807 bp, Zea Mays
agcttgaattctccaattccataaagcttctcgctgcagcgatcgcgtggcctggtccagcaatgatctacattggaatcattctgtccaccttgggcgcagcgctacagagcatgacaggggctccgaggttactcgcggcgatagcgaacgacgacatcctccccatcctcaactgtttcaaggcctacgaagggtctgagcctcatgtggcgactctgttcacgagcttcatatgcgttgcctgtgtcgtgatcgggaacctggatctgatcacgcccaccatcaccatgttcttccttctgtgctatgctggtgttaacttgtcgtgctttcttctggatctcctggacgctcctagctggcgccctcgctggaagatacaccactggctcctctcgctggtcggtgcaactcaatgtatcgttatcatgtttatgatctcatggacatttaccgtggtgtccctcgccctcgcaagcctaatctactactacgtgagcttaaaaggaaaggctggggactggggagatggattcaaaagcgcatactttcagctggctctgcgaagcctcagatcgctgggagcaaacagcgtacatccaaagaactggtacccgattcctctcatattctgccgcccttggggcaagcttccagagaacgtcccgtgccatccgaagctcgcggacttcgccaactgcatgaagaagaagggccgcggcatgtccatcttcgtctcgatcatcgacggcgactaccacgaatcggtcgaggaagccaacgcggcgtaccgccagctcagcgcctacatcgactacaagcagtgcgagggcgtcgcggagatcatcgtggctcgctccatatccgacggtttccgcagcatcgtccagatcatggggctcggcaacctcaagccgaacatcgtcgtcatgcggtacccggagatatggcggcgcgagaacctggcgcagattccgtcgtcgttcaccagcatcataaacgactgcatcatcgcgaacaaggccatcgtcatcgtgaaagggctggacgagtggccgaacgagttccagaggctgtacgggaccattgacctgtactggatcgtgagggacgggggcctgatgcttctgctgtctcagctcctgctcgccagagacggcttcgagagctgcaagatccaggtgttctgcatcgcggaagagggcacggaagccgaggagctgaaggctgacgtcaagaagttcctgtatgatctgaggatgcgagctgaggtcatcgttgtgaccatgaagtcgatggaagcgcactctgagatcagccctaacgctaagaaggatccccaggaagagtacgcgagcgcccaggatagaatcagagcgtacctgtcgcagatgaaggaggatgcgcagagggaaggtcggccattgatggaggacggcaggcaggtcgtggttaacgaagagaaggtcgagaagttcctctacacgatgctgaagctgaatacaaccatcgtcaagtactccatgatggcagccgtggtgctggtgagcctcccgccgccgccgctgaaccacccggcctactgctacatggaatacatggatctgctcgtcgtcaacgtcccacggatgctgatagttaggggatatagaagagacgttgtcacacttttcacgtgattatatattgggtttttgatgtactgcactgcacatttataagacaagctagctagatgtagcaaagaaatataaataaaatcgacgctcgtgattattgggtttgaattggaataagcacaggg

SEQ ID NO: 216779 - DNA, 1957 bp, Zea Mays
gaaaaaaagtttcactcctccatccccattcccgaagtcataaacctccactcgcggacttgccatgacgtccgtaccgctaccacccctctccgccgccctcgcccaatatcgcccctccgcggccgccacccttcgcttccgcaccccctcttccgcgcccggcgtttcggcttcttcgtctacccgggcgcgcaggttctcggttatcgcgtcggcgcgcgagatgccgtggccgcacgtgctgacggtggccggctccgactccagcgccggcgcgggcatccaggcggacatcaaggcgtgcgcggccctaggagcctactgctcctccgtaatcactgctgtcaccgcgcagaacaccgtcggcgtccaggggatccatgctgtgccggagaagttcgtgggagagcagctcaggtcggttctctcggacatgtcggtggacgtggtgaaaacagggatgctcccttcagctggagtagtcaaagttctgtgtgagagtcttaggaagtttccagtcaaaggcagctctagtggtggatccggtcatggtgtccaccagcggtgatactctttcaggaccatctactctcgctacatatagatatgtgcttgtgaaaggcggggatatgccagattcatcagatgcaattgatgtgttatttgatggtaaggagttcactgagcttcgtggtctgcgtataaagacccgtaacacacatggaactggttgcacattagcttcatgtattgctgctgaattagcaaaaggcgcaacgatgctgcatgctgtccaggctgcgaagaaatttgtggaatctgctctttatcacagcaaagatcttgtgattggaaatggacctcagggcccttttgaccaccacttcgagctcaagtctccatcatacaagatgggatcactgcaaaagttcaatccagatgacctcttcctgtacgcagtgacagactctgggatgaacaagaagtggggtcgttcgataaaagatgccgtgaaagctgccattgaaggtggcgctaccattgtccaactgaggttatctttcttgaaaacgaccaaagttcctctagtgattcagtctgtcttcattcgatttcgttgaccgtgctttgagtgtccaatgttcagagaaaaagacgccgagacacgggagttcttggaagctgccaaggcctgtgtggaaatctgcaagtccagtggagtgccgctactgatcaatgaccgcgtagatgttgctctggcatgcgacgcagatggcgtccacgttggccaatcagacatgccagcatgggaagtacgacggctcctaggacctggaaaaatcatcggcgtctcatgtaaaaccccggcccaggccgagcaggcatggaaggatggcgcagactacatcggctgtggcggtgtcttcccgaccacgacgaaggcaaacaaccctaccttagggttcgagggcttgaggactgtgtgcttagcttcgaagctacctgtggtggccatcggcggcatcaatgctggaaatgcaggctcggtgatggagcttgggctcccaaatctgaaaggtgtggctgtggtctctgctctgtttgaccgggaacgtgtcgcggctgagacaagaaacctcagatccatcctgatgaagaatgcttactcaaggtcttagagcaagttgggatatgccgcctgttcatttactttctttgtttaggcccgaaataagtttgtaatcaatcactttgtcataaggagaaaccaaacaggcgctgcaatcttcaataaaccggagtcattatttctctggaaaagaacaattctgtgacatttccgaagtgtgatacatttcaaaggcactgaactgtgtaataagaaatcaataatgtaccagaactatatttgatgcaagtactaacttggaaataatccacgggctgaaatgag

SEQ ID NO: 216780 - DNA, 2018 bp, Zea Mays
gaaaaaaagtttcactcctccatccccattcccgaagtcataaacctccactcgcggacttgccatgacgtccgtaccgctaccacccctctccgccgccctcgcccaatatcgcccctccgcggccgccacccttcgcttccgcaccccctcttccgcgcccggcgtttcggcttcttcgtctacccgggcgcgcaggttctcggttatcgcgtcggcgcgcgagatgccgtggccgcacgtgctgacggtggccggctccgactccagcgccggcgcgggcatccaggcggacatcaaggcgtgcgcggccctaggagcctactgctcctccgtaatcactgctgtcaccgcgcagaacaccgtcggcgtccaggtgaaaacagggatgctcccttcagctggagtagtcaaagttctgtgtgagagtcttaggaagtttccagtcaaaggcagctctagtggtggatccggtcatggtgtccaccagcggtgatactctttcaggaccatctactctcgctacatatagggatgaactattttctatggctgatatagtcactcccaaatgtgaaagaagcatctaagttacttggtgatgtatcattgcatacaatttctgacatgtgcaatgcagctgaatccatttataaacttggtcccaaatatgtgcttgtgaaaggcggggatatgccagattcatcagatgcaattgatgtgttatttgatggtaaggagttcactgagcttcgtggtctgcgtataaagacccgtaacacacatggaactggttgcacattagcttcatgtattgctgctgaattagcaaaaggcgcaacgatgctgcatgctgtccaggctgcgaagaaatttgtggaatctgctctttatcacagcaaagatcttgtgattggaaatggacctcagggcccttttgaccaccacttcgagctcaagtctccatcatacaagatgggatcactgcaaaagttcaatccagatgacctcttcctgtacgcagtgacagactctgggatgaacaagaagtggggtcgttcgataaaagatgccgtgaaagctgccattgaaggtggcgctaccattgtccaactgaggttatctttcttgaaaacgaccaaagttcctctagtgattcagtctgtcttcattcgatttcgttgaccgtgctttgagtgtccaatgttcagagaaaaagacgccgagacacgggagttcttggaagctgccaaggcctgtgtggaaatctgcaagtccagtggagtgccgctactgatcaatgaccgcgtagatgttgctctggcatgcgacgcagatggcgtccacgttggccaatcagacatgccagcatgggaagtacgacggctcctaggacctggaaaaatcatcggcgtctcatgtaaaaccccggcccaggccgagcaggcatggaaggatggcgcagactacatcggctgtggcggtgtcttcccgaccacgacgaaggcaaacaaccctaccttagggttcgagggcttgaggactgtgtgcttagcttcgaagctacctgtggtggccatcggcggcatcaatgctggaaatgcaggctcggtgatggagcttgggctcccaaatctgaaaggtgtggctgtggtctctgctctgtttgaccgggaacgtgtcgcggctgagacaagaaacctcagatccatcctgatgaagaatgcttactcaaggtcttagagcaagttgggatatgccgcctgttcatttactttctttgtttaggcccgaaataagtttgtaatcaatcactttgtcataaggagaaaccaaacaggcgctgcaatcttcaataaaccggagtcattatttctctggaaaagaacaattctgtgacatttccgaagtgtgatacatttcaaaggcactgaactgtgtaataagaaatcaataatgtaccagaactatatttgatgcaagtactaacttggaaataatccacgggctgaaatgag

SEQ ID NO: 216781 - DNA, 1921 bp, Zea Mays
gaaaaaaagtttcactcctccatccccattcccgaagtcataaacctccactcgcggacttgccatgacgtccgtaccgctaccacccctctccgccgccctcgcccaatatcgcccctccgcggccgccacccttcgcttccgcaccccctcttccgcgcccggcgtttcggcttcttcgtctacccgggcgcgcaggttctcggttatcgcgtcggcgcgcgagatgccgtggccgcacgtgctgacggtggccggctccgactccagcgccggcgcgggcatccaggcggacatcaaggcgtgcgcggccctaggagcctactgctcctccgtaatcactgctgtcaccgcgcagaacaccgtcggcgtccaggtgaaaacagggatgctcccttcagctggagtagtcaaagttctgtgtgagagtcttaggaagtttccagtcaaagctctagtggtggatccggtcatggtgtccaccagcggtgatactctttcaggaccatctactctcgctacatatagggatgaactattttctatggctgatatagtcactcccaaatgtgaaagaagcatctaagttacttggtgatgtatcattgcatacaatttctgacatgtgcaatgcagctgaatccatttataaacttggtcccaaatatgtgcttgtgaaaggcggggatatgccagattcatcagatgcaattgatgtgttatttgatggtaaggagttcactgagcttcgtggtctgcgtataaagacccgtaacacacatggaactggttgcacattagcttcatgtattgctgctgaattagcaaaaggcgcaacgatgctgcatgctgtccaggctgcgaagaaatttgtggaatctgctctttatcacagcaaagatcttgtgattggaaatggacctcagggcccttttgaccaccacttcgagctcaagtctccatcatacaagatgggatcactgcaaaagttcaatccagatgacctcttcctgtacgcagtgacagactctgggatgaacaagaagtggggtcgttcgataaaagatgccgtgaaagctgccattgaaggtggcgctaccattgtccaactgagagaaaaagacgccgagacacgggagttcttggaagctgccaaggcctgtgtggaaatctgcaagtccagtggagtgccgctactgatcaatgaccgcgtagatgttgctctggcatgcgacgcagatggcgtccacgttggccaatcagacatgccagcatgggaagtacgacggctcctaggacctggaaaaatcatcggcgtctcatgtaaaaccccggcccaggccgagcaggcatggaaggatggcgcagactacatcggctgtggcggtgtcttcccgaccacgacgaaggcaaacaaccctaccttagggttcgagggcttgaggactgtgtgcttagcttcgaagctacctgtggtggccatcggcggcatcaatgctggaaatgcaggctcggtgatggagcttgggctcccaaatctgaaaggtgtggctgtggtctctgctctgtttgaccgggaacgtgtcgcggctgagacaagaaacctcagatccatcctgatgaagaatgcttactcaaggtcttagagcaagttgggatatgccgcctgttcatttactttctttgtttaggcccgaaataagtttgtaatcaatcactttgtcataaggagaaaccaaacaggcgctgcaatcttcaataaaccggagtcattatttctctggaaaagaacaattctgtgacatttccgaagtgtgatacatttcaaaggcactgaactgtgtaataagaaatcaataatgtaccagaactatatttgatgcaagtactaacttggaaataatccacgggctgaaatgag

SEQ ID NO: 216782 - DNA, 5294 bp, Zea Mays
gtccatccgtcacggcgccaccacctctacctccttccctcaccttccagagcccactgctcctcggcggcggcggagatgagcgtgtggaactacgtcgtcacggcgcacaagcccaccagcgtcagccactcctgcgtaggcaactttaccagccccaaccagctcaaccttattatcgcgaaatgtacccggatcgaaatccatttgcttacccctcagggcctccagccgatgcttgatgtgcctatatatggaagaattgcaacgattgagctcttccggcctcataatgagactcaggactttcttttcattgctacggagaggtacaaattctgtgttctgcaatgggatgcagaaaagtcagagctaatcaccagagccatgggtgatgtttctgatcgcattggccgccctactgacaatggacagattggaatcattgaccctgactgtagactcattggtcttcatctctatgatggcttatttaaggttataccatttgacaacaaagggcagctgaaggaagctttcaatatcagacttgaagaacttcaagtactggacatcaaatttctacatggttgtgctaaacctactattgttgtcctctaccaggataataaagatgtgaggcatgttaagacttatgaagttgcactgaaggacaaagattttgttgagggtccttggtcccagaataatgtagataatggtgctggtttattaataccagtaccagctccacttggcggtgtgataataattggcgaggaacaaatagtttactgcaatgccaattccacatttaaagcgataccaataaaacaatccatcatcagagcttatggacgggttgacccagatggttctcgatatttactcggtgataatactggaattttgcatttacttgtccttacccatgaacgagaaagggttactggtttgaaaattgaatacctgggagagacttcgattgcatcatctatttcgtatcttgataatggtgttgtttacgtcggttcacggtttggcgattcacagctggtgaagctgaacctccaagctgatgcaagcggttcatttgttgaaattcttgaacggtatgttaatcttggaccgattgtggacttctgcgtggttgaccttgataggcagggtcaaggtcaggtggtcacttgttctggggcgtttaaagatggttcccttcgggtggttcgtaatggtatagggattaatgagcaggcttcagtagaactccaaggcataaagggattatggtcattgaaatcttcgatcaatgatccatttgacatgtaccttgtcgtgagctttataagtgagacacgattcttggcaatgaacatggaagatgaactagaagagactgagatagaggggtttgatgcacaaactcaaactctgttttgtcagaatgcgatcaatgatcttcttatacaggttactgctaattctgttcggttagtcagttgcacctcccgggagttagtgaatcaatggaatgcaccagcaggattctcagtcaatgttgcttcagctaatgccagccaggttctgttggcaaccggtggtggccatcttgtttacctggaaattagggatgctaaacttgttgaagtgaagcatgctcagctagaacatgagatttcttgtcttgatttgaacccaattggggagaatccacaatatagttccctagctgctgttgggatgtggacagatataagtgttagaatattttcgcttccagatcttgaattgataaggaaggaaaatttgggtggagaaattgttcctcggtctgttctgctgtgcaccttggagggggtttcgtatttgctttgtgctcttggggatggtaatttgttcagttttctactgaatgcaagtacaggtgaactgactgatagaaagaaggttaccctcgggacccaacccatcagccttcgtaccttctcatcaaagggtaccacccacgtgttcgcttcgtcagataggccaactgtcatctatagcagcaataagaagcttctctacagcaatgtcaatttgaaagaggttaatcatatgtgccctttcaatacagccgcttttccagacagtcttgcaattgctaaagagggtgaactttcaattggaactatcgatgatatacagaagcttcatatccgcacaatcccccttaatgaacaagcacgtcgcatttgtcaccaggagcaatcaaggacactagcattttgcagtttcaagtacaaccagagtgtggaggaaagtgagactcatttaatacgtctgctagatcatcagacgtttgagtccctgtgtgtatatcctctagatcaatatgaatgtggctgctccatcattagctgttcgtttgcggatgatagtaatgtttattactgtgtgggaactgcatatgttatacctgaagaaaatgaaccgacgaagggccggattcttgtatttgcagttgaagatggaagcttgcaattgatcgtggagaaagaaaccaaaggagcagtttattcgctgaatgcattcaatgggaaattgttggctgctatcaaccagaagattcaattgtataagtggatgtcacgcgaggatggttcacatgagctgcagtctgagtgtggccaccatgggcacatacttgccttgtatactcaaacacgtggtgacttcattgtggttggcgatctgatgaaatcaatatccttgctggtgtataaggtggatacaattctggacaaggagaactttacattggaagagcttcttgatgaggatgaaatcattcaggagtgcaaagcgctgaatacccgactcataaatttcttgcgagataaggcccaagtgtcgcaattacttcgttacattgtggaagaagttcctgaggattcagagaagaaacaatctttcaagtttccttttatcgcttgtgagatttttgcttgtgaaattgacattattttgagaaccttggtagaggatgttgagttaatggatttgcttttttcatttataaaacctgaccatccgcatagcacactgttagctggttacttcagtaaggtggttatatgtttgatgcttcgaaagactgctcctcttatgaattatgttcaggagcatccagatattgttgtccagcttgtcgacctcattggtatcacatcaataatggaggtgttggtgagattgattggtgctgatgaaaccatatacttgaatttcgcggatacattgcattggttagagaatacatatgtactggaaatgattgtggataaatttagctcatcagactctcctgaagtgcatgcaaatgctgctgaaattctttctgcggtaactcgatgcgcccctcctgctcttgctgcaaaaatatgcagtccaagttttgttggcaggttgtttcatcatgctcttgacgagtcaagaccaaaatctgttctggttcattcattgtcagtgtgtatatctttattggaccccaaaagactagcatcagtctcataccaagcatttagaagcaacttaactcacgggacgctggttacagccagtccagaaacagttgatggtatactggagagtctaggtgacttgctgaagttactggacattacttcttctcaaaatgtttttcctacaacttatggatgtttgtgtccgcctcttggaaaacaccgtttgaagattgtagaattcatctctgttttgctaacaattggtagcgaaatagctgagaagaagctaataagccaatcagtgataaagcattgcattgatttattttttcagtacccttataataactttttgcatcatcatgttgagaacattattgtttcttgccttgaggttaaaagaaatcaattgattgaccatattcttaatgactgtggtcttgttggtaaagtccttgccgctgaaaaaagttcttctctggcagtggagtctaatgggccaacattaccatcagaagggaaagaacctccaagaattgggaatattgggcacataactcgaatagcgaataagctcattcaatttggaaatagtaacagcatgatccagagtcacttgcaggagaacagtgagtgggctgtatggcaaatagatgtcctgatcaaacgcaatgaggtggagaatgtttaccattgggcatgtggccgtccaacatctctacatgatcgtgggagggatagcgatgacgacgacttccgagacagagactacgatgtggcagcactcactaataatatgagccaggcatttcgatttgggatatacaggaatgatgacattgaagaggcacaaggatcccacgaacgagatgatgaggatgtctactttgatgacgagtcagctgaagtagtaatatcttcattgtgtttgggggatgatcaggacagttcactcttcacgaattcaaactggtttacgtttgatggtgatagaggaatcaatgaccgcctagctgcctctgttcctccatcatccccggattctgaagcgatttccttaaacactgagaatactgatgaagcgctaactggtgaaaccactggaggcactgagtcactgcgggaaagtgcatcccttgccaatgaactagcagaagtcgctaacgacaatgatgctgatgccacggacggtgagaaaattttgtgtacagaagaggacagtcaagcctccgaggggcctgtggatgctaaagaggacaagactggaggagcgtctaaagcagcgaatgaatctgtgcctgacaatgccttgcctgaatcccaccacactgattgtcggtgcgctgactcatctgaatcaggaacagaagaagatgtggagattgatgatgagaagaaatctgagactgctatgacaaatgaatgagcgttatgggcttggaatgataggatggcggatcagattcttttgctggtgagcaatgccactcaagcaggggcgccgtacaattttaacagcgctgctttgctattgaggagtctggttgttactgcatactcgggcacgcacgctcttttatcatctcacctcatcaccatcatcccacatggaccaatgtcgtctggcggctcctgattttggtctcttcgaactgtaatatctgcagtgagttttttccatcagtttttatttttttttccgggtttctgcatctgtaatagctatttcttcaagcgcaaaacatgtcttctctttgttgctataaaaagcatatagtttcaccaaaa

SEQ ID NO: 216783 - DNA, 4949 bp, Zea Mays
gtccatccgtcacggcgccaccacctctacctccttccctcaccttccagagcccactgctcctcggcggcggcggagatgagcgtgtggaactacgtcgtcacggcgcacaagcccaccagcgtcagccactcctgcgtaggcaactttaccagccccaaccagctcaaccttattatcgcgaaatgtacccggatcgaaatccatttgcttacccctcagggcctccagccgatgcttgatgtgcctatatatggaagaattgcaacgattgagctcttccggcctcataatgagactcaggactttcttttcattgctacggagaggtacaaattctgtgttctgcaatgggatgcagaaaagtcagagctaatcaccagagccatgggtgatgtttctgatcgcattggccgccctactgacaatggacagattggaatcattgaccctgactgtagactcattggtcttcatctctatgatggcttatttaaggttataccatttgacaacaaagggcagctgaaggaagctttcaatatcagacttgaagaacttcaagtactggacatcaaatttctacatggttgtgctaaacctactattgttgtcctctaccaggataataaagatgtgaggcatgttaagacttatgaagttgcactgaaggacaaagattttgttgagggtccttggtcccagaataatgtagataatggtgctggtttattaataccagtaccagctccacttggcggtgtgataataattggcgaggaacaaatagtttactgcaatgccaattccacatttaaagcgataccaataaaacaatccatcatcagagcttatggacgggttgacccagatggttctcgatatttactcggtgataatactggaattttgcatttacttgtccttacccatgaacgagaaagggttactggtttgaaaattgaatacctgggagagacttcgattgcatcatctatttcgtatcttgataatggtgttgtttacgtcggttcacggtttggcgattcacagctggtgaagctgaacctccaagctgatgcaagcggttcatttgttgaaattcttgaacggtatgttaatcttggaccgattgtggacttctgcgtggttgaccttgataggcagggtcaaggtcaggtggtcacttgttctggggcgtttaaagatggttcccttcgggtggttcgtaatggtatagggattaatgagcaggcttcagtagaactccaaggcataaagggattatggtcattgaaatcttcgatcaatgatccatttgacatgtaccttgtcgtgagctttataagtgagacacgattcttggcaatgaacatggaagatgaactagaagagactgagatagaggggtttgatgcacaaactcaaactctgttttgtcagaatgcgatcaatgatcttcttatacaggttactgctaattctgttcggttagtcagttgcacctcccgggagttagtgaatcaatggaatgcaccagcaggattctcagtcaatgttgcttcagctaatgccagccaggttctgttggcaaccggtggtggccatcttgtttacctggaaattagggatgctaaacttgttgaagtgaagcatgctcagctagaacatgagatttcttgtcttgatttgaacccaattggggagaatccacaatatagttccctagctgctgttgggatgtggacagatataagtgttagaatattttcgcttccagatcttgaattgataaggaaggaaaatttgggtggagaaattgttcctcggtctgttctgctgtgcaccttggagggggtttcgtatttgctttgtgctcttggggatggtaatttgttcagttttctactgaatgcaagtacaggtgaactgactgatagaaagaaggttaccctcgggacccaacccatcagccttcgtaccttctcatcaaagggtaccacccacgtgttcgcttcgtcagataggccaactgtcatctatagcagcaataagaagcttctctacagcaatgtcaatttgaaagaggttaatcatatgtgccctttcaatacagccgcttttccagacagtcttgcaattgctaaagagggtgaactttcaattggaactatcgatgatatacagaagcttcatatccgcacaatcccccttaatgaacaagcacgtcgcatttgtcaccaggagcaatcaaggacactagcattttgcagtttcaagtacaaccagagtgtggaggaaagtgagactcatttaatacgtctgctagatcatcagacgtttgagtccctgtgtgtatatcctctagatcaatatgaatgtggctgctccatcattagctgttcgtttgcggatgatagtaatgtttattactgtgtgggaactgcatatgttatacctgaagaaaatgaaccgacgaagggccggattcttgtatttgcagttgaagatggaagcttgcaattgatcgtggagaaagaaaccaaaggagcagtttattcgctgaatgcattcaatgggaaattgttggctgctatcaaccagaagattcaattgtataagtggatgtcacgcgaggatggttcacatgagctgcagtctgagtgtggccaccatgggcacatacttgccttgtatactcaaacacgtggtgacttcattgtggttggcgatctgatgaaatcaatatccttgctggtgtataagcatgaggaaagcgcgattgaagagcgtgctagggattacaatgcaaactggatgactgcagttgagatgcttgatgatgaagtctacgttggggcggagaatagctataacctattcacggtgcgcaagaacagcgatgcggcgacagatgacgaaagggccaggcttgaggtggtgggagagtaccaccttggggagtttgtgaacagattccgccacggttcactggtgatgcgccttccagactcggatatagggcagatccctacggtcatctttggcacaataaacggggtgattggcattattgcctccctcccgcacgaccaatacatcttcctggagaagctccagtcgacccttgtgaagtacataaagggcgtcggaaacctgagccacgagcaatggcggtccttccataacgacaagaagacggcggaggctcggaacttcctcgacggtgacctgatcgagtctttccttgaccttagccggagcaagatggaggaggtgtccaaggcgatgggcgtccccgtggaggagctgtccaagagggtggaagagctgacgaggcttcactagtgtagatggaacatggaagcgttgcttgtggatacaattctggacaaggagaactttacattggaagagcttcttgatgaggatgaaatcattcaggagtgcaaagcgctgaatacccgactcataaatttcttgcgagataaggcccaagtgtcgcaattacttcgttacattgtggaagaagttcctgaggattcagagaagaaacaatctttcaagtttccttttatcgcttgtgagatttttgcttgtgaaattgacattattttgagaaccttggtagaggatgttgagttaatggatttgcttttttcatttataaaacctgaccatccgcatagcacactgttagctggttacttcagtaaggtggttatatgtttgatgcttcgaaagactgctcctcttatgaattatgttcaggagcatccagatattgttgtccagcttgtcgacctcattggtatcacatcaataatggaggactctcctgaagtgcatgcaaatgctgctgaaattctttctgcggtaactcgatgcgcccctcctgctcttgctgcaaaaatatgcagtccaagttttgttggcaggttgtttcatcatgctcttgacgagtcaagaccaaaatctgttctggttcattcattgtcagtgtgtatatctttattggaccccaaaagactagcatcagtctcataccaagcatttagaagcaacttaactcacgggacgctggttacagccagtccagaaacagttgatggtatactggagagtctaggtgacttgctgaagttactggacattacttcttctcaaaatgtttttcctacaacttatggatgtttgtgtccgcctcttggaaaacaccgtttgaagattgtagaattcatctctgttttgctaacaattggtagcgaaatagctgagaagaagctaataagccaatcagtgataaagcattgcattgatttattttttcagtacccttataataactttttgcatcatcatgttgagaacattattgtttcttgccttgaggttaaaagaaatcaattgattgaccatattcttaatgactgtggtcttgttggtaaagtccttgccgctgaaaaaagttcttctctggcagtggagtctaatgggccaacattaccatcagaagggaaagaacctccaagaattgggaatattgggcacataactcgaatagcgaataagctcattcaatttggaaatagtaacagcatgatccagagtcacttgcaggagaacagtgagtgggctgtatggcaaatagatgtcctgatcaaacgcaatgaggtggagaatgtttaccattgggcatgtggccgtccaacatctctacatgatcgtgggagggatagcgatgacgacgacttccgagacagagactacgatgtggcagcactcactaataatatgagccaggcatttcgatttgggatatacaggaatgatgacattgaagaggtgaactgcgcatcattatattaagaagatagaagggtccaaaatacaccaatacaagataaagaaaccaccttacggtgggcaaaaaagaaaatacaaaaagc

SEQ ID NO: 216784 - DNA, 3543 bp, Zea Mays
gtccatccgtcacggcgccaccacctctacctccttccctcaccttccagagcccactgctcctcggcggcggcggagatgagcgtgtggaactacgtcgtcacggcgcacaagcccaccagcgtcagccactcctgcgtaggcaactttaccagccccaaccagctcaaccttattatcgcgaaatgtacccggatcgaaatccatttgcttacccctcagggcctccagccgatgcttgatgtgcctatatatggaagaattgcaacgattgagctcttccggcctcataatgagactcaggactttcttttcattgctacggagaggtacaaattctgtgttctgcaatgggatgcagaaaagtcagagctaatcaccagagccatgggtgatgtttctgatcgcattggccgccctactgacaatggacagattggaatcattgaccctgactgtagactcattggtcttcatctctatgatggcttatttaaggttataccatttgacaacaaagggcagctgaaggaagctttcaatatcagacttgaagaacttcaagtactggacatcaaatttctacatggttgtgctaaacctactattgttgtcctctaccaggataataaagatgtgaggcatgttaagacttatgaagttgcactgaaggacaaagattttgttgagggtccttggtcccagaataatgtagataatggtgctggtttattaataccagtaccagctccacttggcggtgtgataataattggcgaggaacaaatagtttactgcaatgccaattccacatttaaagcgataccaataaaacaatccatcatcagagcttatggacgggttgacccagatggttctcgatatttactcggtgataatactggaattttgcatttacttgtccttacccatgaacgagaaagggttactggtttgaaaattgaatacctgggagagacttcgattgcatcatctatttcgtatcttgataatggtgttgtttacgtcggttcacggtttggcgattcacagctggtgaagctgaacctccaagctgatgcaagcggttcatttgttgaaattcttgaacggtatgttaatcttggaccgattgtggacttctgcgtggttgaccttgataggcagggtcaaggtcaggtggtcacttgttctggggcgtttaaagatggttcccttcgggtggttcgtaatggtatagggattaatgagcaggcttcagtagaactccaaggcataaagggattatggtcattgaaatcttcgatcaatgatccatttgacatgtaccttgtcgtgagctttataagtgagacacgattcttggcaatgaacatggaagatgaactagaagagactgagatagaggggtttgatgcacaaactcaaactctgttttgtcagaatgcgatcaatgatcttcttatacaggttactgctaattctgttcggttagtcagttgcacctcccgggagttagtgaatcaatggaatgcaccagcaggattctcagtcaatgttgcttcagctaatgccagccaggttctgttggcaaccggtggtggccatcttgtttacctggaaattagggatgctaaacttgttgaagtgaagcatgctcagctagaacatgagatttcttgtcttgatttgaacccaattggggagaatccacaatatagttccctagctgctgttgggatgtggacagatataagtgttagaatattttcgcttccagatcttgaattgataaggaaggaaaatttgggtggagaaattgttcctcggtctgttctgctgtgcaccttggagggggtttcgtatttgctttgtgctcttggggatggtaatttgttcagttttctactgaatgcaagtacaggtgaactgactgatagaaagaaggttaccctcgggacccaacccatcagccttcgtaccttctcatcaaagggtaccacccacgtgttcgcttcgtcagataggccaactgtcatctatagcagcaataagaagcttctctacagcaatgtcaatttgaaagaggttaatcatatgtgccctttcaatacagccgcttttccagacagtcttgcaattgctaaagagggtgaactttcaattggaactatcgatgatatacagaagcttcatatccgcacaatcccccttaatgaacaagcacgtcgcatttgtcaccaggagcaatcaaggacactagcattttgcagtttcaagtacaaccagagtgtggaggaaagtgagactcatttaatacgtctgctagatcatcagacgtttgagtccctgtgtgtatatcctctagatcaatatgaatgtggctgctccatcattagctgttcgtttgcggatgatagtaatgtttattactgtgtgggaactgcatatgttatacctgaagaaaatgaaccgacgaagggccggattcttgtatttgcagttgaagatggaagcttgcaattgatcgtggagaaagaaaccaaaggagcagtttattcgctgaatgcattcaatgggaaattgttggctgctatcaaccagaagattcaattgtataagtggatgtcacgcgaggatggttcacatgagctgcagtctgagtgtggccaccatgggcacatacttgccttgtatactcaaacacgtggtgacttcattgtggttggcgatctgatgaaatcaatatccttgctggtgtataagcatgaggaaagcgcgattgaagagcgtgctagggattacaatgcaaactggatgactgcagttgagatgcttgatgatgaagtctacgttggggcggagaatagctataacctattcacggtgcgcaagaacagcgatgcggcgacagatgacgaaagggccaggcttgaggtggtgggagagtaccaccttggggagtttgtgaacagattccgccacggttcactggtgatgcgccttccagactcggatatagggcagatccctacggtcatctttggcacaataaacggggtgattggcattattgcctccctcccgcacgaccaatacatcttcctggagaagctccagtcgacccttgtgaagtacataaagggcgtcggaaacctgagccacgagcaatggcggtccttccataacgacaagaagacggcggaggctcggaacttcctcgacggtgacctgatcgagtctttccttgaccttagccggagcaagatggaggaggtgtccaaggcgatgggcgtccccgtggaggagctgtccaagagggtggaagagctgacgaggcttcactagtgtagatggaacatggaagcgttgcttgtaagcaagtagtaacttgttccctgagctgtagcctccgcggctcgcacgatcaaagtgttcggccgtggctgcagtctatcctatgctatatcctatcgtgatttgtttgtttgagctgtgccagtttcttttctttattattaatgcttaatgttaaaagtaaaa

SEQ ID NO: 216785 - DNA, 4964 bp, Zea Mays
tgaccaccagagaggggcgttgtggcgctggctagctatagctcgatccatcggaagaagttgaaccacacatcaactaacctctctgtcgtctcgcggcgatgtgtgaatctccatcatcctcgagaggccggtggcgccatagatatgatcagaagacaccgtcgactcagaaacgcggtgatgtgtgaatcgtcaatgttcctgatgtcgccgtctccgtcaccgtcaccgccgcagccgtctaggccgccaccggagtacaagcacttctgtcgagtatgcaacaagggattcacgtgcggcagtgcgctcggtggacatatgagagctcatggcgctagcgacgttgatgggttcggcgtcgacgacgacgactcgctcgacgaagagccgacggcgcccgcgcggtgcactggggcagatcagtgggacgtggcgggaacgtcgtcggcgactcacgcgtacgcgctccgggcgaatccgaataggttgatcaggagctgtcaggtttgcaagaactgcgggaaggagttcacgtcgtgggatcttttccttcaacacgggaaatgcaactcatcagagggcggcgagggagaagagggtgagatggatgggtcagactcgctacgttcgtcgctgcctgcctcagaagccggcggcggcggcgaggaggacccggcagtggcagcagccgcatggtcaaaagggaaaagatcgcgtcgtgtcgtcagaacagatgacccttcgtccaccatggtgtcggcggagcggtgcacgtcaggggacgaggacgaagagcttgcaaattttcttgtcatgctctcgtcgtccaaatccaacaacaacgacgaccaaacgatcgttattacagccgaccatcataaggagccagtatgtgcctctactggtgaaggtggtggtggtggagagcctttaccatttcaatcgcaaacaatctctcttttcacgcaaacccaaacacaagagccagttgtgccactgctgccttcgacggtagcggctacggtatctcaatacatcgcacccatatcacgtggagtttttgagtgcaaggcgtgcaagaaggtgttcacctcacaccaagctcttggaggacatcgggctagccacaagaaagtaaaaggttgttttgctgctaggttcgacaacaatgccaccgaaacagcgatcaataatcctactatagctgctgataccaatagtaaggccgttgttgtcaataatgcagatgcaagcgtagacgccgccacaagagtttttgctatcactagcgtcgacaccgatgtagggacaagtaatgaggcaacatcatcgtcgttgtcaatggcacatgctgttcccatacgacacaatccagcatcagccaccaccaccacgttcaccgtcgcagcgcattgcaagaaaaacgtgaagatgcatgagtgttcagtatgccaccgcttgttcacctctgggcaggcactcggaggtcacaaacgatgccactggctcacctcaaacacgtcagatccatgtaacccactagccatcccacccctaactgaagatctcgtcgtcggcgaagttaaacaccacgacgataccctccaaccaacggtggatgccaccgagccactcctcgacctcacaatagcagcaaatccagctgtagcactagctgcttctacaatgcgccccgacatagcatctactgtacacttgaagcaactagttgtcgcagcaccaagtaataatgttagccaccgaaagaaaactgcagcaacgggtagccataccacagatgcggtggttgaggaagatgaggcggatagcatcataatcaagaaagctaagattagcgatcttaaagacgtggtcaatatggatggtgagtctacacaaccatggctacaagttggtattggttcctcgtcagcccgaggagatgatggatgacaggggttaaaaaatcagttattctctactactctataagactctaacgtagaccatccgtgcaccgtggttctaccactccgtgttctgcccaccatcggtcgtatgacaggtgggtccccatgtctcggtccatcgccattccgttcaaccgtcgtccagcccgcgatggttctgctgccgctgcccctctcccacgcgtacactgtggttttactgcccatctcccactcttgtcaccgcgatcctcgcccccctgtgcgctctcccgatgcaaggaaacatgatggaatccacgcctgccgtggggagagggaagcaatctccacgatcatcgctcccgccttgaatcgcgcttggatccccttccatccttgacgccattggcccttccatccttggtgccctccgtccaacggcagcgatcccattccattggccagccatctccgcctcccttccacaagaacacctacgcgcctcccttccatccaccatcttcacgcttggatccccttcgaggcattagagcttgccatctaccttaggtctacaacaagcacagattacagcaagcccaccatctatttaagaaatcctccttgtgtaacacccgtggaaattccacaggcaaggccgccacccgcccactccaacctcatgcacaggcaaccgtgaagcatccacaagcaacagtgaaacgtaatctgtgcttgctactcatctgtccaaaagtcctacagtaagttctcgtctaatttgtgttagtcttgtttagttccgttgtctctgttctctcaatggttcagtacaatcttgttcatttcattgtgaatctgttcgaatctcgtttgtctgggttcagttcaatggtgtacatgtcaatttaattgttctgatttcagtgtactgagttcgaggcaatatataccaaacactggtattttgaatacatgtttggttcttgttatcagttagggtcttgttcagctagggtgtagttcttacattttgcatcaaagcatcgtaattttggctctaattttaactgatagagcacagagctgtgcttgaatagaaaagcacatctgacccagttaatgtttaggccatgagctccataaagattagatcagtcttcttccttgccaatggttcaactcactccaataatgtcattatgttcttgttagcagagaataagataataataggtttgcatcactagacaataatatgtgattggacagagggtatttttgtttgattactattaagacaatttttgtggtagctgtgatgccaaacaaaataaacacagcttgccataaaagctaggcatgatgacactagcaaggaagcacctggtttagtattattaattatagatgaccggtccatattttgaaactgttcttggacaacttcacaagccttagtctatttgaatctcgtttgtctaggttcagttcaatggtgtacatgtcaatttaattgttctgttagaatctcgtatgactttgtaaacatgattttagtgtactgagttcaaggtaatatataccaaacactggtattttgaatacatgtttggttctatgtagatctttttttttcttttcatctcgtgctcgggtatattagttaggctcttgttcagttagggtgtagttcttacatttttcaccaaagcatcgtaattttggctatacttgtaactgatagagcatagagcagtgcttgaatagaaaagcacatctgacccagttagtgttccaggccaacgagctccatacagattagatcagtcttattccttgccaatggttcaactcactccaataatgtcattctgttcttgttagtagcaaacatatgtaaacttttcgagttatctttttcctagaccctgctcatgtgggagcctctagcactgtctgccctggattatatgtgatagtcttttatttggcattttctcatgcactagcaagtgtatcatcatatctgcacatttcatgcaaaaagtcttgtaatagtacatgctctatcttttacccacttttgtttacactgaattatcagacacatacagtaatgttttgccaaagatcaattcctttctctgtgatatacacatgtttgctgggttgcatcaccccgaacaagttttgttttgggagttgttgttaacagtttggagtatgtgaagcagattcaaggtttatctgtcaagtattggttggcccgcaattcatacataggttctcgttggatgacatttatgtacagggtactggtgggcggtggtacatctgcgtcgggcacaccctgcactgcagcaagctctgtcgcatcctggccggactcttcctatagtacccattccgacaaggccatcgactagaacaaagatccttctagagaaccatattgtcgattcagaaatttctcttacagccactgttattttggtcggggccgatgtacatagagatgccagggaaggtgtcctggagtttgagagagctttcagggagaggttctctgcttacacattagctgctaagaggcatattgactccactaccatcttcgacgtccaaggtgtgatctatgtggtttttgctcttagaatatattgcttgtcatacatatgtttgttgttctgtatcacaacttctttagctaatttatatgatatgaggcctaggagttgccacttcgcttatgcttgcttcaactcttctcaggggctcacatggatcatcctcgagcgcaagcaaactttgagatcgcgctgaaagcatgtcatccctggaatccttcagttgggagtaacatttagttccactaagcacaaagattagtcaagtcgagaaggacatcgttctcaggccatcaatggcgccgcgctgcagctcttcagcttcgttgaggccatcagcatcggtcacccctccctagaaactcttcaagatcatagacctccacgacaggctctc

SEQ ID NO: 216786 - DNA, 2701 bp, Zea Mays
tgaccaccagagaggggcgttgtggcgctggctagctatagctcgatccatcggaagaagttgaaccacacatcaactaacctctctgtcgtctcgcggcgatgtgtgaatctccatcatcctcgatgtcgccgtctccgtcaccgtcaccgccgcagccgtctaggccgccaccggagtacaagcacttctgtcgagtatgcaacaagggattcacgtgcggcagtgcgctcggtggacatatgagagctcatggcgctagcgacgttgatgggttcggcgtcgacgacgacgactcgctcgacgaagagccgacggcgcccgcgcggtgcactggggcagatcagtgggacgtggcgggaacgtcgtcggcgactcacgcgtacgcgctccgggcgaatccgaataggttgatcaggagctgtcaggtttgcaagaactgcgggaaggagttcacgtcgtgggatcttttccttcaacacgggaaatgcaactcatcagagggcggcgagggagaagagggtgagatggatgggtcagactcgctacgttcgtcgctgcctgcctcagaagccggcggcggcggcgaggaggacccggcagtggcagcagccgcatggtcaaaagggaaaagatcgcgtcgtgtcgtcagaacagatgacccttcgtccaccatggtgtcggcggagcggtgcacgtcaggggacgaggacgaagagcttgcaaattttcttgtcatgctctcgtcgtccaaatccaacaacaacgacgaccaaacgatcgttattacagccgaccatcataaggagccagtatgtgcctctactggtgaaggtggtggtggtggagagcctttaccatttcaatcgcaaacaatctctcttttcacgcaaacccaaacacaagagccagttgtgccactgctgccttcgacggtagcggctacggtatctcaatacatcgcacccatatcacgtggagtttttgagtgcaaggcgtgcaagaaggtgttcacctcacaccaagctcttggaggacatcgggctagccacaagaaagtaaaaggttgttttgctgctaggttcgacaacaatgccaccgaaacagcgatcaataatcctactatagctgctgataccaatagtaaggccgttgttgtcaataatgcagatgcaagcgtagacgccgccacaagagtttttgctatcactagcgtcgacaccgatgtagggacaagtaatgaggcaacatcatcgtcgttgtcaatggcacatgctgttcccatacgacacaatccagcatcagccaccaccaccacgttcaccgtcgcagcgcattgcaagaaaaacgtgaagatgcatgagtgttcagtatgccaccgcttgttcacctctgggcaggcactcggaggtcacaaacgatgccactggctcacctcaaacacgtcagatccatgtaacccactagccatcccacccctaactgaagatctcgtcgtcggcgaagttaaacaccacgacgataccctccaaccaacggtggatgccaccgagccactcctcgacctcacaatagcagcaaatccagctgtagcactagctgcttctacaatgcgccccgacatagcatctactgtacacttgaagcaactagttgtcgcagcaccaagtaataatgttagccaccgaaagaaaactgcagcaacgggtagccataccacagatgcggtggttgaggaagatgaggcggatagcatcataatcaagaaagctaagattagcgatcttaaagacgtggtcaatatggatggcaaggccgccacccgcccactccaacctcatgcacaggcaaccgtgaagcatccacaagcaacagtgaaacgtaatctgtgcttgctactcatctgtccaaaagtcctacaggtactggtgggcggtggtacatctgcgtcgggcacaccctgcactgcagcaagctctgtcgcatcctggccggactcttcctatagtacccattccgacaaggtgcaaggatcaggtagcatgcccgctactctaccaccactgatccatatctttcaggtcattgtattgctattttgcaggccatcgactagaacaaagatccttctagagaaccatattgtcgattcagaaatttctcttacagccactgttattttggtcggggccgatgtacatagagatgccagggaaggtgtcctggagtttgagagagctttcagggagaggttctctgcttacacattagctgctaagaggcatattgactccactaccatcttcgacgtccaaggggctcacatggatcatcctcgagcgcaagcaaactttgagatcgcgctgaaagcatgtcatccctggaatccttcagttgggagtaacatttagttccactgtgtggtttttgctctctaaatatattgctcgtcatacatatgtttgtgatctcatagatttggattttgaacagtaccagtttcttatttttgttaatgcaagccttgaagcgtatcaaactttatgaactgaagcacaaagattagtcaagtcgagaaggacatcgttctcaggccatcaatggcgccgcgctgcagctcttcagcttcgttgaggccatcagcatcggtcacccctccctagaaactcttcaagatcatagacctccacgacaggctctc

SEQ ID NO: 216787 - DNA, 2651 bp, Zea Mays
gtgaccaccagagaggggcgttgtggcgctggctagctatagctcgatccatcggaagaagttgaaccacacatcaactaacctctctgtcgtctcgcggcgatgtgtgaatctccatcatcctcgagaggccggtggcgccatagatatgatcagaagacaccgtcgactcagaaacgcggtgatgtgtgaatcgtcaatgttcctgatgtcgccgtctccgtcaccgtcaccgccgcagccgtctaggccgccaccggagtacaagcacttctgtcgagtatgcaacaagggattcacgtgcggcagtgcgctcggtggacatatgagagctcatggcgctagcgacgttgatgggttcggcgtcgacgacgacgactcgctcgacgaagagccgacggcgcccgcgcggtgcactggggcagatcagtgggacgtggcgggaacgtcgtcggcgactcacgcgtacgcgctccgggcgaatccgaataggttgatcaggagctgtcaggtttgcaagaactgcgggaaggagttcacgtcgtgggatcttttccttcaacacgggaaatgcaactcatcagagggcggcgagggagaagagggtgagatggatgggtcagactcgctacgttcgtcgctgcctgcctcagaagccggcggcggcggcgaggaggacccggcagtggcagcagccgcatggtcaaaagggaaaagatcgcgtcgtgtcgtcagaacagatgacccttcgtccaccatggtgtcggcggagcggtgcacgtcaggggacgaggacgaagagcttgcaaattttcttgtcatgctctcgtcgtccaaatccaacaacaacgacgaccaaacgatcgttattacagccgaccatcataaggagccagtatgtgcctctactggtgaaggtggtggtggtggagagcctttaccatttcaatcgcaaacaatctctcttttcacgcaaacccaaacacaagagccagttgtgccactgctgccttcgacggtagcggctacggtatctcaatacatcgcacccatatcacgtggagtttttgagtgcaaggcgtgcaagaaggtgttcacctcacaccaagctcttggaggacatcgggctagccacaagaaagtaaaaggttgttttgctgctaggttcgacaacaatgccaccgaaacagcgatcaataatcctactatagctgctgataccaatagtaaggccgttgttgtcaataatgcagatgcaagcgtagacgccgccacaagagtttttgctatcactagcgtcgacaccgatgtagggacaagtaatgaggcaacatcatcgtcgttgtcaatggcacatgctgttcccatacgacacaatccagcatcagccaccaccaccacgttcaccgtcgcagcgcattgcaagaaaaacgtgaagatgcatgagtgttcagtatgccaccgcttgttcacctctgggcaggcactcggaggtcacaaacgatgccactggctcacctcaaacacgtcagatccatgtaacccactagccatcccacccctaactgaagatctcgtcgtcggcgaagttaaacaccacgacgataccctccaaccaacggtggatgccaccgagccactcctcgacctcacaatagcagcaaatccagctgtagcactagctgcttctacaatgcgccccgacatagcatctactgtacacttgaagcaactagttgtcgcagcaccaagtaataatgttagccaccgaaagaaaactgcagcaacgggtagccataccacagatgcggtggttgaggaagatgaggcggatagcatcataatcaagaaagctaagattagcgatcttaaagacgtggtcaatatggatggcaaggccgccacccgcccactccaacctcatgcacaggcaaccgtgaagcatccacaagcaacagtgaaacgtaatctgtgcttgctactcatctgtccaaaagtcctacaggtactggtgggcggtggtacatctgcgtcgggcacaccctgcactgcagcaagctctgtcgcatcctggccggactcttcctatagtacccattccgacaaggtgcaaggatcaggtagcatgcccgctactctaccaccactgatccatatctttcaggtcattgtattgctattttgcaggccatcgactagaacaaagatccttctagagaaccatattgtcgattcagaaatttctcttacagccactgttattttggtcggggccgatgtacatagagatgccagggaaggtgtcctggagtttgagagagctttcagggagaggttctctgcttacacattagctgctaagaggcatattgactccactaccatcttcgacgtccaaggggctcacatggatcatcctcgagcgcaagcaaactttgagatcgcgctgaaagcatgtcatccctggaatccttcagttgggagtaacatttagttccactaagcacaaagattagtcaagtcgagaaggacatcgttctcaggccatcaatggcgccgcgctgcagctcttcagcttcgttgaggccatcagcatcggtcacccctccctagaaactcttcaagatcatagacctccacgacaggctctc

SEQ ID NO: 216788 - DNA, 2569 bp, Zea Mays
gtgaccaccagagaggggcgttgtggcgctggctagctatagctcgatccatcggaagaagttgaaccacacatcaactaacctctctgtcgtctcgcggcgatgtgtgaatctccatcatcctcgatgtcgccgtctccgtcaccgtcaccgccgcagccgtctaggccgccaccggagtacaagcacttctgtcgagtatgcaacaagggattcacgtgcggcagtgcgctcggtggacatatgagagctcatggcgctagcgacgttgatgggttcggcgtcgacgacgacgactcgctcgacgaagagccgacggcgcccgcgcggtgcactggggcagatcagtgggacgtggcgggaacgtcgtcggcgactcacgcgtacgcgctccgggcgaatccgaataggttgatcaggagctgtcaggtttgcaagaactgcgggaaggagttcacgtcgtgggatcttttccttcaacacgggaaatgcaactcatcagagggcggcgagggagaagagggtgagatggatgggtcagactcgctacgttcgtcgctgcctgcctcagaagccggcggcggcggcgaggaggacccggcagtggcagcagccgcatggtcaaaagggaaaagatcgcgtcgtgtcgtcagaacagatgacccttcgtccaccatggtgtcggcggagcggtgcacgtcaggggacgaggacgaagagcttgcaaattttcttgtcatgctctcgtcgtccaaatccaacaacaacgacgaccaaacgatcgttattacagccgaccatcataaggagccagtatgtgcctctactggtgaaggtggtggtggtggagagcctttaccatttcaatcgcaaacaatctctcttttcacgcaaacccaaacacaagagccagttgtgccactgctgccttcgacggtagcggctacggtatctcaatacatcgcacccatatcacgtggagtttttgagtgcaaggcgtgcaagaaggtgttcacctcacaccaagctcttggaggacatcgggctagccacaagaaagtaaaaggttgttttgctgctaggttcgacaacaatgccaccgaaacagcgatcaataatcctactatagctgctgataccaatagtaaggccgttgttgtcaataatgcagatgcaagcgtagacgccgccacaagagtttttgctatcactagcgtcgacaccgatgtagggacaagtaatgaggcaacatcatcgtcgttgtcaatggcacatgctgttcccatacgacacaatccagcatcagccaccaccaccacgttcaccgtcgcagcgcattgcaagaaaaacgtgaagatgcatgagtgttcagtatgccaccgcttgttcacctctgggcaggcactcggaggtcacaaacgatgccactggctcacctcaaacacgtcagatccatgtaacccactagccatcccacccctaactgaagatctcgtcgtcggcgaagttaaacaccacgacgataccctccaaccaacggtggatgccaccgagccactcctcgacctcacaatagcagcaaatccagctgtagcactagctgcttctacaatgcgccccgacatagcatctactgtacacttgaagcaactagttgtcgcagcaccaagtaataatgttagccaccgaaagaaaactgcagcaacgggtagccataccacagatgcggtggttgaggaagatgaggcggatagcatcataatcaagaaagctaagattagcgatcttaaagacgtggtcaatatggatggcaaggccgccacccgcccactccaacctcatgcacaggcaaccgtgaagcatccacaagcaacagtgaaacgtaatctgtgcttgctactcatctgtccaaaagtcctacaggtactggtgggcggtggtacatctgcgtcgggcacaccctgcactgcagcaagctctgtcgcatcctggccggactcttcctatagtacccattccgacaaggtgcaaggatcaggtagcatgcccgctactctaccaccactgatccatatctttcaggtcattgtattgctattttgcaggccatcgactagaacaaagatccttctagagaaccatattgtcgattcagaaatttctcttacagccactgttattttggtcggggccgatgtacatagagatgccagggaaggtgtcctggagtttgagagagctttcagggagaggttctctgcttacacattagctgctaagaggcatattgactccactaccatcttcgacgtccaaggggctcacatggatcatcctcgagcgcaagcaaactttgagatcgcgctgaaagcatgtcatccctggaatccttcagttgggagtaacatttagttccactaagcacaaagattagtcaagtcgagaaggacatcgttctcaggccatcaatggcgccgcgctgcagctcttcagcttcgttgaggccatcagcatcggtcacccctccctagaaactcttcaagatcatagacctccacgacaggctctc

SEQ ID NO: 216789 - DNA, 2596 bp, Zea Mays
gtgaccaccagagaggggcgttgtggcgctggctagctatagctcgatccatcggaagaagttgaaccacacatcaactaacctctctgtcgtctcgcggcgatgtgtgaatctccatcatcctcgagaggccggtggcgccatagatatgatcagaagacaccgtcgactcagaaacgcggtgatgtgtgaatcgtcaatgttcctgatgtcgccgtctccgtcaccgtcaccgccgcagccgtctaggccgccaccggagtacaagcacttctgtcgagtatgcaacaagggattcacgtgcggcagtgcgctcggtggacatatgagagctcatggcgctagcgacgttgatgggttcggcgtcgacgacgacgactcgctcgacgaagagccgacggcgcccgcgcggtgcactggggcagatcagtgggacgtggcgggaacgtcgtcggcgactcacgcgtacgcgctccgggcgaatccgaataggttgatcaggagctgtcaggtttgcaagaactgcgggaaggagttcacgtcgtgggatcttttccttcaacacgggaaatgcaactcatcagagggcggcgagggagaagagggtgagatggatgggtcagactcgctacgttcgtcgctgcctgcctcagaagccggcggcggcggcgaggaggacccggcagtggcagcagccgcatggtcaaaagggaaaagatcgcgtcgtgtcgtcagaacagatgacccttcgtccaccatggtgtcggcggagcggtgcacgtcaggggacgaggacgaagagcttgcaaattttcttgtcatgctctcgtcgtccaaatccaacaacaacgacgaccaaacgatcgttattacagccgaccatcataaggagccagtatgtgcctctactggtgaaggtggtggtggtggagagcctttaccatttcaatcgcaaacaatctctcttttcacgcaaacccaaacacaagagccagttgtgccactgctgccttcgacggtagcggctacggtatctcaatacatcgcacccatatcacgtggagtttttgagtgcaaggcgtgcaagaaggtgttcacctcacaccaagctcttggaggacatcgggctagccacaagaaagtaaaaggttgttttgctgctaggttcgacaacaatgccaccgaaacagcgatcaataatcctactatagctgctgataccaatagtaaggccgttgttgtcaataatgcagatgcaagcgtagacgccgccacaagagtttttgctatcactagcgtcgacaccgatgtagggacaagtaatgaggcaacatcatcgtcgttgtcaatggcacatgctgttcccatacgacacaatccagcatcagccaccaccaccacgttcaccgtcgcagcgcattgcaagaaaaacgtgaagatgcatgagtgttcagtatgccaccgcttgttcacctctgggcaggcactcggaggtcacaaacgatgccactggctcacctcaaacacgtcagatccatgtaacccactagccatcccacccctaactgaagatctcgtcgtcggcgaagttaaacaccacgacgataccctccaaccaacggtggatgccaccgagccactcctcgacctcacaatagcagcaaatccagctgtagcactagctgcttctacaatgcgccccgacatagcatctactgtacacttgaagcaactagttgtcgcagcaccaagtaataatgttagccaccgaaagaaaactgcagcaacgggtagccataccacagatgcggtggttgaggaagatgaggcggatagcatcataatcaagaaagctaagattagcgatcttaaagacgtggtcaatatggatggcaaggccgccacccgcccactccaacctcatgcacaggcaaccgtgaagcatccacaagcaacagtgaaacgtaatctgtgcttgctactcatctgtccaaaagtcctacaggtactggtgggcggtggtacatctgcgtcgggcacaccctgcactgcagcaagctctgtcgcatcctggccggactcttcctatagtacccattccgacaaggtgcaaggatcaggtagcatgcccgctactctaccaccactgatccatatctttcaggtcattgtattgctattttgcaggccatcgactagaacaaagatccttctagagaaccatattgtcgattcagaaatttctcttacagccactgttattttggtcggggccgatgtacatagagatgccagggaaggtgtcctggagtttgagagagctttcagggagaggttctctgcttacacattagctgctaagaggcatattgactccactaccatcttcgacgtccaaggtgtgatctatgtggtttttgctcttagaatatattgcttgtcatacatatgtttgttgttctgtatcacaacttctttagctaatttatatgatatgaggcctaggagttgccacttcgcttatgcttgcttcaactcttctcaggggctcacatggatcatcctcgagcgcaagcaaactttgagatcgcgctga

SEQ ID NO: 216790 - DNA, 2091 bp, Zea Mays
ccggtgtcggtgccgccgccgtctcctgggagttgaccccttgcaggccggcaacgtcgtgcagctgctggtggtgctcgggatgacggtggggtggatctccacctacatgttccgggtggccaacaaggacatgacctacgcgcaccagctcagggactacgagaagcaagtcatggagaaacggctggagagcttgtcggaggctgagctgcaagctctgctcgagcaagtggaggaggagaagcagcgcgtgcctcaggtcccggaagagcctaacgctattaccttcaggaagaaatgatgatcgttctattatctgccaaatggacaccgacctagcttgtttatagcatagcttcgccttcaatagctagctccatcgatattttaagatctgtacaatacgccccgctaagccactagtgctgtcaaacatgaaattatccattttctgccgcgcgccgttatgggacaataccgtagcaccaagaaccaaatccgttctttgagatatcattgtcgttgtaactatatcatccgcaaagctacagtttgggaggtcttcagcattgcctgtttgatcttccattggttcgtttccttgcgttatgatcacgattacataagccaggcaaacactacacaaaacataccaatttccgaaggccacataaatttctgaaggtttctaagataatcgtcgaacatatggtatttttttacggccatcgaaaatatcgtcgtcgcatagagtcgtcaaaaataagcttatgtttagagtcgttaaaaataagcttatgttcaacggccctctgtgagcgccgtcagaagttaggtttcacggggttatcctaactcacaacatagaccatccgcattctattgttctcccaaccgtatgtagttcatgtcacagcctacaaagcatcaatttatgataatccatgaacctgaatgatttttttggcagcataacactgtcctccgatacatcatttctagacgtgcaaatggagaacaatgggttatattgtcgaaatttcgtttgggcttatggctttgtcataaattcatgctctattattcactcatgggtgggtttatgagctatcatttcctacaaatatagggtcatgatttcttcataataatgagtagtttatgtatgattcatttaagtcaatgttttatctctaacatgggtgaggattgttgatggatgttgcgaacaaaaggttggtttgttccttgtggtttaggttgatgattagtgattatcaacaggtagcactctgggatagttagtggactgacgactgaccagagtgtgaaattatgtatgtgcaaccatgccggtcgccttgcggtgtgtaggtgtggagcacagggatggtggtcgacaacgaatgtgaaggtcatgcaggtttgtgccgatggaccgggagcgataaaggacgagcgctgagacttgactgagggaccagactcgctgggtgaccagccgtggtggatgacacctgggacacgcactcgcgcaaggacgtggcagagcgtgacgtgttgccggcacagtcgaggactgggggacacatgtccaatatgtgggggacgcgcacgtggtgtgaactcacgctcggtttggtggttgagcctcaaaaccatcatgcgctacggatggtgggttttgcttagtttgggcctcaaaactcggcggcagtggttcaggagggaaccgatggcgacacagcgaagggtgtgtcaatgcgaaacaacttcgtgtggagcgcgtggcagccggatcaaaaacctaagagttggtctattttgcccctagcggagtgaatagtctctatgtaaataggggtaatataggaaatagaaataaccctctataaatagaggaaaggcctggttaattcagcacttattgctgccatgtgtctagtgtcttgtttagaactcctaattttcctgtctaggtagttacctcttgtgccagaagatccgcagcgattttgtttgtcgactgtgcttgtgagttgtattgttgttggaacttgcactcctgggcaagttaatccaatgggg

SEQ ID NO: 216791 - DNA, 2731 bp, Zea Mays
cccgacgctcccatgccgccgccgccgccgccgagcgtgcggggcttcctggacgcgcacttcgcctcccccgacgacctcgcggcggcgcccgcgctcgcggagctcttgcgccgcgagtgcgacgggctcgacgcctcgctccgccgcgccgaggcgcggctcggtgccgcggccgcgtcctggctcgcgcgctactctgaggcccgcgcaaacctcctccgcgtccggtcacgagggggacgcctcgttgcggaggacgacggcgccgaggcggtgaggacggtgggcctgccggcgctcgtgcgggagatccaacggatcgacaccatccggctctacgcggaagctactctacagctggaatctttggttggcaacctggaagatgctgcattttccattgttaggcaggccccaaagtcaaaactgtcatccatacttcgaaaatcgaatgaaactgaatggaagcaagggaagctgctccatgctgttgacgctgtgaaggatattgagcgagaattagtacggatcagcactagtaggccacagtgggccaaccttgtcatggctgttgattctagagtggacaaaactctttccattctgaggcctcaagcactcacggattatcgggctctactagcatcactgggatggccaccttcattgtcttcaccagacacagagaaggataagtacccccaaattccgaatcctctagtcttgatgaatgagggaaataaagcgagatactctcaaagcttccaagcactgtgtgctctccaacatgtgcaggggaaccgtgaatcacgcctgtgtcagacagcaaaagtgactcctgccctggcagatttgaagtatttcactaggaccgcttgcttcgacaatgggctttgggcgattgatgaattagttcaccctattgcttcaaggatggaatatcattttgtcaaatggtctgaacagccggagttcattttcacccttgtttacaagataacaaaagattttatggatggagtggatgatgtactgcagcctttgattgatcaagcaaggctagtaggattaagtgccaaggaatcttgggtaactggaatggtgaaaattcttgtaggataccttgagcggcaaattttcccggcacttgtctgctcttatcaggatcatgctactgttggaaaacctgaagtagattcctcttggttgcacttaaatgacgtaatgatttcttttgataaaagaatgcagcttctagcggattcaggaatccagaaaatgacatcactttctgaaggtctgtctaggtccttgtctgtcttttcaatatatgctgagcaccctgactggcttcagatatgggctgatgttgagctttgttcagcacaggataagctgaaatctgaaatggaagatgagacaagttggtcatgtagtggtcagcatgaccagcgtggtcacatggaaaattcaacgaagtttcttctctctacaagagaagactacaaagctcctccggtgtgtgaatttgttaccaaaactgctttgtcaatggttgaaagaggccgtgttctgccaaacaggggaatgcagatccagtataacagatcctcttcggttaggttcctgaatggcttttttcttgtattgcgcgaacgatgtgaagcattgcaattgtcgaacacggcactagaggatcattctttgtcaaaaacttcgtgtgcaattaacgccgctcgttactgtgaaaacgtgcttcgggaatgggatgaagatactaccttcttggatatgggtcctcaaggatctctgtatacagatgaaatcggctttttagtcaaattagggaccgatcacctggaacagatactgtcttgggttctgcttgagtttgaagatctgtcctgggaatatgttcagagcattggatcatggagtggacagaccatcttagatgatgagatcctggatgaagaaaacacaggagtgtctcctggttttgttcccagtctagatgttctgatggacaggaccgctaagttgaaacgatatcttaactccaaggatttccttgatctgtggaggagtatagcggaaggccttgactactacatctacagcagcatacgatgggccgaagcccttctgttcaagacctgaagcttttctcccttttctaagtgaatccctgaggttgttaaccatgaaaaaatcagatgcacagtgcttgctggaaacactaatggatgacacgaagagtgacgattgcctaaagcgtgaaggattgcaccatgtaaatgctagccaggctgcaaagatcttaagcagcaggaagtttagtgggtaattttgttcgtacaaagtgtagctgagaatgaccttcagcgaagctcgatgtggagattaacaattccaggccacaacaaagacaggtgccactaaccaaggagccgtcgctattggcatacatggcacgcaacaacagctgctgcctacttggttacttcctggaattctttaggcgatatctaggagagggctgttcaccgagttttacttcgtcttgcaagcacaaagctgccatgtaatcagttcatgctgtttgattaacttgtagtcgcccttgtgcagaatgcctcgtgctttctaattaatccaaacgatgaaaaatttccccgcatctcatagcttgcacaaattggattgccttaggtttggtacatatggt

SEQ ID NO: 216792 - DNA, 2786 bp, Zea Mays
cccgacgctcccatgccgccgccgccgccgccgagcgtgcggggcttcctggacgcgcacttcgcctcccccgacgacctcgcggcggcgcccgcgctcgcggagctcttgcgccgcgagtgcgacgggctcgacgcctcgctccgccgcgccgaggcgcggctcggtgccgcggccgcgtcctggctcgcgcgctactctgaggcccgcgcaaacctcctccgcgtccggtcacgagggggacgcctcgttgcggaggacgacggcgccgaggcggtgaggacggtgggcctgccggcgctcgtgcgggagatccaacggatcgacaccatccggctctacgcgggctggaatctttggttggcaacctggaagatgctgcattttccattgttaggcaggccccaaagtcaaaactgtcatccatacttcgaaaatcgaatgaaactgaatggaagcaagggaagctgctccatgctgttgacgctgtgaaggatattgagcgagaattagtacggatcagcactagtaggccacagtgggccaaccttgtcatggctgttgattctagagtggacaaaactctttccattctgaggcctcaagcactcacggattatcgggctctactagcatcactgggatggccaccttcattgtcttcaccagacacagagaaggataagtacccccaaattccgaatcctctagtcttgatgaatgagggaaataaagcgagatactctcaaagcttccaagcactgtgtgctctccaacatgtgcaggggaaccgtgaatcacgcctgtgtcagacagcaaaagtgactcctgccctggcagatttgaagtatttcactaggaccgcttgcttcgacaatgggctttgggcgattgatgaattagttcaccctattgcttcaaggatggaatatcattttgtcaaatggtctgaacagccggagttcattttcacccttgtttacaagataacaaaagattttatggatggagtggatgatgtactgcagcctttgattgatcaagcaaggctagtaggattaagtgccaaggaatcttgggtaactggaatggtgaaaattcttgtaggataccttgagcggcaaattttcccggcacttgtctgctcttatcaggatcatgctactgttggaaaacctgaagtagattcctcttggttgcacttaaatgacgtaatgatttcttttgataaaagaatgcagcttctagcggattcaggaatccagaaaatgacatcactttctgaaggtctgtctaggtccttgtctgtcttttcaatatatgctgagcaccctgactggcttcagatatgggctgatgttgagctttgttcagcacaggataagctgaaatctgaaatggaagatgagacaagttggtcatgtagtggtcagcatgaccagcgtggtcacatggaaaattcaacgaagtttcttctctctacaagagaagactacaaagctcctccggtgtgtgaatttgttaccaaaactgctttgtcaatggttgaaagaggccgtgttctgccaaacaggggaatgcagatccagtataacagatcctcttcggttaggttcctgaatggcttttttcttgtattgcgcgaacgatgtgaagcattgcaattgtcgaacacggcactagaggatcattctttgtcaaaaacttcgtgtgcaattaacgccgctcgttactgtgaaaacgtgcttcgggaatgggatgaagatactaccttcttggatatgggtcctcaaggatctctgtatacagatgaaatcggctttttagtcaaattagggaccgatcacctggaacagatactgtcttgggttctgcttgagtttgaagatctgtcctgggaatatgttcagagcattggatcatggagtggacagaccatcttagatgatgagatcctggatgaagaaaacacaggagtgtctcctggttttgttcccagtctagatgttctgatggacaggaccgctaagttgaaacgatatcttaactccaaggatttccttgatctgtggaggagtatagcggaaggccttgactactacatctacagcagcatacgatgggccgaagtaagtttctctgatcctggaatcacccagctaagagttgatataaaagcacttctccacatctttaggcccttctgttcaagacctgaagcttttctcccttttctaagtgaatccctgaggttgttaaccatgaaaaaatcagatgcacagtgcttgctggaaacactaatggatgacacgaagagtgacgattgcctaaagcgtgaaggattgcaccatgtaaatgctagccaggctgcaaagatcttaagcagcaggaagtttagtgggtaattttgttcgtacaaagtgtagctgagaatgaccttcagcgaagctcgatgtggagattaacaattccaggccacaacaaagacaggtgccactaaccaaggagccgtcgctattggcatacatggcacgcaacaacagctgctgcctacttggttacttcctggaattctttaggcgatatctaggagagggctgttcaccgagttttacttcgtcttgcaagcacaaagctgccatgtaatcagttcatgctgtttgattaacttgtagtcgcccttgtgcagaatgcctcgtgctttctaattaatccaaacgatgaaaaatttccccgcatctcatagcttgcacaaattggattgccttaggtttggtacatatggt

SEQ ID NO: 216793 - DNA, 2717 bp, Zea Mays
cccgacgctcccatgccgccgccgccgccgccgagcgtgcggggcttcctggacgcgcacttcgcctcccccgacgacctcgcggcggcgcccgcgctcgcggagctcttgcgccgcgagtgcgacgggctcgacgcctcgctccgccgcgccgaggcgcggctcggtgccgcggccgcgtcctggctcgcgcgctactctgaggcccgcgcaaacctcctccgcgtccggtcacgagggggacgcctcgttgcggaggacgacggcgccgaggcggtgaggacggtgggcctgccggcgctcgtgcgggagatccaacggatcgacaccatccggctctacgcggctggaatctttggttggcaacctggaagatgctgcattttccattgttaggcaggccccaaagtcaaaactgtcatccatacttcgaaaatcgaatgaaactgaatggaagcaagggaagctgctccatgctgttgacgctgtgaaggatattgagcgagaattagtacggatcagcactagtaggccacagtgggccaaccttgtcatggctgttgattctagagtggacaaaactctttccattctgaggcctcaagcactcacggattatcgggctctactagcatcactgggatggccaccttcattgtcttcaccagacacagagaaggataagtacccccaaattccgaatcctctagtcttgatgaatgagggaaataaagcgagatactctcaaagcttccaagcactgtgtgctctccaacatgtgcaggggaaccgtgaatcacgcctgtgtcagacagcaaaagtgactcctgccctggcagatttgaagtatttcactaggaccgcttgcttcgacaatgggctttgggcgattgatgaattagttcaccctattgcttcaaggatggaatatcattttgtcaaatggtctgaacagccggagttcattttcacccttgtttacaagataacaaaagattttatggatggagtggatgatgtactgcagcctttgattgatcaagcaaggctagtaggattaagtgccaaggaatcttgggtaactggaatggtgaaaattcttgtaggataccttgagcggcaaattttcccggcacttgtctgctcttatcaggatcatgctactgttggaaaacctgaagtagattcctcttggttgcacttaaatgacgtaatgatttcttttgataaaagaatgcagcttctagcggattcaggaatccagaaaatgacatcactttctgaaggtctgtctaggtccttgtctgtcttttcaatatatgctgagcaccctgactggcttcagatatgggctgatgttgagctttgttcagcacaggataagctgaaatctgaaatggaagatgagacaagttggtcatgtagtggtcagcatgaccagcgtggtcacatggaaaattcaacgaagtttcttctctctacaagagaagactacaaagctcctccggtgtgtgaatttgttaccaaaactgctttgtcaatggttgaaagaggccgtgttctgccaaacaggggaatgcagatccagtataacagatcctcttcggttaggttcctgaatggcttttttcttgtattgcgcgaacgatgtgaagcattgcaattgtcgaacacggcactagaggatcattctttgtcaaaaacttcgtgtgcaattaacgccgctcgttactgtgaaaacgtgcttcgggaatgggatgaagatactaccttcttggatatgggtcctcaaggatctctgtatacagatgaaatcggctttttagtcaaattagggaccgatcacctggaacagatactgtcttgggttctgcttgagtttgaagatctgtcctgggaatatgttcagagcattggatcatggagtggacagaccatcttagatgatgagatcctggatgaagaaaacacaggagtgtctcctggttttgttcccagtctagatgttctgatggacaggaccgctaagttgaaacgatatcttaactccaaggatttccttgatctgtggaggagtatagcggaaggccttgactactacatctacagcagcatacgatgggccgaagcccttctgttcaagacctgaagcttttctcccttttctaagtgaatccctgaggttgttaaccatgaaaaaatcagatgcacagtgcttgctggaaacactaatggatgacacgaagagtgacgattgcctaaagcgtgaaggattgcaccatgtaaatgctagccaggctgcaaagatcttaagcagcaggaagtttagtgggtaattttgttcgtacaaagtgtagctgagaatgaccttcagcgaagctcgatgtggagattaacaattccaggccacaacaaagacaggtgccactaaccaaggagccgtcgctattggcatacatggcacgcaacaacagctgctgcctacttggttacttcctggaattctttaggcgatatctaggagagggctgttcaccgagttttacttcgtcttgcaagcacaaagctgccatgtaatcagttcatgctgtttgattaacttgtagtcgcccttgtgcagaatgcctcgtgctttctaattaatccaaacgatgaaaaatttccccgcatctcatagcttgcacaaattggattgccttaggtttggtacatatggt

SEQ ID NO: 216794 - DNA, 1273 bp, Zea Mays
tttacccagcggcagcgacgaggagacagattcttctccccccacggccacacccacgcaccgcagcgccgcctcgtctcctctcgccggcgatggaggaggtgggcggggacatgcctctcccgaaacagaagctctccgctgcaccgtacagggacggaggtggcgtcgtgctcgtggccactgggagctttaaccctcccacctacatgcacctgcgcatgtttgagctggcaaaggatgaactcgagctgcgaggttattctgtgttgggcggctacatgtctccggtgaatgatgcatataagaagaaggacctcttaccggctgctcaccgaattcgcttttgtgaacttgcgtccaaaagctcatcttttgtgatggttgatccgtgggaggcaatgcagaatggttatcagcgcactttgaccgttctttcgagaatacgaaactcactatgcaaggatggtgtagctgaccaaggtagcctcaaggtaatgcttttatgtggctctgacttgctcgagtcattcaccactccaggtgtttggatcctagaccaggtcagaaccatatgccaggactttggtgtcgtatgcatacggcgagaaggaaaggatgttggaaaattgatagacaacagcgatatattgcaagaatgcagggataacattatttcggttgatgagattgtgccaaatcagatcagttcatccagagtaagagactgcataagaagatctctatcgataaagtatctcactagtgatgaagtaattgaatacatcagagaacacaagctgtttatggaaggcaatggcggcgacatagcattgctgtaatagaggtaaactctgtaatcgacaaggatcggctgtggacgtctacctcaggagtcaggataccatctggaccgtgcattctgggcaattacttcgcacaaacacagaaataaacggaactggccacttaaattactactatatttttgttaaatttgattctggaggttgaagtgagttgcatgttgattaattttgcttttgtgccagaatcaagtgctacatacaacatgaattctgacaaccatataaatgccaaggttattctgacatagcaatcgtggatatagcatcggttagacaaacatatcataaagaattaagcctcatttgcagacagttctgatgtatataagcacagacaaaagatgtctctgtaacggattctattgaacagaacacatgccattatacaactgatcaactgcttt

SEQ ID NO: 216795 - DNA, 1189 bp, Zea Mays
gattcttctccccccacggccacacccacgcaccgcagcgccgcctcgtctcctctcgccggcgatggaggaggtgggcggggacatgcctctcccgaaacagaagctctccgctgcaccgtacagggacggaggtggcgtcgtgctcgtggccactgggagctttaaccctcccacctacatgcacctgcgcatgtttgagctggcaaaggatgaactcgagctgcgaggttattctgtgttgggcggctacatgtctccggtgaatgatgcatataagaagaaggacctcttaccggctgctcaccgaattcgcttttgtgaacttgcgtccaaaagctcatcttttgtgatggttgatccgtgggaggcaatgcagaatggttatcagcgcactttgaccgttctttcgagaatacgaaactcactatgcaaggatggtgtagctgaccaaggtagcctcaaggtaatgcttttatgtggctctgacttgctcgagtcattcaccactccaggtgtttggatcctagaccaggtcagaaccatatgccaggactttggtgtcgtatgcatacggcgagaaggaaaggatgttggaaaattgatagacaacagcgatatattgcaagaatgcagggataacattatttcggttgatgagattgtgccaaatcagatcagttcatccagagtaagagaacacaagctgtttatggaaggcaatggcggcgacatagcattgctgtaatagaggtatttggaggtaaactctgtaatcgacaaggatcggctgtggacgtctacctcaggagtcaggataccatctggaccgtgcattctgggcaattacttcgcacaaacacagaaataaacggaactggccacttaaattactactatatttttgttaaatttgattctggaggttgaagtgagttgcatgttgattaattttgcttttgtgccagaatcaagtgctacatacaacatgaattctgacaaccatataaatgccaaggttattctgacatagcaatcgtggatatagcatcggttagacaaacatatcataaagaattaagcctcatttgcagacagttctgatgtatataagcacagacaaaagatgtctctgtaacggattctattgaacagaacacatgccattatacaactgatcaactgcttt

SEQ ID NO: 216796 - DNA, 829 bp, Zea Mays
gtctctgacgggctaagcgagctggatgcctgatcgatgcctcgcgggcgttcgacgtccctctgcccgtttgcggtagaatatgtatcgttccgttgcgttcactctgctctcctttttccctttctcccgttcacctttctctatcgcttttctttcccccatccccctttctttcctcgtggtgacgactgggctagtgctatcgtccttcgccaggtcttcgccggcgacgagcacctaccaggtgaccctattccttttcttcactcggtgtataatccccctttgctgcaatcaagcttctcaaacataataagcaaatagtctcttcacgtgattgccaaaattagtcaagacgggtgctctttgctgcgtggccgctaggccacatgggacgaagtctgaccctgcaagcagagatcgttctatggatcctactgagcctcgttggcgcataaactcgagcttctctcccccaacatcaaggagatgggactgtcgttattcatcagatggattgccccacagagttcatgatgctcctcatgatcacccaccttatgtttcatcattgtcatcccatagcaaaggaagcagaaatgcatttggcagtgatcagtacctcagtcaccatcattctgtgtctgatggagcactttcttattttgggagtccagctgacagccttcaggctccacgctggacgccctctcttcaaagatttgatcttggtgaattctctacccctgcaggagaactgtgacttgagcgctggactgaatttgaggtttctactggaaaggctaacacagtgtgctaacttttt

SEQ ID NO: 216797 - DNA, 2599 bp, Zea Mays
attgaactcccagtgttggtacaatcactgggtcttttcaaggtctttgggggtcccaagaattaaagcatgtacagtccatccaagtggccgcatatagagatagggaataaaatggaggacatatggtctgtctcagattgaatcaggggggtcttgaggattttcaggaactgagtaggttgtttgtatcagggggatcttgtggatattgaggaactgtgtaggttgtttggttgaggtttgaatgcctgatgcataatattgcataaggccaagggaagttctacacatttttcatgcgcaaggctgcctagttacaaacatatgggagctgataagttactatgtttctaggtgtcagcatttcgggaaagtaagtcagatgacaggagattttacatattttcccccactaagacgcttcacttgaagacaaactcaaaagttgaccgtgttgcctggattgaggctttgatcctggcaaggagtgtttattctcttgggtcacttagcgggagagcaacttttgtgcagagtgatgtttcaatttcaactgcaaggcttagagatcgaatgcatcaggagggtttgaatgagagtcttatacaggactgtgaacaaattgtgctttccgagttctcaagctaccggaagcaactgaagtgtcgttacgaggattacttaagcttgtttgggtcctgcagacataattttgaggaaggtaaagatggaagtataacacaggggacattgacacgaaatgacttctctagttctaggcatggaaattttagcgaatatagcacaacagaatctgatgagcatgagtttgagaaacacgatggaggcgaattgatttgtgaagatgaatctgcattctttgattctatagattacttcacagagtcagacaacaggtcttcaaccatgttaagtggcaaggaagtagtggattcccaaacacatgattccagtaataatatacaagcacaaatcagacgacggagtaggctgcctgaccctattgagaaagagaaagggatcagtctctggtccattattaaagatagcgttggaaaggatttgacacgagtttgtcttccagtttacttcaatgaaccactctcatcccttcagaagtgctttgaggatttggagtattcatacctcttggatcaggcatatcaacatggaaaagtgggggacagcctcatgagaatcctcaaagtagctgcttttgcggcctctggctatgcttcatctgttgcaaggccttgcaaaccattcaatccattgctaggagagacctatgaagctgattaccctgacagaggaattcgtttttttgcagaaaaggttagtcatcatccaatgctgattgcctgccactgtgaaggcaagggctggaaattctggggcgacagcaatctcaaatccaagttttggggacagtcaattcaagttgaaccagttggcattttgactctagaatttgaggatggtgaaatcttccaatggaataaggttacaacaaccattcacaatctcattcttgggaagttgtactgcagccaccatggaacaatgcatataaaagggaatcgccaatattcatgtaaactgaagttcaaagagccatcacttcttgaccggaatccccatctagtacaaggctttgtagaggacaacaatgggaacaaagcttcgtttttgatagggatgtgggacgaaagcatatattgtagtaactctgatacttccaaggtgaagagcgccgatcaactgaaaggtgcctcgctgctgtgggaaaagaacaaacctgctcctaacccaactcgatacaatttatcttcattcgcgatcacactgaatgagttgaccccagggctgcaggagaaacttccacctactgattcacggctgagaccagaccagcgccacctagagaatggtgaatacgagaaagcgaatgcagagaagctgaggttggaacgacggcaaagaatgtctactaaacttcaagacaatggctggaaatcccggtggttcgagcaagacaccgaggacgggacgtattgctacaaaggtggatactgggaaacaagagagaggggcttctgggatgggtgcctcgacatttttggggagttcgtggagacataagtgccctgttcctgcagtagcagaggttcaagcagccaacacgccacccagaaacaatggagtactgccatctccaatggagcatcctcttgcctctagaagagaagggggaggagccctgtgcgaggagtagagcattcgagatgtgaaggcattgtgccttgaatggtagcatagcatatgattggccacgaataggcattgccaccttgttagtatagtatagttcgatccaatgcaaataagaatgctgacattcattctttggttccttcttgcgttgaacatggatctgttgtcgtggaagaaatttgcttgctcggctaggcaaaagtctgcctacactgtatttgtttgccgatcgaaaaccaaagcaagtcaccatctataactcttcacttccatgagactgtgactgacagttcgtcatcca

SEQ ID NO: 216798 - DNA, 2349 bp, Zea Mays
cttgtcccttcctccccacgtgcggttggcgcgtgatcccggtgtcagcatttcgggaaagtaagtcagatgacaggagattttacatattttcccccactaagacgcttcacttgaagacaaactcaaaagttgaccgtgttgcctggattgaggctttgatcctggcaaggagtgtttattctcttgggtcacttagcgggagagcaacttttgtgcagagtgatgtttcaatttcaactgcaaggcttagagatcgaatgcatcaggagggtttgaatgagagtcttatacaggactgtgaacaaattgtgctttccgagttctcaagctaccggaagcaactgaagtgtcgttacgaggattacttaagcttgtttgggtcctgcagacataattttgaggaattttacatagtgtattacacacatatttgtgcaggaaggtaaagatggaagtataacacaggggacattgacacgaaatgacttctctagttctaggcatggaaattttagcgaatatagcacaacagaatctgatgagcatgagtttgagaaacacgatggaggcgaattgatttgtgaagatgaatctgcattctttgattctatagattacttcacagagtcagacaacaggtcttcaaccatgttaagtggcaaggaagtagtggattcccaaacacatgattccagtaataatatacaagcacaaatcagacgacggagtaggctgcctgaccctattgagaaagagaaagggatcagtctctggtccattattaaagatagcgttggaaaggatttgacacgagtttgtcttccagtttacttcaatgaaccactctcatcccttcagaagtgctttgaggatttggagtattcatacctcttggatcaggcatatcaacatggaaaagtgggggacagcctcatgagaatcctcaaagtagctgcttttgcggcctctggctatgcttcatctgttgcaaggccttgcaaaccattcaatccattgctaggagagacctatgaagctgattaccctgacagaggaattcgtttttttgcagaaaaggcaagggctggaaattctggggcgacagcaatctcaaatccaagttttggggacagtcaattcaagttgaaccagttggcattttgactctagaatttgaggatggtgaaatcttccaatggaataaggttacaacaaccattcacaatctcattcttgggaagttgtactgcagccaccatggaacaatgcatataaaagggaatcgccaatattcatgtaaactgaagttcaaagagccatcacttcttgaccggaatccccatctagtacaaggctttgtagaggacaacaatgggaacaaagcttcgtttttgatagggatgtgggacgaaagcatatattgtagtaactctgatacttccaaggtgaagagcgccgatcaactgaaaggtgcctcgctgctgtgggaaaagaacaaacctgctcctaacccaactcgatacaatttatcttcattcgcgatcacactgaatgagttgaccccagggctgcaggagaaacttccacctactgattcacggctgagaccagaccagcgccacctagagaatggtgaatacgagaaagcgaatgcagagaagctgaggttggaacgacggcaaagaatggtatccgctctcgcttcatagatcacaatccatacatgttgtttcttcatgttctctgtctcattgcagtctactaaacttcaagacaatggctggaaatcccggtggttcgagcaagacaccgaggacgggacgtattgctacaaaggtggatactgggaaacaagagagaggggcttctgggatgggtgcctcgacatttttggggagttcgtggagacataagtgccctgttcctgcagtagcagaggttcaagcagccaacacgccacccagaaacaatggagtactgccatctccaatggagcatcctcttgcctctagaagagaagggggaggagccctgtgcgaggagtagagcattcgagatgtgaaggcattgtgccttgaatggtagcatagcatatgattggccacgaataggcattgccaccttgttagtatagtatagttcgatccaatgcaaataagaatgctgacattcattctttggttccttcttgcgttgaacatggatctgttgtcgtggaagaaatttgcttgctcggctaggcaaaagtctgcctacactgtatttgtttgccgatcgaaaaccaaagcaagtcaccatctataactcttcacttccatgagactgtgactgacagttcgtcatcca

SEQ ID NO: 216799 - DNA, 2785 bp, Zea Mays
cccgtcccatccattccctcaccgtcgccaccgttggagcgtcgcgcggacgatacagagcatgagaggcggagggagcggccgcggccatgggaacgaccaatacagccacaaccaccatcacagctcgttgtgctgcctctctgccgcgccgccgctggctggggacgccaccccgacgctgactccggagccagaggctgccgccgcctcgattgcctcgacggtgtcgacggttgtggtggagggcgtgctgcacaagtggaccaactacggtcgcgggtggcgggagcgctggttctcgctccgcgacggcgtcctgtcctactccaagattcgggccaacgcgggggcgaagacgggggcgggggcgacggacggtgacggggaggttagagtgattggttctagggtggaaggagcgcgccgcacggagaagcctgccggcgtcgtattcctcaaggtttgaatgcctgatgcataatattgcataaggccaagggaagttctacacatttttcatgcgcaaggctgcctagttacaaacatatgggagctgataagttactatgtttctaggtgtcagcatttcgggaaagtaagtcagatgacaggagattttacatattttcccccactaagacgcttcacttgaagacaaactcaaaagttgaccgtgttgcctggattgaggctttgatcctggcaaggagtgtttattctcttgggtcacttagcgggagagcaacttttgtgcagagtgatgtttcaatttcaactgcaaggcttagagatcgaatgcatcaggagggtttgaatgagagtcttatacaggactgtgaacaaattgtgctttccgagttctcaagctaccggaagcaactgaagtgtcgttacgaggattacttaagcttgtttgggtcctgcagacataattttgaggaattttacatagtgtattacacacatatttgtgcaggaaggtaaagatggaagtataacacaggggacattgacacgaaatgacttctctagttctaggcatggaaattttagcgaatatagcacaacagaatctgatgagcatgagtttgagaaacacgatggaggcgaattgatttgtgaagatgaatctgcattctttgattctatagattacttcacagagtcagacaacaggtcttcaaccatgttaagtggcaaggaagtagtggattcccaaacacatgattccagtaataatatacaagcacaaatcagacgacggagtaggctgcctgaccctattgagaaagagaaagggatcagtctctggtccattattaaagatagcgttggaaaggatttgacacgagtttgtcttccagtttacttcaatgaaccactctcatcccttcagaagtgctttgaggatttggagtattcatacctcttggatcaggcatatcaacatggaaaagtgggggacagcctcatgagaatcctcaaagtagctgcttttgcggcctctggctatgcttcatctgttgcaaggccttgcaaaccattcaatccattgctaggagagacctatgaagctgattaccctgacagaggaattcgtttttttgcagaaaaggcaagggctggaaattctggggcgacagcaatctcaaatccaagttttggggacagtcaattcaagttgaaccagttggcattttgactctagaatttgaggatggtgaaatcttccaatggaataaggttacaacaaccattcacaatctcattcttgggaagttgtactgcagccaccatggaacaatgcatataaaagggaatcgccaatattcatgtaaactgaagttcaaagagccatcacttcttgaccggaatccccatctagtacaaggctttgtagaggacaacaatgggaacaaagcttcgtttttgatagggatgtgggacgaaagcatatattgtagtaactctgatacttccaaggtgaagagcgccgatcaactgaaaggtgcctcgctgctgtgggaaaagaacaaacctgctcctaacccaactcgatacaatttatcttcattcgcgatcacactgaatgagttgaccccagggctgcaggagaaacttccacctactgattcacggctgagaccagaccagcgccacctagagaatggtgaatacgagaaagcgaatgcagagaagctgaggttggaacgacggcaaagaatgtctactaaacttcaagacaatggctggaaatcccggtggttcgagcaagacaccgaggacgggacgtattgctacaaaggtggatactgggaaacaagagagaggggcttctgggatgggtgcctcgacatttttggggatagcagaggttcaagcagccaacacgccacccagaaacaatggagtactgccatctccaatggagcatcctcttgcctctagaagagaagggggaggagccctgtgcgaggagtagagcattcgagatgtgaaggcattgtgccttgaatggtagcatagcatatgattggccacgaataggcattgccaccttgttagtatagtatagttcgatccaatgcaaataagaatgctgacattcattctttggttccttcttgcgttgaacatggatctgttgtcgtggaagaaatttgcttgctcggctaggcaaaagtctgcctacactgtatttgtttgccgatcgaaaaccaaagcaagtcaccatctataactcttcacttccatgagactgtgactgacagttcgtcatcca

SEQ ID NO: 216800 - DNA, 2760 bp, Zea Mays
ctcgcatcgcgtcccgtcccatccattccctcaccgtcgccaccgttggagcgtcgcgcggacgatacagagcatgagaggcggagggagcggccgcggccatgggaacgaccaatacagccacaaccaccatcacagctcgttgtgctgcctctctgccgcgccgccgctggctggggacgccaccccgacgctgactccggagccagaggctgccgccgcctcgattgcctcgacggtgtcgacggttgtggtggagggcgtgctgcacaagtggaccaactacggtcgcgggtggcgggagcgctggttctcgctccgcgacggcgtcctgtcctactccaagattcgggccaacgcgggggcgaagacgggggcgggggcgacggacggtgacggggaggttagagtgattggttctagggtggaaggagcgcgccgcacggagaagcctgccggcgtcgtattcctcaaggtttgaatgcctgatgcataatattgcataaggccaagggaagttctacacatttttcatgcgcaaggctgcctagttacaaacatatgggagctgataagttactatgtttctaggtgtcagcatttcgggaaagtaagtcagatgacaggagattttacatattttcccccactaagacgcttcacttgaagacaaactcaaaagttgaccgtgttgcctggattgaggctttgatcctggcaaggagtgtttattctcttgggtcacttagcgggagagcaacttttgtgcagagtgatgtttcaatttcaactgcaaggcttagagatcgaatgcatcaggagggtttgaatgagagtcttatacaggactgtgaacaaattgtgctttccgagttctcaagctaccggaagcaactgaagtgtcgttacgaggattacttaagcttgtttgggtcctgcagacataattttgaggaaggtaaagatggaagtataacacaggggacattgacacgaaatgacttctctagttctaggcatggaaattttagcgaatatagcacaacagaatctgatgagcatgagtttgagaaacacgatggaggcgaattgatttgtgaagatgaatctgcattctttgattctatagattacttcacagagtcagacaacaggtcttcaaccatgttaagtggcaaggaagtagtggattcccaaacacatgattccagtaataatatacaagcacaaatcagacgacggagtaggctgcctgaccctattgagaaagagaaagggatcagtctctggtccattattaaagatagcgttggaaaggatttgacacgagtttgtcttccagtttacttcaatgaaccactctcatcccttcagaagtgctttgaggatttggagtattcatacctcttggatcaggcatatcaacatggaaaagtgggggacagcctcatgagaatcctcaaagtagctgcttttgcggcctctggctatgcttcatctgttgcaaggccttgcaaaccattcaatccattgctaggagagacctatgaagctgattaccctgacagaggaattcgtttttttgcagaaaaggcaagggctggaaattctggggcgacagcaatctcaaatccaagttttggggacagtcaattcaagttgaaccagttggcattttgactctagaatttgaggatggtgaaatcttccaatggaataaggttacaacaaccattcacaatctcattcttgggaagttgtactgcagccaccatggaacaatgcatataaaagggaatcgccaatattcatgtaaactgaagttcaaagagccatcacttcttgaccggaatccccatctagtacaaggctttgtagaggacaacaatgggaacaaagcttcgtttttgatagggatgtgggacgaaagcatatattgtagtaactctgatacttccaaggtgaagagcgccgatcaactgaaaggtgcctcgctgctgtgggaaaagaacaaacctgctcctaacccaactcgatacaatttatcttcattcgcgatcacactgaatgagttgaccccagggctgcaggagaaacttccacctactgattcacggctgagaccagaccagcgccacctagagaatggtgaatacgagaaagcgaatgcagagaagctgaggttggaacgacggcaaagaatgtctactaaacttcaagacaatggctggaaatcccggtggttcgagcaagacaccgaggacgggacgtattgctacaaaggtggatactgggaaacaagagagaggggcttctgggatgggtgcctcgacatttttggggatagcagaggttcaagcagccaacacgccacccagaaacaatggagtactgccatctccaatggagcatcctcttgcctctagaagagaagggggaggagccctgtgcgaggagtagagcattcgagatgtgaaggcattgtgccttgaatggtagcatagcatatgattggccacgaataggcattgccaccttgttagtatagtatagttcgatccaatgcaaataagaatgctgacattcattctttggttccttcttgcgttgaacatggatctgttgtcgtggaagaaatttgcttgctcggctaggcaaaagtctgcctacactgtatttgtttgccgatcgaaaaccaaagcaagtcaccatctataactcttcacttccatgagactgtgactgacagttcgtcatcca

SEQ ID NO: 216801 - DNA, 2842 bp, Zea Mays
cgaaactcgcatcgcgtcccgtcccatccattccctcaccgtcgccaccgttggagcgtcgcgcggacgatacagagcatgagaggcggagggagcggccgcggccatgggaacgaccaatacagccacaaccaccatcacagctcgttgtgctgcctctctgccgcgccgccgctggctggggacgccaccccgacgctgactccggagccagaggctgccgccgcctcgattgcctcgacggtgtcgacggttgtggtggagggcgtgctgcacaagtggaccaactacggtcgcgggtggcgggagcgctggttctcgctccgcgacggcgtcctgtcctactccaagattcgggccaacgcgggggcgaagacgggggcgggggcgacggacggtgacggggaggttagagtgattggttctagggtggaaggagcgcgccgcacggagaagcctgccggcgtcgtattcctcaaggtttgaatgcctgatgcataatattgcataaggccaagggaagttctacacatttttcatgcgcaaggctgcctagttacaaacatatgggagctgataagttactatgtttctaggtgtcagcatttcgggaaagtaagtcagatgacaggagattttacatattttcccccactaagacgcttcacttgaagacaaactcaaaagttgaccgtgttgcctggattgaggctttgatcctggcaaggagtgtttattctcttgggtcacttagcgggagagcaacttttgtgcagagtgatgtttcaatttcaactgcaaggcttagagatcgaatgcatcaggagggtttgaatgagagtcttatacaggactgtgaacaaattgtgctttccgagttctcaagctaccggaagcaactgaagtgtcgttacgaggattacttaagcttgtttgggtcctgcagacataattttgaggaattttacatagtgtattacacacatatttgtgcaggaaggtaaagatggaagtataacacaggggacattgacacgaaatgacttctctagttctaggcatggaaattttagcgaatatagcacaacagaatctgatgagcatgagtttgagaaacacgatggaggcgaattgatttgtgaagatgaatctgcattctttgattctatagattacttcacagagtcagacaacaggtcttcaaccatgttaagtggcaaggaagtagtggattcccaaacacatgattccagtaataatatacaagcacaaatcagacgacggagtaggctgcctgaccctattgagaaagagaaagggatcagtctctggtccattattaaagatagcgttggaaaggatttgacacgagtttgtcttccagtttacttcaatgaaccactctcatcccttcagaagtgctttgaggatttggagtattcatacctcttggatcaggcatatcaacatggaaaagtgggggacagcctcatgagaatcctcaaagtagctgcttttgcggcctctggctatgcttcatctgttgcaaggccttgcaaaccattcaatccattgctaggagagacctatgaagctgattaccctgacagaggaattcgtttttttgcagaaaaggttagtcatcatccaatgctgattgcctgccactgtgaaggcaagggctggaaattctggggcgacagcaatctcaaatccaagttttggggacagtcaattcaagttgaaccagttggcattttgactctagaatttgaggatggtgaaatcttccaatggaataaggttacaacaaccattcacaatctcattcttgggaagttgtactgcagccaccatggaacaatgcatataaaagggaatcgccaatattcatgtaaactgaagttcaaagagccatcacttcttgaccggaatccccatctagtacaaggctttgtagaggacaacaatgggaacaaagcttcgtttttgatagggatgtgggacgaaagcatatattgtagtaactctgatacttccaaggtgaagagcgccgatcaactgaaaggtgcctcgctgctgtgggaaaagaacaaacctgctcctaacccaactcgatacaatttatcttcattcgcgatcacactgaatgagttgaccccagggctgcaggagaaacttccacctactgattcacggctgagaccagaccagcgccacctagagaatggtgaatacgagaaagcgaatgcagagaagctgaggttggaacgacggcaaagaatgtctactaaacttcaagacaatggctggaaatcccggtggttcgagcaagacaccgaggacgggacgtattgctacaaaggtggatactgggaaacaagagagaggggcttctgggatgggtgcctcgacatttttggggatagcagaggttcaagcagccaacacgccacccagaaacaatggagtactgccatctccaatggagcatcctcttgcctctagaagagaagggggaggagccctgtgcgaggagtagagcattcgagatgtgaaggcattgtgccttgaatggtagcatagcatatgattggccacgaataggcattgccaccttgttagtatagtatagttcgatccaatgcaaataagaatgctgacattcattctttggttccttcttgcgttgaacatggatctgttgtcgtggaagaaatttgcttgctcggctaggcaaaagtctgcctacactgtatttgtttgccgatcgaaaaccaaagcaagtcaccatctataactcttcacttccatgagactgtgactgacagttcgtcatcca

SEQ ID NO: 216802 - DNA, 2806 bp, Zea Mays
gcgaaactcgcatcgcgtcccgtcccatccattccctcaccgtcgccaccgttggagcgtcgcgcggacgatacagagcatgagaggcggagggagcggccgcggccatgggaacgaccaatacagccacaaccaccatcacagctcgttgtgctgcctctctgccgcgccgccgctggctggggacgccaccccgacgctgactccggagccagaggctgccgccgcctcgattgcctcgacggtgtcgacggttgtggtggagggcgtgctgcacaagtggaccaactacggtcgcgggtggcgggagcgctggttctcgctccgcgacggcgtcctgtcctactccaagattcgggccaacgcgggggcgaagacgggggcgggggcgacggacggtgacggggaggttagagtgattggttctagggtggaaggagcgcgccgcacggagaagcctgccggcgtcgtattcctcaaggtttgaatgcctgatgcataatattgcataaggccaagggaagttctacacatttttcatgcgcaaggctgcctagttacaaacatatgggagctgataagttactatgtttctaggtgtcagcatttcgggaaagtaagtcagatgacaggagattttacatattttcccccactaagacgcttcacttgaagacaaactcaaaagttgaccgtgttgcctggattgaggctttgatcctggcaaggagtgtttattctcttgggtcacttagcgggagagcaacttttgtgcagagtgatgtttcaatttcaactgcaaggcttagagatcgaatgcatcaggagggtttgaatgagagtcttatacaggactgtgaacaaattgtgctttccgagttctcaagctaccggaagcaactgaagtgtcgttacgaggattacttaagcttgtttgggtcctgcagacataattttgaggaaggtaaagatggaagtataacacaggggacattgacacgaaatgacttctctagttctaggcatggaaattttagcgaatatagcacaacagaatctgatgagcatgagtttgagaaacacgatggaggcgaattgatttgtgaagatgaatctgcattctttgattctatagattacttcacagagtcagacaacaggtcttcaaccatgttaagtggcaaggaagtagtggattcccaaacacatgattccagtaataatatacaagcacaaatcagacgacggagtaggctgcctgaccctattgagaaagagaaagggatcagtctctggtccattattaaagatagcgttggaaaggatttgacacgagtttgtcttccagtttacttcaatgaaccactctcatcccttcagaagtgctttgaggatttggagtattcatacctcttggatcaggcatatcaacatggaaaagtgggggacagcctcatgagaatcctcaaagtagctgcttttgcggcctctggctatgcttcatctgttgcaaggccttgcaaaccattcaatccattgctaggagagacctatgaagctgattaccctgacagaggaattcgtttttttgcagaaaaggttagtcatcatccaatgctgattgcctgccactgtgaaggcaagggctggaaattctggggcgacagcaatctcaaatccaagttttggggacagtcaattcaagttgaaccagttggcattttgactctagaatttgaggatggtgaaatcttccaatggaataaggttacaacaaccattcacaatctcattcttgggaagttgtactgcagccaccatggaacaatgcatataaaagggaatcgccaatattcatgtaaactgaagttcaaagagccatcacttcttgaccggaatccccatctagtacaaggctttgtagaggacaacaatgggaacaaagcttcgtttttgatagggatgtgggacgaaagcatatattgtagtaactctgatacttccaaggtgaagagcgccgatcaactgaaaggtgcctcgctgctgtgggaaaagaacaaacctgctcctaacccaactcgatacaatttatcttcattcgcgatcacactgaatgagttgaccccagggctgcaggagaaacttccacctactgattcacggctgagaccagaccagcgccacctagagaatggtgaatacgagaaagcgaatgcagagaagctgaggttggaacgacggcaaagaatgtctactaaacttcaagacaatggctggaaatcccggtggttcgagcaagacaccgaggacgggacgtattgctacaaaggtggatactgggaaacaagagagaggggcttctgggatgggtgcctcgacatttttggggatagcagaggttcaagcagccaacacgccacccagaaacaatggagtactgccatctccaatggagcatcctcttgcctctagaagagaagggggaggagccctgtgcgaggagtagagcattcgagatgtgaaggcattgtgccttgaatggtagcatagcatatgattggccacgaataggcattgccaccttgttagtatagtatagttcgatccaatgcaaataagaatgctgacattcattctttggttccttcttgcgttgaacatggatctgttgtcgtggaagaaatttgcttgctcggctaggcaaaagtctgcctacactgtatttgtttgccgatcgaaaaccaaagcaagtcaccatctataactcttcacttccatgagactgtgactgacagttcgtcatcca

SEQ ID NO: 216803 - DNA, 2164 bp, Zea Mays
gaagaaaacgaggtatttcaccccttcatgtacaaagtacaaactgcgtgcaacaacggagctttgaccaatcgtgtcgctcgcatgtcacccacccactagctagcaacattagcatacaagtatcagtgtcaccgttctcacagcttgcaccggagcccaaagctgcgcagcagcttgctcaggcatctcttggcccgtgactcgcggcgtatgggcccgccgcgcccgcgcgtctctgcgccgctgccggagaagatcgcccggaggcgaccgaagtgcgtgcttctcccctcgtacgccaccgcatccgggttctcctgaaaccgccgcggaaatcaagatcgttactaagagaagaagaccatatccgggtgaattggtgatccgcgcggcgcgtgtgatcaacgggcagcagctgtccgcacgaaccagcacatagcgcttccactcggtctccttggcgacgacgacatggcggcgcgcgtcgtaggtgaagcgggggtggtccttgatccggctgacggcgtcgaactcgcgccggagctcgcccagccgccgctgcagatcctcgacggggaatgcggaccccgtggccgcgttgagctcggcgcggatggcagaccagtcgtccgcggtgaggtcgcccacgcccacgccgcagccgcgcgtgcgccgctgcagcaggtccaggaacttggcgtcgtgctgggccgtccacacgtccacgtgcagccgcgacaggatcttgcggagcgaccgccgcgacaccggcggcctcgtcgtcgtggccttgaccacggcctcctcgtggccgtggccgtcgccgtcttcgaagcgcatcatcggctgctggtcaatcatcagtagttggctaacggtcctgactggctgcgtttgcacgttacgcatctcctgctcctgccttccatgtcgacggaatggttagttggtgacgcaagcgtgtgtgtacccagactaatggacggcgagtccgagagcacgtactgcgactgcgaggcgtcgtcggcgcggaggcggaggctgacgaagacgacggagccgtggcgcacgccgtagtgcgcgacgggcatgccgtcgtcgtcgaggtgtcggccggcgaagaagagccgctggtcgccggcggctacgccctcgcgggccatgatcatggacttgagctgcgccaccgtgttggcgccgtcgacgtccagcgccacccggtccccgcggagcgtacgcgccatgatcctcatcgtcgtcgccgcaggaggagccggcccgcctctcgactcgaggcggctagtatctgtagctctgtcgtcggcgcacggcgcggcactcatgagcccgacaggagagtgaattgaggctccgggaggaggaagaaaataaaggatcgagcagaagataatggggacagatcggagatccggaggcggatgggacgcgcatggacgagcacgacggggctttggctggcacagccaggcgtgcatgatggttgcgcgggaataaagctagctgttggatgaggcggcgacgtgaagaaacgaattttcttccgctgtccgctgcagcgccgactcgcctccgtctatctgtacttgcttcgaacagaatctgattctccggagcaaacggggctagaaaaagtgtcagggactggcccatgctgctgcagttggtgcttcagcaggagagctgggccggcccacgtaaatctgtacgagatcttatccaaaaacagctccgctccccctctccccgcgtgcccacgtcttcgtcggggccgtcgccggcgacgagttggcaagacatgacattggcgcttgatcaaaagcgatggaagaaagctattgagaaaaagcaacagcgagcttaagctcattattctttcctgccccttgggccccagttggatgagcatgtgtctggtcatcaatgtggcgcatgaagtttcagagttttctatctctatacacataatgtattgactgaggttctacttttggtttccctgtgtagcgttagagcactgtgaaaacgaatgaattatgttaaactgcccccattttttatgtttgctacatcccggatcctcacatgacattcagaatgattcatctgttcttgaaatctttattatcccttttaacatgct

SEQ ID NO: 216804 - DNA, 2557 bp, Zea Mays
gaagaaaacgaggtatttcaccccttcatgtacaaagtacaaactgcgtgcaacaacggagctttgaccaatcgtgtcgctcgcatgtcacccacccactagctagcaacattagcatacaagtatcagtgtcaccgttctcacagcttgcaccggagcccaaagctgcgcagcagcttgctcaggcatctcttggcccgtgactcgcggcgtatgggcccgccgcgcccgcgcgtctctgcgccgctgccggagaagatcgcccggaggcgaccgaagtgcgtgcttctcccctcgtacgccaccgcatccgggttctcctgaaaccgccgcggaaatcaagatcgttactaagagaagaagaccatatccgggtgaattggtgatccgcgcggcgcgtgtgatcaacgggcagcagctgtccgcacgaaccagcacatagcgcttccactcggtctccttggcgacgacgacatggcggcgcgcgtcgtaggtgaagcgggggtggtccttgatccggctgacggcgtcgaactcgcgccggagctcgcccagccgccgctgcagatcctcgacggggaatgcggaccccgtggccgcgttgagctcggcgcggatggcagaccagtcgtccgcggtgaggtcgcccacgcccacgccgcagccgcgcgtgcgccgctgcagcaggtccaggaacttggcgtcgtgctgggccgtccacacgtccacgtgcagccgcgacaggatcttgcggagcgaccgccgcgacaccggcggcctcgtcgtcgtggccttgaccacggcctcctcgtggccgtggccgtcgccgtcttcgaagcgcatcatcggctgctggtcaatcatcagtagttggctaacggtcctgactggctgcgtttgcacgttacgcatctcctgctcctgccttccatgtcgacggaatggttagttggtgacgcaagcgtgtgtgtacccagactaatggacggcgagtccgagagcacgtactgcgactgcgaggcgtcgtcggcgcggaggcggaggctgacgaagacgacggagccgtggcgcacgccgtagtgcgcgacgggcatgccgtcgtcgtcgaggtgtcggccggcgaagaagagccgctggtcgccggcggctacgccctcgcgggccatgatcatggacttgagctgcgccaccgtgttggcgccgtcgacgtccagcgccacccggtccccgcggagcgtacgcgccatgatcctcatcgtcgtcgccgcaggaggagccggcccgcctctcgactcgaggcggctagtatctgtagctctgtcgtcggcgcacggcgcggcactcatgagcccgacaggagagtgaattgaggctccgggaggaggaagaaaataaaggatcgagcagaagataatggggacagatcggagatccggaggcggatgggacgcgcatggacgagcacgacggggctttggctggcacagccaggcgtgcatgatggttgcgcgggaataaagctagctgttggatgaggcggcgacgtgaagaaacgaattttcttccgctgtccgctgcagcgccgactcgcctccgtctatctgtacttgcttcgaacagaatctgattctccggagcaaacggggctagaaaaagtgtcagggactggcccatgctgctgcagttggtgcttcagcaggagagctgggccggcccacgtaaatctgtacgagatcttatccaaaaacagctccgctccccctctccccgcgtgcccacgtcttcgtcggggccgtcgccggcgacgaggtacgcccccatccccgtactgtcccctttctgcttcgcggagcgctcttgttcccgcaccctgcgcgcccagggaacgggaaaggggaggaagaatatgggcgagttcgacgactattgggcgcgcgcgtacaggggcgactctgcggtcccgcactccgacccgcagcggcttgtctccacgtggaccggcgccgttgccctcggcgcggccgcttgcgtccaccaccacgcctccgcgctcgcctcccacctcaagtccctaccagcgacttggcaagacatgacattggcgcttgatcaaaagcgatggaagaaagctattgagaaaaagcaacagcgagcttaaggtcaactaaattgacttttttatcagatgatgacagttgacatcgaccgtgtcatgttctatctttttttataaaagggtcaggttctaacttgcttacgcttcctcctgtttgctacagctcattattctttcctgccccttgggccccagttggatgagcatgtgtctggtcatcaatgtggcgcatgaagtttcagagttttctatctctatacacataatgtattgactgaggttctacttttggtttccctgtgtagcgttagagcactgtgaaaacgaatgaattatgttaaactgcccccattttttatgtttgctacatcccggatcctcacatgacattcagaatgattcatctgttcttgaaatctttattatcccttttaacatgct

SEQ ID NO: 216805 - DNA, 2531 bp, Zea Mays
gaagaaaacgaggtatttcaccccttcatgtacaaagtacaaactgcgtgcaacaacggagctttgaccaatcgtgtcgctcgcatgtcacccacccactagctagcaacattagcatacaagtatcagtgtcaccgttctcacagcttgcaccggagcccaaagctgcgcagcagcttgctcaggcatctcttggcccgtgactcgcggcgtatgggcccgccgcgcccgcgcgtctctgcgccgctgccggagaagatcgcccggaggcgaccgaagtgcgtgcttctcccctcgtacgccaccgcatccgggttctcctgaaaccgccgcggaaatcaagatcgttactaagagaagaagaccatatccgggtgaattggtgatccgcgcggcgcgtgtgatcaacgggcagcagctgtccgcacgaaccagcacatagcgcttccactcggtctccttggcgacgacgacatggcggcgcgcgtcgtaggtgaagcgggggtggtccttgatccggctgacggcgtcgaactcgcgccggagctcgcccagccgccgctgcagatcctcgacggggaatgcggaccccgtggccgcgttgagctcggcgcggatggcagaccagtcgtccgcggtgaggtcgcccacgcccacgccgcagccgcgcgtgcgccgctgcagcaggtccaggaacttggcgtcgtgctgggccgtccacacgtccacgtgcagccgcgacaggatcttgcggagcgaccgccgcgacaccggcggcctcgtcgtcgtggccttgaccacggcctcctcgtggccgtggccgtcgccgtcttcgaagcgcatcatcggctgctggtcaatcatcagtagttggctaacggtcctgactggctgcgtttgcacgttacgcatctcctgctcctgccttccatgtcgacggaatggttagttggtgacgcaagcgtgtgtgtacccagactaatggacggcgagtccgagagcacgtactgcgactgcgaggcgtcgtcggcgcggaggcggaggctgacgaagacgacggagccgtggcgcacgccgtagtgcgcgacgggcatgccgtcgtcgtcgaggtgtcggccggcgaagaagagccgctggtcgccggcggctacgccctcgcgggccatgatcatggacttgagctgcgccaccgtgttggcgccgtcgacgtccagcgccacccggtccccgcggagcgtacgcgccatgatcctcatcgtcgtcgccgcaggaggagccggcccgcctctcgactcgaggcggctagtatctgtagctctgtcgtcggcgcacggcgcggcactcatgagcccgacaggagagtgaattgaggctccgggaggaggaagaaaataaaggatcgagcagaagataatggggacagatcggagatccggaggcggatgggacgcgcatggacgagcacgacggggctttggctggcacagccaggcgtgcatgatggttgcgcgggaataaagctagctgttggatgaggcggcgacgtgaagaaacgaattttcttccgctgtccgctgcagcgccgactcgcctccgtctatctgtacttgcttcgaacagaatctgattctccggagcaaacggggctagaaaaagtgtcagggactggcccatgctgctgcagttggtgcttcagcaggagagctgggccggcccacgtaaatctgtacgagatcttatccaaaaacagctccgctccccctctccccgcgtgcccacgtcttcgtcggggccgtcgccggcgacgaggtacgcccccatccccgtactgtcccctttctgcttcgcggagcgctcttgttcccgcaccctgcgcgcccagggaacgggaaaggggaggaagaatatgggcgagttcgacgactattgggcgcgcgcgtacaggggcgactctgcggtcccgcactccgacccgcagcggcttgtctccacgtggaccggcgccgttgccctcggcgcggccgcttgcgtccaccaccacgcctccgcgctcgcctcccacctcaagtccctaccagcgacttggcaagacatgacattggcgcttgatcaaaagcgatggaagaaagctattgagaaaaagcaacagcgagcttaagatgatgacagttgacatcgaccgtgtcatgttctatctttttttataaaagggtcaggttctaacttgcttacgcttcctcctgtttgctacagctcattattctttcctgccccttgggccccagttggatgagcatgtgtctggtcatcaatgtggcgcatgaagtttcagagttttctatctctatacacataatgtattgactgaggttctacttttggtttccctgtgtagcgttagagcactgtgaaaacgaatgaattatgttaaactgcccccattttttatgtttgctacatcccggatcctcacatgacattcagaatgattcatctgttcttgaaatctttattatcccttttaacatgct

SEQ ID NO: 216806 - DNA, 2438 bp, Zea Mays
gcgccaaccaaacgcgtcgtgctcgcggcaggccacgtgtccctcgaggctcctccggcgaccacgtcgccgcccgccatatgaccaacgcaccaatcagactccgccggcgggaagctgatcgttcactgctactagcgcagtgcccacgctggtgcagcaccggatcatctgtgtgacaaggaagaagaatggacgcggaggggttgctggcgtcggcggcgatcaatctgggactggcgctggtggcgctctcgctcttctccctgctcaagaagcagccggggaacgcgcccgtttaccgtccccgccggatggcgaccggcgaccttcgtgctgatggtggctttctaccgctcggccacgggcgactaaccccgtcgttccggtggataggcgcggccttccggctctctgaagacgacgtgctgcggcgccacggcctcgacgctctcgtcatcgtccgcctcttcaagtttgggatcaattgtttcagtgtttgctcgattgttggactactggtccttgctccaacaaattatactagtgaaggtcgcgctgaaatcagaagatcgaattccatggaactgttcacggttaccaatgtgacacggggatctaataggctttgggtgcattattcatgcctttgctttatatccttgtatgtggtatatttgcttcataaggaatacagagaaattactatgagaagaattgagcacttgaagcatcactacaaaagatatgatcaatacaccgttttggtgcgaggaattccaacatgtccagaccatggggcttacgggtgttatgtggatcacttcttctcaaagcattatcggacataccgatcataccaaatcgtacatgacataggaaacattgaggcattgcagaagctggcgtcctccattgagaaacggatacagaggaaaagggagaccagtaaatgtagtctcttgggacggatctggagcaagtttacatcggatgcaacaggcattcacaaccatgaagagaaactgaaaaatgtgcaagatactatccgcctcctacagtgtgaaaatatgcttaaacaaaaggaggtacctgtagcctttgtgtcgttcaaatcccggttggaggctgcccaagctgcggagacgcagcagctcgccaatccactgtcgctggtcacaacctacgcgcccgaaccaacggacacgatatggaagaacctgtccatcccgttctggcgcatggctacgtacaggctcggagtcttcgctgccgcggtcttgctgacggtgttcttcaccatccccgtaacggccgtgcaggggatagcgcagttcgagaagatgaagaggtggttcccgccggcgcgagctgtgcagctcatacctggcttgaactccgtggtgaccgggtaccttccgggcatgatcctgaacggcttcatctacctggttccttccgcgatgctcggcatggcctcgttcgaaggctgcgtcgccagcagccagagggagatcagggcctgcgacatggtcttctacttcttgctcggaaacgtgttcttcctcagcgttctctcgggctctctgctcgaccagatcggagagtccttcacgcaccccaagaacatccccaaccgtctcgcgagcgctgtttctgcgcagtcggatttcttcatcacgtacatcttgaccaacggcatgtcagggttctccttggaggtccttcagttcggtctgttgatatggcagtttttaaaggcgcgttcaattggacacagcgaggaaccatatctgtatggcttcccttacttccgagtcgtgcccgtggtttccatcgcaatattgatcggagtggtgtacgctgtggttgcgccccttctgctcccgatccttctggtgtacttcctgctcggttacgcagtgtacatcaaccagatggaagatgtttatgagatcacatacgacacatgcgggcagtactggcccaaaattcaccactacatattcctatcaatagcgctcatgcaagtcaccatgataggactgtttgggctcaagtcgaagccaggagcctccttggccacagttcccttgcttgtgctcaacatccttttcaacgagtactgcaaggcccggtttcttccaactttcaggcatcgaccagtccaggctgccaatgagcttgatgaggctgagggtacgactgaaggcgacgttgacgatgcaatctgcgcttataggccaccatggatgcgtccgacgaacctggaatctagttctgtggagcctttgaatgtttgatctgtcttttccacggtggcaccatggacctccaggcatcgcggtttcgtctgtcaacttgtaaaacacaccgcatatcacggacctggactagttggagaagcagaagacatgcttcttgttgttacacctggg

SEQ ID NO: 216807 - DNA, 1813 bp, Zea Mays
gtgaatctttaaacataactgtcgggtggagtctttgctgttttggtaaaagataacattgcttggtatgaagagcttcgtaagcagagagttgctgaactgaaaagggaattggagaagtcagaaaattctattggatccctccaatctgtgattcaaagcctcagcaatagcaaacacgttgatgggagttctgaatgccgcaccagtcatactgaatcatgtccacattctgaaaatacagcagatactaattcctcaggtaaagaaacgtccagggatagatcatcagctgctagtttcacagaggaagcaagcaacagtcagaaatctcagaaagtgcagcagtgtgatactgattcaattcaagttatcaatccatcaccagacgagtcatatccccaggcccaagttgaaaaggtcggtcccaaagatggcttgctttggggttctagaaaacaaagagtaatgagagctagaaggacacttctgaaagctggtgatagtagtggggatggtgagcctacatctacagcatgcatacagggggagggtttgtccaaaggctgcatgaagaacttcaaaactcaaaacttagaatcagttgttgtgaagaagggtgtgaaaactccaaaggtagaatctgatgtgatgaataaggatttgaaaaccctaaatgtaggatctggtataatgaagaagggcttgaaagctcccaaaacagaatctgatatgatgaagaagggcgtgagaacttctaaagcagagtctgatggtatgaagaaggggatgaaaataccgaaagtagaacctgatgttatggactggaaaactcccaaagcaggatctgatgttacgaagaagggcttgagatctccaaaggcagaatgttgccagcctgtgattgagagcgttaaactaaagctggcagagattttgaatactatatcaactcaagatgactgcaaaatgttgcaacaccaacttgatacccagaggaaaagagctagatataagaagatgattcgccggcatatggacttccgaatgcttcactctaagatcaagagtggcgcaatctctggcaccaaggagcttttgagagatatacttattttcatcaataatgtaataaccttctatccgaagactacattagagcacatggctgcggttgagcttcgtgactttgcactctggggatgcaagggcaagcaaggtttcttcaagggatgctgctgccaaggaaggggatggcaagagaccttgcagtgatgagctggctaatcaaaagactacaaagagaaatgagccagccaagaagaggggtgtgggtcggcctccaaagagtgggcagaggattgctggggcacaggaaaatagccccatcaaaggcaggaaaagtagcgctggggcacaggtagatagccccagcaaaggcaggaagaggagtgtggaagcacatgatgatagctccagcaaagggggcaagaggagccggcggtgaagctaccatcagctcaatgccggtgaaactgtgtacagcttaaccatatatcataggctgttcccttccggtttgtttacctgacaaaaaaaagttattgtcccagtattcaaactgatgtaacaggaagggttagttgtttctgatgttgttttgtaaggagtaaggacaattagaagggaaccctcatttttatattgagattatccgagttaggctatacatatctgaccatgtaatgcttatagtagtttaagttgttataccatgtgaactgatgcttgaacaccgaagttacctatcatc

SEQ ID NO: 216808 - DNA, 1810 bp, Zea Mays
gtgtcttccaccaggacgaagcagccgccgcacgcccgctcccacccgcgctcgccacacccgacggcgcacccgccccggccgcctctagccccgcccccgcctgtcgcggccgccaccggccgcgcccgcctcgcggtccggctggccttgcctcctcctcctactcgcttctctcagcctcaggccgacgcgcagcccagggccatcgtcgtcgcggaggtgaggtggaagggacacagggcctccgcgctcggctcgctgcggcgtgccgcggtcaggcgcaaccgcacatgggaggacgccgacgcagcgtgggaggaggagttcgagagcgtcgacaccctcgcggtcgcgtcgcagcgggagggcgttgtgttccacccatgggagctcgccttccgcgtcgtcagcgatattaacaaaggcccaaagaacaaaccatcaattctgggaactacttctctcaatctagcagattatgcattgacggctggagagataattctttcgttgtctataactggtggtgcacctgaacaagcctcatcccttcatctcactctgagtatggttgaattaagagcttttcaagaaacatctaatgcatcacagcgatctgctgcaaccttgccattgtccccatcatctggtgattctcttcctggaggaaaatatgaggttttggttattaaagcagggctgaggaaggtaaaaattctcacagatctggtgtcgacacgaaggcctaagaagacttgccagggaggtggcaaagataagttatgtgttaacagtgatggtgctgaatatccatgcgatactgagtctcttgatgacgatctagatgatagagttaaggaagatgaatttggagattcaactatcaggaagtctttcagttatgggtctctgcaatctgacaactatgttggtggcctagtttatgcccatgcaaagattgttggggagcatgaggaccggatatattatagtaaccgaaaaactgatgtcagtttccatgtagagaaaggattgccatcaaccacagagaatgggttgctaactgctaagcgcagtatacttccttggagaaagaggaaactgagtttacggtcgctgaaggctaaaggtgaacctctcttgaaaaaggcatatggggaagagggaggtgatgatattgaatatgatcgacgcttgctaacatcatttgatgaatctgtttcagggatcaagaggatatggatcagcaaatactatggtgtcaaaatttggtgatgacaattttgtcattggaaattaggagttgaaggagataattagctgtgatgatcgtatgaagctttcatcccagatgttctttgcatcaatagaccagagaagtgagcgagcagctggggagagtgcatgtacaacacttgtggctgttattgcagactggttccaagaaaatcagaatattatgcctatccagtcacagtttgacagccttatccgtgaaggatcactagagtggagaaacctttgtgagaacgagacatatagagagcgttttcctgacaagcactttgatcttgaaattgtccttcatgccaaaattcgcccgctgacagtttcccctagcaaatcttttattagatctgtcttattatgactatggatgagacttttgtgatgtaattgatgagactatggatttcaatattgttatgtgattgtgtgtgagatgttttatgtgaaaatatgttgtgctatatagttgttgttatatttgttatgttgtggaatgtggtgtaaaataaaaataaac

SEQ ID NO: 216809 - DNA, 1558 bp, Zea Mays
agatagttgtttaaaagtcaaaatccttgctggtggccgagggctgggaactttcaaaaagcggactgcaaggtggtgtccatattgttaaggctgaggaagctgaattgattgcaagtaaaatgttaggccagattctgataacgaaacaaactggtccagagggaaagattgtgagcaaggtctacttgtgtgagaaactatctcttactaatgagatgtactttgccatcacccttgataggaaaactgctggtccgctcattattgcttgcagcaagggaggaaaacactatagttgacctcaatgttcaaaggatggccagaaagccaggaacagaacttaggcgttggcgattggcatctccctcccctaagccatggccaccgggcggcccgtacgactcgtgctggatgcctccctcctcctcgacccctcctccaccagggaggcggcggcggtggctctgcggcccggggtagaggagctgttgcggcggttgcgctactccaacctgaatgtggcaatctgctatgcagagggcatgccaactaatgagtcaggctttcttgaaaaggtcgcaagctcacacttgtttggctctatagcacttcttgcgaaaagtgggaatctttctctaactgaattaatgttagaatggagccaaacaagtttatgtttttatgcgacttcaagagttgacaaaggtttaagttctgagctccagaatcagaattggagagttctttctgtagctaatgaatgtagcatagaggttcctggtgttttaaatgttcaaaggcttcagcagttgcttctcaccttggctactctaataaaagggaactatgtgactcatctgttctggtgattggatatataatgaaaatattctgtgaggaagacttcgcaaggagatgtggttctgtcacttatgtgaccgttgtcgtgtatggagacgtgtatggagacgaggacaagccagcgcttataatgtttacagagatgtggttctgtgactgttgccgtgtactcaggctttatttcaacaagatttaaatatgagatgtagagtgattgatgtacatcacttcactaatcatgaaatctgtagaaggcgaaactactagccatatatgatatgcataatccgtgtggtaaacattatcaatatcacacaaattatttctaatgggttttgaattatcatagtgattgttgtcgttccgtttttatgtttcatacaaattttttactcccgtcgcaacgcacgggcactcacctagtatatatataatgttgcttaccaattttgaatacccaaccttcagatcctgtcggacctgccattgctctaaagtgacacactgtgcaacctctactggctacgagtttatatggataaataatggggttttagtatcaagatatgcaaatctcactatcaattagtgctacaatgacatgaagtttttggggtcgacatagtaattatacatattaccatttgtagggcaagttggaacaaacaatagacgacatatcagcaagacaaag

SEQ ID NO: 216810 - DNA, 5118 bp, Zea Mays
ctgaattagccacagccacagggagctctgcagcacaggcagccgaacaccggcaagtcaactcttctgcgcgtcccattcacgacttgctgatatctttttgctttgcctgcatccggatctccttctccaactggtctctcattcagcccagcttcgcctttgacccgaggaacaagacagatcctcaggagaagatcgcagttctcacaattctaatcaggcaagtgttgtacttgttagttaccatacacgtttatgtttcgtcctgcgacctagcttgaagtcaattttcattggatccgtgatctcgtttccaaaaaaaagtttgaaactggatctgagttgaagatcttggtccgtagttaccccagtaccccacctttacttagatctgagcatgtaaggaatattcttgattccatggctggcacaacaactgttgtaggatgggttgtttcacctattcttaggaaaatgctttctctggtgcagtcctatgtatcaagtcagtacaactggaagtctaatatggtgtccgacctcaagaatttggaggctacattaatggaggtactcctggtagttgatgaagctgaaaggcgacatttaaaggacaggaatcaggtagcattgttgtgccaaatgagagaagcagtttgtgacacagaagatgtgttagataagtttgactataaacttataagagaaaaagttgagcaccaaagcatggctaggagcatagttgcctcttcgctttctcttggtaagcgtttagttggccttgacaagttgagatcagaactacatatggttatcaaaagcatggccagagttaaatcttgtgcagagatgtttgcaagtgttatggcagttgagagcactaactccattaagccttctgattgtgttggaactagagtcactgggtcttttccacgtgaaggaaccatttttggacgaaaggaggaggttgatgaactagtcagttggttgctgcacagaaggaatataaatccatcaaatgatgaaggatcattcactatacaactgcattctatacattcaaaaaaaaatatagagttgcattctattgttggtattggaggcatcggcaagactacagtagctcaaagcatctataacgatcagagaatagtaaacgcttttgataagaggatgtgggtttctgtttcacataactttgacaagattaatctaattaaggagataattgcgcatgcatctgatgataagaacatcaaattgatacatttcaatttcaatatgctccaagaagaacttcaaagaataatttctaacaagaaatttctattagtgttggatgatgtgtggtatgacgagagttatggggaacacattaacagagagaagtggtgggaactgatagctcccatggaaaatgcagtggcaggaagcaagatactagtaacaacaaggatggaattagtagcaaaagtgctggacagcagcagatcattcttacatggccttggacaggatgatagctgggcactcttcagacattgccacaattctattttaagttcttcaacactagagagcattggaatgcaaattgttcggaaacttaatggttcacctctagctctgaatgtcataggaaggcatttatacggcagacacaaagtggcagagtggaatgaagttcttcatagcaatatcctcaattcagacgacatgttaacgatattgcggccaagctatgaaggtttaccagtacatctccagcgctgcttttcttattgcagtttattcccaaaaggttatcacattgatccggaaaagctgatatatatgtggatagctcaggattttattgacactaaaggaagcacaaacaagtctttgaaagattctggaagaagctacttcgatgaattgctgtctagatcattttttcaaatgcttaaacctggcagcgaaacattttacgttatgcatgatataatgagtgacctggcacttcatgtttctcagggtgaatgccttagggttgagtgtgagtctatggagccaatgcctctttatactcaacatttgtccatttatagtgaaaacctggaaaatcttgtgaattgtgatctgccaaaattgcgttcattgatagttttgaacaaatcctggttttgctccaaaatctgtctgaatcatgctatacttggcaagcttaagagtgtccgggtgttggatataaccggttgttgtttagaacaattacccgatgctgtcaatcggttgattcaccttcgttacctaggtatacgctgaactttgcacccgttaccaagaaagatgttaatgtatcatttacaggcattgtttgtgcagtatcactcatgttattcccaaaggggatataacagttcttcaatgcaaattgcaaagacttttagaggccatttccatcttccagaaagcatcaataaacttgtcaatctggtccatgttgacgtagagaaggcatatgttcttatgttatccagcactctcaagcttccatttgttgagtgtgctggagaattccatgtcaatgatgagggaagtctactaggtctgaaggaccttaacatgatccgaggacatctcacacttctgtccctagataaggtgcaaaacaaagaggaagcttctaaggctcatctacaccataaggagcacataatgaagttggagctacaatggggatcgcttaattttgctagttctaccaaacagggtgttgaggtgctcgatgtcctgaaaccacactctgatcttgaggagctaactataagtggatatcctggtgctaggtctccttcttggctggagtctggttggctgagcagactacaatttatttgcctacgtgattgcaacagatgggaggtacttccacctttaggggatctgccattactgaaaactgtcgaaatacggcgaatgcaagggcttagaacacttggtcagaaattctttggccgtgctggatttccatctttggagagattgctactagagcggttaccagaattggaatggtgttgtgtcgataacgaccaagtgtttcagaatctaagacatctatcagttgctggatgtccgaagttaagagaatatcctacatatccttggacacttgaacatatagctattctggacgaggaacgaattcaagttaagacttttattcctagtgctagagtatcaagaactttttgtatcttggtatcaagcttcttccatgtcttacgtgcacatcacctagaatttgtcgaagatatggagatctatgttaaccatgtggtatgcatgtccagagaagtgctagaaaatctgaaatctctccagaatttgaaaatatatggcatacatagggccaacacttgctctgtgattgcaaaattgtgggatgagaatgggtcagctgtgtttccttcatcacttaggagccttcagttagtgcagtgctacctgaaaccatcctatttctccaagcagttgaataacctctcatcacttgagactttgcgcctaataaattgtgacaccattgagatgccctgtccaccagtaaacatgtggcacttgaggatactaaaacagttggtcctttataaatgtgattggatcacctttttggaggggtcagaagcattggtttccctggaagaaatggccataagtgactgttatgacttgaaatatgtaccagatttaaacaatatgccatctcttgagaaattgcatttgagacgttgccctcaagttatgcgtttgtccagtgctgattaccagacaagattgaaggaactggtcatagaatcttgtgatgcactatcatcacttagagagttgcaaggccttgtctcccttactaagcttatcgttgcaaactgctctaagttggaattgctgcctggtatggattccttctgtgcacttgggattctgattattgaggattgccgtcttctgaggtcactaccagagagaggtcttcctgtatcgcttagaacttttgtattggatggatgccatcaagcattagacgagcaatttcagaagggggaaggtccagactggaacaaggttgctgcacttccaggatgcatgcgctatgaacatatggcagatgtcgaagatgagtctgtctggcattcattctataacctttattacttctagtatagcagctctcagctgtgcttattttcaattgttgtggcatacctatacgtcaagtttttttcaaacactggactgaattagatgtaaattacttcttttctgtaccttgtatttgtatattgaggcaaattccagtttagaaactaaccaagatttttctgtaaattcagaaacttttcaagcatttctgaagttttgaaatatagagacatctcatgaatttccaaacaaaacataaagttggcatagcaagtgtaaaaccacaaactctgacacaccaacatagttcattttatttatgcggtatattctagaagatttggagttggtttgttgttttctaaaaaataatctacatacctctgaattctttaaaattttgcaaataagtgaacttttcttgaatgaatgaatattcctctcacacctaccaattatatgtgccctcattttctgccccctctaccattttgttagggctagtttgggagccataaaaccggatgtgattggaggggctaaaatcgccttctgaaaactagcccttagtgatcaattacaatttggagttggagatatttggtgacacctacctcgctgaagatattcatgctcctcaatatttaagtttaatctgagtaaggcaagaaaatttgtgatcatgttgaggccacaaagatacattgactgtgttatttggttccccctattacacaagctattcttgattaaacaagcagttgaaatgtttgatgttcagttgtttcccatccatcaagtgttttgaaactctcttgttgttgaatgcctactccacttcggtttggacaagccattttgctgattacagtactgttagttgccttgtttaccttgaacatgcctagcaacacttaaggggtg

SEQ ID NO: 216811 - DNA, 5009 bp, Zea Mays
ctacaactgtgttctatataaaaaaaagttgtacttgcaagctagagactattcacttatagcagccggctgtagctgaattagccacagccacagggagctctgcagcacaggcagccgaacaccggcaagtcaactcttctgcgcgtcccattcacgacttgctgatatctttttgctttgcctgcatccggatctccttctccaactggtctctcattcagcccagcttcgcctttgacccgaggaacaagacagatcctcaggagaagatcgcagttctcacaattctaatcaggaatattcttgattccatggctggcacaacaactgttgtaggatgggttgtttcacctattcttaggaaaatgctttctctggtgcagtcctatgtatcaagtcagtacaactggaagtctaatatggtgtccgacctcaagaatttggaggctacattaatggaggtactcctggtagttgatgaagctgaaaggcgacatttaaaggacaggaatcaggtagcattgttgtgccaaatgagagaagcagtttgtgacacagaagatgtgttagataagtttgactataaacttataagagaaaaagttgagcaccaaagcatggctaggagcatagttgcctcttcgctttctcttggtaagcgtttagttggccttgacaagttgagatcagaactacatatggttatcaaaagcatggccagagttaaatcttgtgcagagatgtttgcaagtgttatggcagttgagagcactaactccattaagccttctgattgtgttggaactagagtcactgggtcttttccacgtgaaggaaccatttttggacgaaaggaggaggttgatgaactagtcagttggttgctgcacagaaggaatataaatccatcaaatgatgaaggatcattcactatacaactgcattctatacattcaaaaaaaaatatagagttgcattctattgttggtattggaggcatcggcaagactacagtagctcaaagcatctataacgatcagagaatagtaaacgcttttgataagaggatgtgggtttctgtttcacataactttgacaagattaatctaattaaggagataattgcgcatgcatctgatgataagaacatcaaattgatacatttcaatttcaatatgctccaagaagaacttcaaagaataatttctaacaagaaatttctattagtgttggatgatgtgtggtatgacgagagttatggggaacacattaacagagagaagtggtgggaactgatagctcccatggaaaatgcagtggcaggaagcaagatactagtaacaacaaggatggaattagtagcaaaagtgctggacagcagcagatcattcttacatggccttggacaggatgatagctgggcactcttcagacattgccacaattctattttaagttcttcaacactagagagcattggaatgcaaattgttcggaaacttaatggttcacctctagctctgaatgtcataggaaggcatttatacggcagacacaaagtggcagagtggaatgaagttcttcatagcaatatcctcaattcagacgacatgttaacgatattgcggccaagctatgaaggtttaccagtacatctccagcgctgcttttcttattgcagtttattcccaaaaggttatcacattgatccggaaaagctgatatatatgtggatagctcaggattttattgacactaaaggaagcacaaacaagtctttgaaagattctggaagaagctacttcgatgaattgctgtctagatcattttttcaaatgcttaaacctggcagcgaaacattttacgttatgcatgatataatgagtgacctggcacttcatgtttctcagggtgaatgccttagggttgagtgtgagtctatggagccaatgcctctttatactcaacatttgtccatttatagtgaaaacctggaaaatcttgtgaattgtgatctgccaaaattgcgttcattgatagttttgaacaaatcctggttttgctccaaaatctgtctgaatcatgctatacttggcaagcttaagagtgtccgggtgttggatataaccggttgttgtttagaacaattacccgatgctgtcaatcggttgattcaccttcgttacctaggtatacgctgaactttgcacccgttaccaagaaagatgttaatgtatcatttacaggcattgtttgtgcagtatcactcatgttattcccaaaggggatataacagttcttcaatgcaaattgcaaagacttttagaggccatttccatcttccagaaagcatcaataaacttgtcaatctggtccatgttgacgtagagaaggcatatgttcttatgttatccagcactctcaagcttccatttgttgagtgtgctggagaattccatgtcaatgatgagggaagtctactaggtctgaaggaccttaacatgatccgaggacatctcacacttctgtccctagataaggtgcaaaacaaagaggaagcttctaaggctcatctacaccataaggagcacataatgaagttggagctacaatggggatcgcttaattttgctagttctaccaaacagggtgttgaggtgctcgatgtcctgaaaccacactctgatcttgaggagctaactataagtggatatcctggtgctaggtctccttcttggctggagtctggttggctgagcagactacaatttatttgcctacgtgattgcaacagatgggaggtacttccacctttaggggatctgccattactgaaaactgtcgaaatacggcgaatgcaagggcttagaacacttggtcagaaattctttggccgtgctggatttccatctttggagagattgctactagagcggttaccagaattggaatggtgttgtgtcgataacgaccaagtgtttcagaatctaagacatctatcagttgctggatgtccgaagttaagagaatatcctacatatccttggacacttgaacatatagctattctggacgaggaacgaattcaagttaagacttttattcctagtgctagagtatcaagaactttttgtatcttggtatcaagcttcttccatgtcttacgtgcacatcacctagaatttgtcgaagatatggagatctatgttaaccatgtggtatgcatgtccagagaagtgctagaaaatctgaaatctctccagaatttgaaaatatatggcatacatagggccaacacttgctctgtgattgcaaaattgtgggatgagaatgggtcagctgtgtttccttcatcacttaggagccttcagttagtgcagtgctacctgaaaccatcctatttctccaagcagttgaataacctctcatcacttgagactttgcgcctaataaattgtgacaccattgagatgccctgtccaccagtaaacatgtggcacttgaggatactaaaacagttggtcctttataaatgtgattggatcacctttttggaggggtcagaagcattggtttccctggaagaaatggccataagtgactgttatgacttgaaatatgtaccagatttaaacaatatgccatctcttgagaaattgcatttgagacgttgccctcaagttatgcgtttgtccagtgctgattaccagacaagattgaaggaactggtcatagaatcttgtgatgcactatcatcacttagagagttgcaaggccttgtctcccttactaagcttatcgttgcaaactgctctaagttggaattgctgcctggtatggattccttctgtgcacttgggattctgattattgaggattgccgtcttctgaggtcactaccagagagaggtcttcctgtatcgcttagaacttttgtattggatggatgccatcaagcattagacgagcaatttcagaagggggaaggtccagactggaacaaggttgctgcacttccaggatgcatgcgctatgaacatatggcagatgtcgaagatgagtctgtctggcattcattctataacctttattacttctagtatagcagctctcagctgtgcttattttcaattgttgtggcatacctatacgtcaagtttttttcaaacactggactgaattagatgtaaattacttcttttctgtaccttgtatttgtatattgaggcaaattccagtttagaaactaaccaagatttttctgtaaattcagaaacttttcaagcatttctgaagttttgaaatatagagacatctcatgaatttccaaacaaaacataaagttggcatagcaagtgtaaaaccacaaactctgacacaccaacatagttcattttatttatgcggtatattctagaagatttggagttggtttgttgttttctaaaaaataatctacatacctctgaattctttaaaattttgcaaataagtgaacttttcttgaatgaatgaatattcctctcacacctaccaattatatgtgccctcattttctgccccctctaccattttgttagggctagtttgggagccataaaaccggatgtgattggaggggctaaaatcgccttctgaaaactagcccttagtgatcaattacaatttggagttggagatatttggtgacacctacctcgctgaagatattcatgctcctcaatatttaagtttaatctgagtaaggcaagaaaatttgtgatcatgttgaggccacaaagatacattgactgtgttatttggttccccctattacacaagctattcttgattaaacaagcagttgaaatgtttgatgttcagttgtttcccatccatcaagtgttttgaaactctcttgttgttgaatgcctactccacttcggtttggacaagccattttgctgattacagtactgttagttgccttgtttaccttgaacatgcctagcaacacttaaggggtg

SEQ ID NO: 216812 - DNA, 6525 bp, Zea Mays
tgtgcttctcctccctcccacccatccacccatcatcatctcgacctcttcccccaactcctcgccgccgccacttgccggtagggtttgcgagcccatcccgctccaatcgcccgccgccgccgcgagatcggcggctcccatcccagattcgttcccgcccacgccagcgcgccgcatccgatacccgtcccgttggcccgcgactcgcgaacgaggatgcctcagtagggcgcgcgcgtgtcgagctagggttgtcgcgtccgaggccatggacaccgccgcgggcccggggccccgggacggccccgatcggacgccgcaggggcccggcgcctcccccgaggaggccgccgctgatggcgtgaagacggacatcgcaggtggggcggaagcgcttgcagcggcaggcgcggccggtgaggccgatccgggtggaggcgccgctgcggcggggcgtgggggtgacgcggaggcctcggcgagcgagcccacggcggaggaggttaacgaaggctgcggcggcgccgctgctgctgcgggcggagatcgccccgccgcgcccgaggcggatgcggacggcggcgcgggcaaagggcggtctgctgtgcacgcggtgagtgaggtggagcagggccaaggcattgcgggggcagcgcaggatgtggatcccgcggtgtttgaggtgaagaagatggacgtgagcgagggtggcgacgcaagcaagcagaatcagcactctccgtcttgtacggccagcgaggtggatgtggggatcgttcctgtggcagtgcgagatttggatcctgtggggtctgaagtgatgatggaggtggacgacggccatgtcagggaacaagagcgcgcgggagtggctgtggcgggcagcgagtttaagatggaggaagctgatggaagagtggtgcatcaagggtctgctgccacatctgctgggggccttcaggcgcgagccgaggaagtgggagagtgcttggtcggccgttacattggccgcaacgcgccaatgcaagcggggatccttattgggaaggttgcatcctatgatagcacagctggcatctacagcgtggtgtttgaggatggacataatgaggatttggagcttcctgagctccacgagttcctcatgcccgacaagaatggcacgttaggcatgagtgtgaactgcaggaagaggaagctgggcctgctggttttgtcggggagtgtctcggaggtgaaagagccagcaagtactagacagagggttgacggatgcgagatgcctgccaacactgatgcactgcggtatagtgggtctggctcggatatgtccgaggatatcgaatcttcgagtaattcatccgatttcactaaagaagaaccatctgagccgtgtcctcctgtacaggctgtggagttgcccccgtcatcgggagacattcatgtgccagaagattccataagctatctcttttctgtttataacttcctgagatccttcagtgtgcagctgttcctgagtccgtttggtctggatgattttgttgcagccattaattgcactgttcagaataacttgttggatgccgtacatgtctcgctattgcgtgcactgaggcggtatcttgaatctaaatctgctcaaggatctcagatggcttcaaattgcttgaagtatttggattggacattactagatgcattgacttggccaactttcttactagagtacctgtatgtgatggggtgcattaagaacctaggggggcagagttttgctagaagccttctagccgctgaatactataaactttctgttgccacgaagttgagggtgctgcaaatactctgtgatcatgtccttgaatcacaagaatacaaaactatactggaagatcgagtaggctacaatgaggagatggaatatgagatagattctagcacctttttggaggctggttccagagcagtcttgactagagcctcaaaggcctcagcttacaaaatgctgaatgatttacagaactttgaaagtggtccaaatgtaacaaattcagatgttgctgtagcagatgtttctcaggacggtaatagtgatgattgccgaatatgtggaatggatgggactttggtatgctgtgatggctgcccatgggcatatcattcgagatgtatcggtcaaaataaagctttccttccccagggggactggttctgtccagaatgtgttgtcaacaagcttggaccaacttcatcaagaattgaacgtggtgcaagaggagctcaaatgtttggcattgatatgcacgggaggctattcttaggaacctgcaactatttactggtgcaaataatggaatactggaaacatttactcggtagagttcagagtgagagatcaacaatattgaaagaagttggtacaagacatactccacaatccagcatgttgagttttactccaacaatgtcaggagatggaagtggctggacaactttaaaagatggtggggacagtaaaacagtagcacttcctcaaacaaatgtgcaacagaaaattttcgctaatcagtatacagtgtgctctgctgaacaaacggagaagaatgttgatgtttgcaagcaagctctgtcagctcagaacaacatacataatgcacctagaaatggagcttctggaccatttgtggcatcccccgtttctcatcagaatggatccattggaacgggtatgtctaacatagcacaagcacagccagctcatagtatatatcgtccagacttatccactgtttctgcaaagtcagaatcatttcgttcatctttgcaaggtaaacttcaccttcagatgtgtactgaaagacctggaaacatgagttgtggcaaggcagcaaagttgtcttcttttaaaccacaagcttacatgaacctctacaatcatggcaacattgcagcatctgctgccgccaatctagctattattgcatccagtgaaggtaaggtttccacatcccaactgtccgcaaaaccaaagaagaaggtggctgcagacaatgctctacagttgaaagcattttcctcagcagtcgcacaatttgtttggccgagtactgaaaagaagcttatggaagttccaagagatagatgtggttggtgccttgcttgcagaagttcagcaagtggaaacaaaaaggcttgttttcttaacatgaccacatcaaacgctgctaaaagttctgctcgagttcttagcacaatgcgcgtaataaagatttctgacagccatttccccagtattgctgcttatttagccaacatggaggaaagtttgcgtggcctgttggttggttcactacaagacatgcagcagagagaacggtggcgtgaacaacttgaagaagcttccaactgcagaactgtaatacccctcttgcttgagttggaaagcaacatccgtggagtagcattttctgcaagctggttcaagccgatagacgattggcctgcggaatctccttgtccatcaacaggggcatctcgtcctgcacaacaccaaaaacgtggggctggcggaaggcgtggcagaagacgtttgttggtgtctgaacccggtactgttactgatgatgacaacagctggacttggtggaccggaggaaatataataaaacgtactttgcagaggggggctcttctacattcaaccataagaaaagctgctcgccaaggtggtaagaaaaggttagcaggtttatcttatcatgaaggttctaattttccaagacgatctcggcaacttttctggagagcatgtgttggactaagccagacttcgtctcaacttgctctgcaggttagatatcttgatgctcacatcagatggaaggagtttatctctccagatcaaattccttcagatggaaaaagttctgacgctgacttttctgcactcagaaatgctgtactctgtgataaaaaaataatcgacaataagataagatacgcactgaagtttcccaaccaaaagcatcttcctgtccgtctgacaaaaaatatcttggaagcagaaagtgatcaggatgaaattagaaaaatgtggttttctgaaaaccacgtgccattgtacatgttacgagaatttgagcagcatgctgaggctagctccttgcctactccaggaattccggaatgttttaccaatttatacccaaggcgagtgaaagcacctgacagagatgttttttcatatctctttcacaagggagaagtctatccctgcgcgtcatgcaagaagggtgttctctacagggatattgttaaatgcagctcttgtcaaggtaattgtcataaagagtgtacatcaagatctgttgttagcaaaggaggcagtactacttccagtttgatatgcaagttatgtctccagaagcgaaatcttatgctcactagttacaatacaaatgcaagttatatccagcatctacagaagaataatggccaacagccagtgaccgctcccagaaatgtctctaaggttagttcttcccattctgctgagcctgcccccaaagtggaagccgagccagtcacaaaggttaaggcacaacgagttggaaatgtggaagctacaacccagccagttctaaatgtgaaagcccagccacccgccaaagtggtaactcagaacatcactagtgtccaaaagacaaaagctaaaaagtcaaagtccgaaaaaccaacgaaggctaaaaaagttcaagcgatcacatatttcggtctcatatggaagaaaaataagaacgacaaggatgatggaagcgagttcagggcgaatgatgtaatccttaaaagcaaggatggtataggttcgtcaataaaaccaaaatgttgtctatgtgacaaagcatattctccggaattcctgtatgtacgctgtgagaggtgcaaaaattggtttcatggtgattccttgcaacttgaagaagataggattggtgagttggttggataccgatgctgtaggtgccggaggagggccatccccccgtgtcctcattcagataattatgtaaagcctgaacccgaatttagtgagcaaacagttgcaacatcatcggtgtcaactatgctatccagtgggaagacttctgcttcagcagatcaggacccactgcttgcttcgtatggaatagttgaaccaatcggggaagagacaggggatgttgatttatcagcgaacacggcaagcattgccccgggaagtagccagaagctgtctataagaagagcactagctaaaacttctggataccttgaccaagctggtaaatctgtgaatgagtattatgtccagaaccagaatacacctccaggcaatggaaacatcaatttcagccacacgaatgagatttccttttcggaggctgacagcgtgggcgcttcaggactactggggtgggatttttcgagaggaaccgcgtatgctgccccacctggtttcacttctaatcgccagcagaaccgcactagccgtggcagctttgtgccggacgagtgtgagcgtgagccccagacttatttctcgttcactgagctgcttgaggctgacgacgcacagcttgatgacaacgcgtttgggatagctactggtctgcaaggtgatgctaacggctccggaagctttgtccaacgaggagttggttttggtggtacgtctttcatggcagaagatggagcttcgaatatgaacgtgccaacaaatggtcccacgcctgaagaggtagcgtgccacaacggcacgaacactcagccgccacctgatcccagatgttctgtccgtgacctccgcacacaccggtagtgctctccctgggaaccgaggcgtgtagagcctgtcgagagcggcaactggagttgtggtggttgccgcgaatggtgatgatgagcctctaaacttcactgccagttgcaatggcaggtaaatccaacggcatcccatatacttaccggatttctcgttaccggtcgctgggttgctgctgtcatgatgtgctactgatttctcggatcatttcattatttgatctaatcttaaccatcatacagttagagtagcgattaccgcttggggtttacactgtacatactgaaaggatgggtcgacgacgacgtaccatttccattctttaggctatttatttttttggggtgggagttttagagctaggatgctgctagcacatagcaacatggtatatgggtcgtctggaaaaaaaaaaccatattattatgtaactgtattaaccttggttgtctcttctcgccttctgagatacaagtgtctcttggtcagagtgggtggccgtttctatgcctatgcagctatgctccagtattgtcgcatttgcctaggtaaaataactaattacatggcatgcgatttatgttccattcttcctttagatgaattactctctccagccatcaacacaagcgaactttttggatgccgtttaatctgtg

SEQ ID NO: 216813 - DNA, 3352 bp, Zea Mays
ccctggactacggagtctaggttttggccacatatcaaggactacatacgagcgatcgatggaagccactttcccgcctttgtccctttgtcaaagcaacccaaatatattggttgtcacgggtacgcataacagaatgtcatggtcgtttgtgactccgatataaggtacacatttgtcgttactgggtggcctggttcggtgcatgacactagagtgctacatgatacttttatcacgtacgggaataggttcctacatcctccagaaggtattagtataatctacttttgtagcatttccaattaatgttgttatgtaccccaacaggaagggatacctcgcatcttataatggtcaaaattaccatatttttgaatggcagcatgcgaggcaaccagttggtgccaaagaagttttcaactacgcacactcatccacgaggaatgttataaagcgatcatttggggtgctgaagataaagtggagaatccttctcaatctgcattcattttgactaaggaagcaatccaagataattaatgtatgcatggcgttgcataacttcattcaggacagtgttatacacgatcgcgactttgactagtatttatcttgtacgaggtatgtttatgatgtagctataggtgatagtagtaccaacacatcatatgagttagacatgagtgtttttagtgatgcaattgctaatgtgttagtgtcttatgtagttatctgaaccgataaataattatattataatggacaaatcatgtgtaattgcaatcagatgttgattattgtgtctgtctttttcttttttttcactcagaatctataatatcagaatttgcgtatctaaacacccagattgtaaccatcagcttctcccacagcagtccaaccaaacattcagccaacttttttccacaaccagcttattctcacgaccatattaaaaaaaagccgaaccaaacgtgacctatgattgctgctcactaagtgttacccaaatcgtcagagtgagggggaggcggagggtgaatgtgaacttccggatgtctccaattgcttctgatcctgtccactccattaccaagaatagcactccatgtatcttggagtagagggaggaggagggagctcagccagtcatctatggattggtgccccaaacaacaagaccggccgagagggaagagcggaggccggaggggtcagctcttgcacttgtcaggggaggctagtctaggctaggggatctctgattgcctcctatcctctcctagccctgccctgccgcagcgcaacgactccgaaatctgaatcgccgcctccctccgccattcgcgtcagtgacatctattccttcaattcattcagtcaggcgacagcccatgcccttcacacaatcaaaatcgaatgttggttacacaactggaaaaataacgcacaccccgcaacatactaggcacgtctttatctcggatcagtattcgggagtaagaacgacagcgcattgccaggatagaaatcgtcctgatgttcttcgtaagtctggcatttagaccaggctgacaatgtcagcttccgagttcaggattccataccagcaagtttcaccttcgcagcctgctgagaatgtaaatcagtttaagacctgtcgatgtggggagggagacccgaactccacttctgaaactggtgacagtccaccggcctcttgtcctaattgccaggtccttaagagtggacatttactactttcatctaaaggaattggatggacatcatggaaaaagcgctggtttgttcttacgagggcatccctagtgttcttcagaagcgacccttcactgacaacagcctacaagtttggcattctaataattcctagagttgaaatcagtgtgctgctgtacaatccaagtcattaccagaatgtgccgccacccagaggagctgaaccaattgttacacttggtggaattgacttgaataattctggaagtgtcgtcatcaaagaagaaaggaaacttttgacagtgttctttcctgatggccatggtgaacgaactttcactctgaaggcagaaaccacaggagatctaaatgagtggagaaatgcactggagagtgctatagctcaggcacccagcatagcaaatacaatggggcaaaatccaatattcagcactgatgtagaagcagaatctgctgaatctccagctgaacattcggaggaccgttctgttattggcagacctgcaaaatttgcacttgtagatgctgatggtagtccatcattcttggagaaggccctgaagttcattgaagatcatgggaaaaacgagttctctccagaagaggatgctcatgttattggtgactgtattaagtatgttcttcgagagatgccatcatctccagttcctgcatcatgttgcactgctctggttaaagcataccgaagtgacaaggcaagaagacttgatgagattaatagagtgataaatgaagttttcccagaaccaaatcgacaattgttgcagaggactcttaagatgatgcaagttgttgagtcacacaaagctgtgaatagaatgtctcaatctgctttggcagcttgcatggcaccactacttcttcgacctcttcttcttggagaatgtgacatagacaatgaatttagtatgggaggggatagttcattccagctacttcaagctgctgcggctgcgaatcatgcacaggctattgttattattatgatggaggaatttgatcagatatttgatgactcggaagaaggttcctgttcttcagatgcttatacggagtctgaggatgatgttgacaaggaatattccacagataatgacacccatgatgacgatggttcttatgattctggtgaagatgacattgaagaagatttggactactctgatgacagtgaacatgacagtaagatcaacgctaatatcaaggatggcaaggttaaaaacaatatctcagaaactgcagaagttgcacaggcagaggatacctctcctatggatatcaatagtcaatccaaccagaagcaagaatcatgtggaccgaatggatccaaagatcgtatactaagatcaacttctcgttcatcatcttccagagaaaaaactatggagaaatcatgcagttcagcacacaagggcaaaagaaccttatggggccgtacttcagcaagaaaagacctgtcaacagaggagattgaatgctgcagcgatgatgacagtttggaacgaaaaaaaatgcaaggaagcttttacaatttctggctgacatttgaggtattttctgatgtggc

SEQ ID NO: 216814 - DNA, 6097 bp, Zea Mays
ccctggactacggagtctaggttttggccacatatcaaggactacatacgagcgatcgatggaagccactttcccgcctttgtccctttgtcaaagcaacccaaatatattggttgtcacgggtacgcataacagaatgtcatggtcgtttgtgactccgatataaggtacacatttgtcgttactgggtggcctggttcggtgcatgacactagagtgctacatgatacttttatcacgtacgggaataggttcctacatcctccagaaggtattagtataatctacttttgtagcatttccaattaatgttgttatgtaccccaacaggaagggatacctcgcatcttataatggtcaaaattaccatatttttgaatggcagcatgcgaggcaaccagttggtgccaaagaagttttcaactacgcacactcatccacgaggaatgttataaagcgatcatttggggtgctgaagataaagtggagaatccttctcaatctgcattcattttgactaaggaagcaatccaagataattaatgtatgcatggcgttgcataacttcattcaggacagtgttatacacgatcgcgactttgactagtatttatcttgtacgaggtatgtttatgatgtagctataggtgatagtagtaccaacacatcatatgagttagacatgagtgtttttagtgatgcaattgctaatgtgttagtgtcttatgtagttatctgaaccgataaataattatattataatggacaaatcatgtgtaattgcaatcagatgttgattattgtgtctgtctttttcttttttttcactcagaatctataatatcagaatttgcgtatctaaacacccagattgtaaccatcagcttctcccacagcagtccaaccaaacattcagccaacttttttccacaaccagcttattctcacgaccatattaaaaaaaagccgaaccaaacgtgacctatgattgctgctcactaagtgttacccaaatcgtcagagtgagggggaggcggagggtgaatgtgaacttccggatgtctccaattgcttctgatcctgtccactccattaccaagaatagcactccatgtatcttggagtagagggaggaggagggagctcagccagtcatctatggattggtgccccaaacaacaagaccggccgagagggaagagcggaggccggaggggtcagctcttgcacttgtcaggggaggctagtctaggctaggggatctctgattgcctcctatcctctcctagccctgccctgccgcagcgcaacgactccgaaatctgaatcgccgcctccctccgccattcgcgtcagtgacatctattccttcaattcattcagtcaggcgacagcccatgcccttcacacaatcaaaatcgaatgttggttacacaactggaaaaataacgcacaccccgcaacatactaggcacgtctttatctcggatcagtattcgggagtaagaacgacagcgcattgccaggatagaaatcgtcctgatgttcttcgtaagtctggcatttagaccaggctgacaatgtcagcttccgagttcaggattccataccagcaagtttcaccttcgcagcctgctgagaatgtaaatcagtttaagacctgtcgatgtggggagggagacccgaactccacttctgaaactggtgacagtccaccggcctcttgtcctaattgccaggtccttaagagtggacatttactactttcatctaaaggaattggatggacatcatggaaaaagcgctggtttgttcttacgagggcatccctagtgttcttcagaagcgaccctaatgtgccgccacccagaggagctgaaccaattgttacacttggtggaattgacttgaataattctggaagtgtcgtcatcaaagaagaaaggaaacttttgacagtgttctttcctgatggccatggtgaacgaactttcactctgaaggcagaaaccacaggagatctaaatgagtggagaaatgcactggagagtgctatagctcaggcacccagcatagcaaatacaatggggcaaaatccaatattcagcactgatgtagaagcagaatctgctgaatctccagctgaacattttgtttgtggtgcagcggaggaccgttctgttattggcagacctgcaaaatttgcacttgtagatgctgatggtagtccatcattcttggagaaggccctgaagttcattgaagatcatgggatcaaggtagagggcatcctgcgtcagtctgctgatgttgaagaagtcaaacgcagaattagggattatgaaaaggggaaaaacgagttctctccagaagaggatgctcatgttattggtgactgtattaagtatgttcttcgagagatgccatcatctccagttcctgcatcatgttgcactgctctggttaaagcataccgaagtgacaaggcaagaagacttgatgagattaatagagtgataaatgaagttttcccagaaccaaatcgacaattgttgcagaggactcttaagatgatgcaagttgttgagtcacacaaagctgtgaatagaatgtctcaatctgctttggcagcttgcatggcaccactacttcttcgacctcttcttcttggagaatgtgacatagacaatgaatttagtatgggaggggatagttcattccagctacttcaagctgctgcggctgcgaatcatgcacaggctattgttattattatgatggaggaatttgatcagatatttgatgactcggaagaaggttcctgttcttcagatgcttatacggagtctgaggatgatgttgacaaggaatattccacagataatgacacccatgatgacgatggttcttatgattctggtgaagatgacattgaagaagatttggactactctgatgacagtgaacatgacagtaagatcaacgctaatatcaaggatggcaaggttaaaaacaatatctcagaaactgcagaagttgcacaggcagaggatacctctcctatggatatcaatagtcaatccaaccagaagcaagaatcatgtggaccgaatggatccaaagatcgtatactaagatcaacttctcgttcatcatcttccagagaaaaaactatggagaaatcatgcagttcagcacacaagggcaaaagaaccttatggggccgtacttcagcaagaaaagacctgtcaacagaggagattgaatgctgcagcgatgatgaggcccttgttgagaaacttgagagtaacaagattgatctccaatcaaaaattgcaaaggaggccaaagaaaatgcaatcctatggtcaagtctagaaaaacggaaagaagaactacatgagcgtcgtttagcacttgaaaaagaagttgaaaatttgagggaccagctgaagagggtgatgaatttgcgaagggggcaggtgtcctcgccttcaacaatagacagcaaggtcaggggccagcagctgtgctgtgaatcatgcaaccaacgtctcctaaatacagacaggcttagcggacctgaaagctcatcagtggaagcgtcaccgactgttgggagtgatcctgcatttgacatgggtgatatcgagcaatcaaggaagcaagccgcacagcattcgccttcttcaagagacaagccaagtcacgaggcggtcgggggcatcacccagagggctcctcaaagagggcattcgattgccagggagggccaagatgggtcgtcgtcgttgtcatcctctaattcgaagtggaatcttgcgcagaaacaatattcaaatagcccattgataagagggcttcatgtatccagcagactagaggatttcggtggaagcatatcaccagcagcgtcatcggcattagccaagctgacgaaccggctcaacttcctgaaagaacggagggcgctgctggcaagcgagatgcagagcttggatttgggtcggcccccaacagtgaagtccccaacaccaaaaggccatgaaagcaagaatagttgatgttagtctgttcctgtcgtgctcttctgaatgctagatagccttatgattaaaaccagcagtgtagtttgtgtgcatcccgttctcatccatgtagtgctgtctgtacatgtttccacaaaattctgctgcttcaaacttgcagatacatatagatacagattgaacgtgtcagctgctagtaggctgctttgttgaacacactacacaccaagcactagctgttctcattgctgaatggatcgtggctcaaagcactcttcactgatatacatagagagatggatctagtgatctggacatggtgacacattctaaagctcaaaatggctgtctgtccacataaaaacatggataacattgaaggtacaacaaagtgcagagatagctccctccagcattccaactaggataatagggagtctcaacaaagtgcagagttgtctcaggtctaaacttctcctagacgatagactagtagatatgctgctgctactgatctttcatcgggattcaggcatgatgatcctgacggccttgttcgcagtagccctattctcatcggagatggctccacattctgggagatcaaacttcctgtggctcagtaattctgcttccctggtggctcatggcttcaagctcctctagcatagatttctttgcggtccttaccatggattgaggggcaagcaccaaagatggccagagtccgaggctaatgtgatattatgatttatgcatctacagaaagagcaggtagcatgatttatgcatcatgccaaccaccattcactttcactggttatatggaacccagggataaaatgagatacaagcaggcttttatgaacgaaacagtttagtctgttggcaagtacatgtttagtacaaaagaaggatcagaaggaagttgaggaagaaacagttcgactgattaacatatattctttgtttttctcttgaatatgcaggagagttaaggacaaagaaagttgtgtatcattatattaaaaaaagaagaaagaacaagagcccatacaaacgaacacccactcaactcagaacatacaatgcgcctttaaaaaaacgaccaagaatcaactaggtcctcctgatatcaaacttcctctagaaccatgctgcggccaatctccagagtatgagctcctcaccggctagggacatagctcggtcgatggaaagggagaaaccatcaaacacacacctttttcgattggttccaaagaatccatacccctagaacaactagagaattaaggcattttctaacaggggcatgtgctgcagccagagttctttctcaccatgccaccactcatcaaaattttcttcccctagttttggacttaggttatgcagcctgactttttgtaaaagtctaaaccaaaatactcgagcaaagatgcaggagagaaacaagtgattaatagtttcctcagcttgatcacaaagtgggcacattggtgggtgcaggagtccacactttgcaagccgatgagctgtccaacacctatttctcacgacaagccacataaaaagcgacatttttcaggggcaatgcattccaaattctttcccaaaatctaaaggccacaatcctagaatataggttcttatagctagactttgtagattatttcctgtctggtgaaataaagagactaatatcattgattgtgccattgataaaaaggccaaatcacttgccttggctggtagcgaaataaatatgaagcattatttgaaagaaagacttgcccttttattaagagaagaggagattaagtggtatgaaagagcgaaggttaataacctattacaaggtgacaataatactcgcttttcccatctagttgccaatggtaaacaccgcaacaacacatcttcaaattagaacaggaagggtgagttttcatgggagatgataatttaaaggcatatataaagggttgtttggaccaccagagaataccaatataaccttggtggaagattatattgaagatatc

SEQ ID NO: 216815 - DNA, 1551 bp, Zea Mays
agggcttggtcccgcgcgtcatcaagcgcgcattatgaggtgtggtggtgagggatgggcgatggcctttgcagatgaaggagcgacagcgctggcggcctgaggaagacgccgtcctgcgcgcctacgtccggcagtacggcccccgcgagtggcacctggtgtcgcagcgcatgaacgtggccctcgaccgcgacgccaagtcgtgcctggagcgctggaagaactacctccgccccgggatcaagaagggctcgctcaccgaggaggagcagcgcctggtgatccgcctgcaggccaagcacggcaacaagtggaagaagatcgccgccgaggtgcccgggcgcacggccaagcgcctcggcaagtggtgggaggtgttcaaggagaagcagcagcgggagctgagggacagccgccgcccgccgccggagcctagccccgacgagcggggcaggtacgagtggctgctcgagaacttcgcggagaagctcgtcggagagaggccacagcaggctgccgctgcgccgtcgccgctgctcatggccgcgcccgtgctgccgccctggctgtcgtccaacgccgggccggccgccgccgccgccgccgccgtcgcgcacccgccgccaagaccgccgtcgccgtccgtgacgctcagcctcgcgtccgccgcggtggcgccgggcccgcccgcgcccgcgccatggatgccggatcgcgccgcggccgacgcggcgccgtacgggttcccgagcccgtcgcagcacggcggcgccgcgcccccgggcatggcggtcgtggacgggcaggcgctggcggagctcgccgagtgctgccgcgagctggaggaggggcggcgcgcgtgggcggcgcaccggcgggaggctgcgtggcggctgaagcgcgtggagcagcagctggagatggagcgcgagatgcggcggcgcgaggtgtgggaggagttcgaggccaagatgcgcaccatgcggctggagcaggcggccgccgcggagcgcgtggagcgggaccaccgggagaaggttgccgagctccgccgcgacgcgcaggtcaaggaggagaagatggccgagcagtgggccgccaagcacgcgcgcgtcgccaagttcgtcgagcagatgggggggtgctcccgttcatggtcctctgccaccgacatgaactgttgaactggacaaacgagccgctgaccacaccgtcgctagctatcgcgtgctacgtgctccggttcacggctttcttgcattctgggacgcgacttgtaaacgccatggattttcttgctcacgttcacttccgctttctttctttctttttttcttttctttttatttacaactgttgttacggtcggttcagtgcttctctctctatctactagtagttgatcagagtcaagaaatgtaatgctgccgttactgtcgtagtttcatcctctctaaacatgcgttctgtctgtttttgatcatgccaagcttcaaccttagcactgaataaatagaacgagaaaaaaaaatcagacaaagtttcaaa

SEQ ID NO: 216816 - DNA, 1616 bp, Zea Mays
gtgaatgtgatgctccacctccactaccactctatcgcccatatcgtccgtggtccgtctcgcgccgagcattcgcattggcaaccaaaccaagctgcttgcattgttgcccgtcccttcgttgttcagagatcgaacatccaagtcgttaggaaatggaggcggcggcggcggggagcggcgggagtggtgcggcgaccaagctgcagaaggtgtaccgcagctaccggaccaggcggaggctcgccgactccgccgtcgtcgtcgaggagctctggtggcaagcactggacttcgcaagacttaactacaacactatctccttctttgacgaacccaagcctaaggctgctgcctcacattggaatcgtattggccaaaatgcgttgaagattgactcgcgacatcgctccgggcacaacctgcatttctactataatttatggtgccaaagccaagctggtcagcccttcttctattggcttgacgtcggggatggaaaagaagtggaccttcccgagtgtccaagaactttgctgaagaagcaatgcataagatatcttggtcctaaagaacgtgagctctatgaatacattattaacgagggaaaggttatccataagcaatctggagaaccacttgatacaagcaagggtcctaaagatgcttattggatttttgtcatgagcacagcaagaagactttatgctggcaagaaggagaaaggtgtatttcaacactccagctttctgtcaggaggtgcaaccatagcggctgggaagtttactgtaaaagctggagtaatcaagtctatctgggcatatagtggtcactacaaaccaagcacagaggatctcaataatttcatgaaatttctagaagaaaatggagttaatctcaaagaaattgagatgcgaccattcaagaaaggagactaccataatgattcaatgcctaatgaaacacaaaacatcattgttggtaccaatcctccacaattgattctctcttcagacacaaaggaaggcgatgaaggaaaggatgctccaatagaacgagcaaaggtaacatatcatagaaccttatcaggtggtctgcacaaccccaaaggcactgatgtcccccagaaggcaattcttgagaggattaaatccaagagtgagactgaatcttatcagcttggcctcaagttatccctcaaatggagcactggagctgggcccagaattggatgtgtgaaggattatccaacaaagcttagaatgcaagctcttgaaatggtacacttgttaacaggggcatcaacgataccacattcatcgttgctcgcagaagctcaagaatgtcacgacccagataggaggctagaagatcttgtgaaacgtgcacaggccaactaatgcacttgataacatgaaacctatgcagttcggctattggataattgtagtggtaatgttgcattgtcattgtgttgtgtactgaaaaacttatgttgttagcttgttcggttcttttcctttttagtgtggcgaagtccaccaaatatgacaacttatcaatttaggacccaattggaatgcagggtttcttcataatcctgtacttttcttgtg

SEQ ID NO: 216817 - DNA, 1908 bp, Zea Mays
ctggtttctgccaacgtctctgctccagcctccaagtgctccagccagcaggtagcagccagcaggttcctgctgtactttttactgaattactgcaaccaagatactatagtgacttcactcgttcttgcaacggaagcagcaaaggttatttgtgcaatcattttattgattgcagacggtagtctgaaaaaacagttcagtaattggaccctcattggatcactgactgcgtctggactgcctgctgctatctatgcccttcagaatagtctgctgcaagtatcattcaagaatctggattccttgaccttttcaatccttaaccagactaagcttttgtggacatcatttttcacatttcttattttggggcaaaagcaatcatccaagcaaattttagcattggccctcttaattagtgccgctgttcttttaagtgttggggagagtactagcaaaggttcaaatggtggtggctctgactatatcttgctatatgggatcattccggttacagtcgcttctatgctgtctggtttggcctcttcattatgtcagtgggcatctcaggttaaaaagcatacctcttacatgatgactatagaaatgtcatttattggaagtgtgtgcttgttagcaagtacctatcggtcaccagatggagaagccataaggaaatatggggttttccatgaatggactttctggaccatggtaccggtattaatgaatgccgtgggtggaattcttgttggtcttgtcacaacttacgcaggtggtattagaaagggttttgttatagtctcagctctccttgtaactgcactgctacaattcgtgtatgatgggaagccaccatcactctactgcctgatggcattaccacttgttgcgacaagcatattcatctaccagaagtatccatatgtggataagaagaagaaagtctgatgcacataattgtcagagatgggaagtatcatcagcaggatgtaatgctaaccttattttgtccacaaggctggaatttgcaccgtcaagtgggccagatgtgactcttgaagagttgcctgttcgtgaatctattttcaattatctactgatctagatatataattaaattagcagtacagtagcctggaatcagtttcagcaggcagttgacatgcttgcatgtaacatctggaaggaggtttcatattaatggtgtttacttgcacagcatgatgaacctactgtgtctgcctttcatggattgttatttatagactgatttgtgaattttgaatatgttatttatgatgacagaaactaagaactaattattttgcgtcaatccttctcattcggaatctgcactatgttagttgtcatattttatcctgcaatgactcgtctaattcagatggttttgcttctcaattgtgattgctgtggttcccactaggccagggcaaagcaacatgtgcagtgctcgctgtcccagcccagcttatggtgtagagagtcgccatgcgattgcttaattatctatgttgtcttcggttatatgtctggtagtttttctacgtatcataagatggggaatccttgtaaatcatttatgttacctctagtaaatctcattgtttgccatcctaaacgtccattgtctttcatatctcctgattaattcaccatggtgcattgtgaaaaagtttcaggtaacttctttattgaggcaaaggagcagaaggtaagagtggcacacaatctcactgccaagatgttccctttgagtcctcgttgtcacagataaaaggttaccgtgcaactgaactcacaatgactgagagagttgactccagttcatcatcgtatttgattgctgatgcctgtccaaataactcctactcgaaatgtcag

SEQ ID NO: 216818 - DNA, 1592 bp, Zea Mays
aataagctctcaagtatgatgactgaagagtcatataagcaaagaaaagtacaagaggtcttcgagaaatcggatgatatggacgatcagttacactaatcgagtccaacaccctaatcgagcacagagaaacaatcagcccgactaatcgcgattagtcagccgatctgaaaacaatgagcccctgtatccaaacaagcccggtatacagtctatgtaataactttgtcaaattacagaaagcttatacctttatcttttgtactactatcaaagaaacatgccctgtcgttcattgatcatacaaaagtcttaagtatcgagtatcgacttaaaattatgtgcactcaccactattcaacttgacagtgaatttcttagtgcattgtctatagattatagtgaagtatgtggtctagtgagccatactttttgcttggttgtagccatttttgtttatggtctatagacctttatctttttgtttgttccttttctgaatggctggtagttaatgtaatttttgaccttctctattaacatatagcaagttagcagcagtacgtcaaggaagcactttttgcgtgtaatcactttaatttcagatagccatgcatgtttctccgccaagatttaacagctaaccttttgcttcagcgatgcacatacttttggtctcatcaaagtccatgaaccctatccttttggggtggacccaagctggcgtggaagtcggtctgagctaccctttctaaattcattaaagatgaagatgtctatactaatgggtgttgcccagatgaacctggggattgtattgagttattttgatgcacgatatcatggaaatgctcttgacataagatcttggagaaaatcaactgttctggggccaaaaggaacttcagatattgttgttacttctggctttgatcgctgttccatggatgctcttcccaaaaccttttatcttgaagaaacttcataaggaggtaatgatttggaaaatgttcttgaaaaatatatcaggctctggtatgactgaagagtcatataagcaaagaaaagtacaagaggtcttcgagaaatatataccaggctcataataaaggtaaacagagcagttcaatgggctgcttcattgggccaaacataaatataatgcatttgtgagaccttattatctgccaaactacatgaaaattcctctgaactcatgtatctcattggatttaagcttatattttgaagttgcatagtgatcaatttctactctggatcaaaacctgatacatagtgctcattatgttttatagtgcctttaatgttttacattgtctagttgattcatgtctatagcataaattatatgacacaagagatctttaaactttcaagtaacataaacaaaaatcagcagtgtcaaacatgtgaattagcatagagcgcaaaatgaaaacttgggagaagaatcatgtcttgcttataatggatctcagcttcttggagctgttgtttaagagttgttacttgtagttccagctcacgctgctgcgacgatcccctaaatacttcctgaaagtgctccattg

SEQ ID NO: 216819 - DNA, 4151 bp, Zea Mays
aaggatagggttcatggactttgatgagaccaaaagtatgtgcatcgctgaagcaaaaggttagctgttaaatcttggcggagaaacatgcatggctatctgaaattaaagtgattacacgcaaaaagtgcttccttgacgtactgctgctaacttgctatatgttaatagagaaggtcaaaaattacattaactaccagccattcagaaaaggaacaaacaaaaagataaaggtctatagaccataaacaaaaatggctacaaccaagcaaaaagtatggctcactagaccacatacttcactataatctatagacaatgcactaagaaattcactgtcaagttgaatagtggtgagtgcacataattttaagtcgatactcgatacttaagacttttgtatgatcaatgaacgacagggcatgtttctttgatagtagtacaaaagataaaggtataagctttctgtaatttgacaaagttattacatagactgtataccgggcttgtttggatacaggggctcattgttttcagatcggctgactaatcgcgattagtcgggctgattgtttctctgtgctcgattagggtgttggactcgattagtgtaactgatcgtccatatcatccgatttctcgaagacctcttgtacttttctttgcttatatgactcttcagtcatcatacttgagagcttattgtgttctgaaaatgaaaagtgatgtgactaggatatatccaaatgtcactctctcccttaccagagatttaggactctggtaattattttatgaaaccatacgcaatatgccttactgccatgatgactttctttatccctttgggtttctctctgaaattatgtcctggttgtgaaacaagaaaatgcagacataccgtttcttgttactactaacaccagctggtatgttctttcaaaaaaaagtggtacatagttttactttgaaaagtgagctgcacaatcattattgtaaataggacatatagaagagaacgaaaaacagctctgaaattcaccatgccacgccacacttcgcgcgccgcagttgtggcggccgaatcggccgcgacaccttaggcggggtgtggtgctggacgtcagcgtccaaacaggccctcagtcagtcattgatgtgcaccattttgatggcataagtgatttgtttatgtcttgcatcatagtactataaatctgattcttagaattcagtcatatatcagtcatcatggcctcatatgttctcaacggaagccatttaggagcaacagtaagaaccattgcaattggttcattatgtagtacttgaaatccacgatttctattatgaaaaaatacagccaaatttgagggatagttacacatcgaggctttttgaacgctactcttctggcttcctcctggtatgcccctatccacttcctccattccgcctttcagaggaaagcatttgccttttggccctttgattattgtgtggtttcaaattaatttattcattcatagcttcctaggtcgaaggtaaatagaaagtcgttggtttttgttaaacctggattgttatggctatcgatgttacttggacctctggtactaggctcctcatattccgctcactagatttctgatgttgattcaatttccttccattcaataaaatccatgtgtgtgattgttgtcctatgttaatttgaggccaaggaagtgaatgggtgaaaatgattttgtctattatcacatgatttggttttttacagcatactcttatagcccacctgtaattcatcagcatggattgattatgtgcctctctattttgttgtatcagttatgaagtttaaataaacattgaatccatgttcttgcacactttttgtaatgttcaaccaaaaaatctgcttcaaatatgttcagcaagacagaagttaataggttacattcagctttttcagttggtaatgttcacaacaacaaaaaggatgtattcagttttttcagtccttttctgttcagttcttaaccacttgtagttgcctatttggtaatgtttaagttcccatgaccgatctggcagtgcagttaaatttatgggttcttttagagccatggattagattaatgtacgttgtccacaaactcttaacaccgacaaactatccttcaagaggcgctaggcaaggagatcaaggtagaggatatggatgcgtatgcccctaaagatcttttggttgtcactacaggttcacaaggagagccacgtgcagctttgaatcttgcatcttatgggggaagtcacactcttaaactatcaaaagaggatgtccttctttattcagctaaggttattcctggaaatgagacacgggtaatgaagatgatgaatcgtctcactgatcttggcccaaaaattatcatgggtaaagattctggcctgcatacctctgggcatgcctaccgagaggagctggaggaagttcttcggattgttaaaccacaacatttcttgcctgttcatggagaactcctatttctcaaagaacatgaatcacttggaagatcaactggcatacggcacacaactgtaataaaaaatggagaaatgcttggtgtatcgcatctaagaaacagaagagttttgtccaatgggtttgtttcattagggaaggaggatctttaggtgaaccatttattttacacgtcgtttttttatgtcttttgcagttatgatatctaacatgatatatgatattacagctcatgtatagtgatggtgataaggcttttggtacatccactgatctctgcattgacgagagactaagaatcgcatctgatggcattatttttgtcaagtagcttcttgtacagttttggagtattttctaggtttatcttcagcaaaaatttctcctcgcatgtgaaatgatagtgatttatgtcgaaccttgtgatagtcaaaatggtaaaccatatatagtattgttcggtgcacctaaacattttacatgttactcctttgcagcatggagatcttccgacctcagaaggaacatggtttagcgcagactggtttgaaaggaaaatttaagattactacaagatgtctatggcttgataatggaagattgttggacgcactctacaaagcagctcatgctgcattgttaagttgtcctatgaattgtccacttagtcacatggagaggatggtagctgaaatcttgaggaaaatggtacggaagtatagtgagaagaggcctgatgtcattgcggttgctatggagaacaccacagcaagtttctcagaacacctcgatgctaaatcatctggaaattttgaaccttcctcagctactagccatctgagcaggagtccagctatgagtcttgaaggcagttataaaacacacccagacaacccagaggtggatgctgaagaagcccttcctgaggccacgagaacagcactggatgatgcaaccacactgttatgcatctatcatgcataatggataatatccgatgttatgtttctttcaccagtggaaatttgctcatgttacattcagtaagccggaatacctccaagatttagatattgtaatgaacagattccataaacagagacctgtttatggaggttgggaacaacaccttggattggagcatacaaccactaccccaaaaaggtcctacttaggcaacaaccagaaccaccattcttttgagaagcctatgaagatttacaactaaagctgggaatactttttacaagtgatgaatggatatgaaggcagccttgttccaaaagcagtcttttggtgatgtacatagagcttttgcatagagtagtttatgtggcagttatctcaagaattttcatctggtggatgtacagggttcgtatagcaacatttccttgtagaaagttgaagttgtatatcgagggtggatttacctgtgtttatcttttcgaccctaagcctctgggaagctgtgaaccatagcctcatgaaatatgcctgttgttgattcagtgtttgtgtttttcttgtttgtcattattttgtactcgcttttaatataacacacattttgtatataagttactgtggtattatatgttct

SEQ ID NO: 216820 - DNA, 4089 bp, Zea Mays
aaggatagggttcatggactttgatgagaccaaaagtatgtgcatcgctgaagcaaaaggttagctgttaaatcttggcggagaaacatgcatggctatctgaaattaaagtgattacacgcaaaaagtgcttccttgacgtactgctgctaacttgctatatgttaatagagaaggtcaaaaattacattaactaccagccattcagaaaaggaacaaacaaaaagataaaggtctatagaccataaacaaaaatggctacaaccaagcaaaaagtatggctcactagaccacatacttcactataatctatagacaatgcactaagaaattcactgtcaagttgaatagtggtgagtgcacataattttaagtcgatactcgatacttaagacttttgtatgatcaatgaacgacagggcatgtttctttgatagtagtacaaaagataaaggtataagctttctgtaatttgacaaagttattacatagactgtataccgggcttgtttggatacaggggctcattgttttcagatcggctgactaatcgcgattagtcgggctgattgtttctctgtgctcgattagggtgttggactcgattagtgtaactgatcgtccatatcatccgatttctcgaagacctcttgtacttttctttgcttatatgactcttcagtcatcatacttgagagcttattgtgttctgaaaatgaaaagtgatgtgactaggatatatccaaatgtcactctctcccttaccagagatttaggactctggtaattattttatgaaaccatacgcaatatgccttactgccatgatgactttctttatccctttgggtttctctctgaaattatgtcctggttgtgaaacaagaaaatgcagacataccgtttcttgttactactaacaccagctggtatgttctttcaaaaaaaagtggtacatagttttactttgaaaagtgagctgcacaatcattattgtaaataggacatatagaagagaacgaaaaacagctctgaaattcaccatgccacgccacacttcgcgcgccgcagttgtggcggccgaatcggccgcgacaccttaggcggggtgtggtgctggacgtcagcgtccaaacaggccctcagtcagtcattgatgtgcaccattttgatggcataagtgatttgtttatgtcttgcatcatagtactataaatctgattcttagaattcagtcatatatcagtcatcatggcctcatatgttctcaacggaagccatttaggagcaacagtaagaaccattgcaattggttcattatgtagtacttgaaatccacgatttctattatgaaaaaatacagccaaatttgagggatagttacacatcgaggctttttgaacgctactcttctggcttcctcctggtatgcccctatccacttcctccattccgcctttcagaggaaagcatttgccttttggccctttgattattgtgtggtttcaaattaatttattcattcatagcttcctaggtcgaaggtaaatagaaagtcgttggtttttgttaaacctggattgttatggctatcgatgttacttggacctctggtactaggctcctcatattccgctcactagatttctgatgttgattcaatttccttccattcaataaaatccatgtgtgtgattgttgtcctatgttaatttgaggccaaggaagtgaatgggtgaaaatgattttgtctattatcacatgatttggttttttacagcatactcttatagcccacctgtaattcatcagcatggattgattatgtgcctctctattttgttgtatcagttatgaagtttaaataaacattgaatccatgttcttgcacactttttgtaatgttcaaccaaaaaatctgcttcaaatatgttcagcaagacagaagttaataggttacattcagctttttcagttggtaatgttcacaacaacaaaaaggatgtattcagttttttcagtccttttctgttcagttcttaaccacttgtagttgcctatttggtaatgtttaagttcccatgaccgatctggcagtgcagttaaatttatgggttcttttagagccatggattagattaatgtacgttgtccacaaactcttaacaccgacaaactatccttcaagaggcgctaggcaaggaggtgagtaatacctattacctcgtgctccatccaaatcccaaaagtgtaactcctctacagctagcaccaacacatgattgttttgtgcaaatgtttaggtgtgttaaatgattatgagcaatagtctgatttgatggttgagttattttcagatattaagatagtttaccttttaacgttatcaacacattgatatgctacatgatctctgtccgtgcaatcttttgatatgttacagaatgcactattcctaattgcttagttgaagcatcctgcagatcaaggtagaggatatggatgcgtatgcccctaaagatcttttggttgtcactacaggttcacaaggagagccacgtgcagctttgaatcttgcatcttatgggggaagtcacactcttaaactatcaaaagaggatgtccttctttattcagctaaggttattcctggaaatgagacacgggtaatgaagatgatgaatcgtctcactgatcttggcccaaaaattatcatgggtaaagattctggcctgcatacctctgggcatgcctaccgagaggagctggaggaagttcttcggattgttaaaccacaacatttcttgcctgttcatggagaactcctatttctcaaagaacatgaatcacttggaagatcaactggcatacggcacacaactgtaataaaaaatggagaaatgcttggtgtatcgcatctaagaaacagaagagttttgtccaatgggtttgtttcattagggaaggaggatctttagcatggagatcttccgacctcagaaggaacatggtttagcgcagactggtttgaaaggaaaatttaagattactacaagatgtctatggcttgataatggaagattgttggacgcactctacaaagcagctcatgctgcattgttaagttgtcctatgaattgtccacttagtcacatggagaggatggtagctgaaatcttgaggaaaatggtacggaagtatagtgagaagaggcctgatgtcattgcggttgctatggagaacaccacagcaagtttctcagaacacctcgatgctaaatcatctggaaattttgaaccttcctcagctactagccatctgagcaggagtccagctatgagtcttgaaggcagttataaaacacacccagacaacccagaggtggatgctgaagaagcccttcctgaggccacgagaacagcactggatgatgcaaccacactgttatgcatctatcatgcataatggataatatccgatgttatgtttctttcaccagtggaaatttgctcatgttacattcagtaagccggaatacctccaagatttagatattgtaatgaacagattccatagacctgtttatggaggttgggaacaacaccttggattggagcatacaaccactaccccaaaaaggtcctacttaggcaacaaccagagcaattacagaaccaccattcttttgagaagcctatgaagatttacaactaaagctgggaatactttttacaagtgatgaatggatatgaaggcagccttgttccaaaagcagtcttttggtgatgtacatagagcttttgcatagagtagtttatgtggcagttatctcaagaattttcatctggtggatgtacagggttcgtatagcaacatttccttgtagaaagttgaagttgtatatcgagggtggatttacctgtgtttatcttttcgaccctaagcctctgggaagctgtgaaccatagcctcatgaaatatgcctgttgttgattcagtgtttgtgtttttcttgtttgtcattattttgtactcgcttttaatataacacacattttgtatataagttactgtggtattatatgttct

SEQ ID NO: 216821 - DNA, 4465 bp, Zea Mays
cagaccgacttccacgccagcttgggtccaccccaaaaggatagggttcatggactttgatgagaccaaaagtatgtgcatcgctgaagcaaaaggttagctgttaaatcttggcggagaaacatgcatggctatctgaaattaaagtgattacacgcaaaaagtgcttccttgacgtactgctgctaacttgctatatgttaatagagaaggtcaaaaattacattaactaccagccattcagaaaaggaacaaacaaaaagataaaggtctatagaccataaacaaaaatggctacaaccaagcaaaaagtatggctcactagaccacatacttcactataatctatagacaatgcactaagaaattcactgtcaagttgaatagtggtgagtgcacataattttaagtcgatactcgatacttaagacttttgtatgatcaatgaacgacagggcatgtttctttgatagtagtacaaaagataaaggtataagctttctgtaatttgacaaagttattacatagactgtataccgggcttgtttggatacaggggctcattgttttcagatcggctgactaatcgcgattagtcgggctgattgtttctctgtgctcgattagggtgttggactcgattagtgtaactgatcgtccatatcatccgatttctcgaagacctcttgtacttttctttgcttatatgactcttcagtcatcatacttgagagcttattgtgttctgaaaatgaaaagtgatgtgactaggatatatccaaatgtcactctctcccttaccagagatttaggactctggtaattattttatgaaaccatacgcaatatgccttactgccatgatgactttctttatccctttgggtttctctctgaaattatgtcctggttgtgaaacaagaaaatgcagacataccgtttcttgttactactaacaccagctggtatgttctttcaaaaaaaagtggtacatagttttactttgaaaagtgagctgcacaatcattattgtaaataggacatatagaagagaacgaaaaacagctctgaaattcaccatgccacgccacacttcgcgcgccgcagttgtggcggccgaatcggccgcgacaccttaggcggggtgtggtgctggacgtcagcgtccaaacaggccctcagtcagtcattgatgtgcaccattttgatggcataagtgatttgtttatgtcttgcatcatagtactataaatctgattcttagaattcagtcatatatcagtcatcatggcctcatatgttctcaacggaagccatttaggagcaacagtaagaaccattgcaattggttcattatgtagtacttgaaatccacgatttctattatgaaaaaatacagccaaatttgagggatagttacacatcgaggctttttgaacgctactcttctggcttcctcctggtatgcccctatccacttcctccattccgcctttcagaggaaagcatttgccttttggccctttgattattgtgtggtttcaaattaatttattcattcatagcttcctaggtcgaaggtaaatagaaagtcgttggtttttgttaaacctggattgttatggctatcgatgttacttggacctctggtactaggctcctcatattccgctcactagatttctgatgttgattcaatttccttccattcaataaaatccatgtgtgtgattgttgtcctatgttaatttgaggccaaggaagtgaatgggtgaaaatgattttgtctattatcacatgatttggttttttacagcatactcttatagcccacctgtaattcatcagcatggattgattatgtgcctctctattttgttgtatcagttatgaagtttaaataaacattgaatccatgttcttgcacactttttgtaatgttcaaccaaaaaatctgcttcaaatatgttcagcaagacagaagttaataggttacattcagctttttcagttggtaatgttcacaacaacaaaaaggatgtattcagttttttcagtccttttctgttcagttcttaaccacttgtagttgcctatttggtaatgtttaagttcccatgaccgatctggcagtgcagttaaatttatgggttcttttagagccatggattagattaatgtacgttgtccacaaactcttaacaccgacaaactatccttcaagaggcgctaggcaaggaggtgagtaatacctattacctcgtgctccatccaaatcccaaaagtgtaactcctctacagctagcaccaacacatgattgttttgtgcaaatgtttaggtgtgttaaatgattatgagcaatagtctgatttgatggttgagttattttcagatattaagatagtttaccttttaacgttatcaacacattgatatgctacatgatctctgtccgtgcaatcttttgatatgttacagaatgcactattcctaattgcttagttgaagcatcctgcagatcaaggtagaggatatggatgcgtatgcccctaaagatcttttggttgtcactacaggttcacaaggagagccacgtgcagctttgaatcttgcatcttatgggggaagtcacactcttaaactatcaaaagaggatgtccttctttattcagctaaggttattcctggaaatgagacacgggtaatgaagatgatgaatcgtctcactgatcttggcccaaaaattatcatgggtaaagattctggcctgcatacctctgggcatgcctaccgagaggagctggaggaagttcttcggattgttaaaccacaacatttcttgcctgttcatggagaactcctatttctcaaagaacatgaatcacttggaagatcaactggcatacggcacacaactgtaataaaaaatggagaaatgcttggtgtatcgcatctaagaaacagaagagttttgtccaatgggtttgtttcattagggaaggaggatctttaggtgaaccatttattttacacgtcgtttttttatgtcttttgcagttatgatatctaacatgatatatgatattacagctcatgtatagtgatggtgataaggcttttggtacatccactgatctctgcattgacgagagactaagaatcgcatctgatggcattatttttgtcaagtagcttcttgtacagttttggagtattttctaggtttatcttcagcaaaaatttctcctcgcatgtgaaatgatagtgatttatgtcgaaccttgtgatagtcaaaatggtaaaccatatatagtattgttcggtgcacctaaacattttacatgttactcctttgcagcatggagatcttccgacctcagaaggaacatggtttagcgcagactggtttgaaaggaaaatttaagattactacaagatgtctatggcttgataatggaagattgttggacgcactctacaaagcagctcatgctgcattgttaagttgtcctatgaattgtccacttagtcacatggagaggatggtagctgaaatcttgaggaaaatggtacggaagtatagtgagaagaggcctgatgtcattgcggttgctatggagaacaccacagcaagtttctcagaacacctcgatgctaaatcatctggaaattttgaaccttcctcagctactagccatctgagcaggagtccagctatgagtcttgaaggcagttataaaacacacccagacaacccagaggtggatgctgaagaagcccttcctgaggccacgagaacagcactggatgatgcaaccacactgttatgcatctatcatgcataatggataatatccgatgttatgtttctttcaccagtggaaatttgctcatgttacattcagtaagccggaatacctccaagatttagatattgtaatgaacagattccataaacagagacctgtttatggaggttgggaacaacaccttggattggagcatacaaccactaccccaaaaaggtcctacttaggcaacaaccagaaccaccattcttttgagaagcctatgaagatttacaactaaagctgggaatactttttacaagtgatgaatggatatgaaggcagccttgttccaaaagcagtcttttggtgatgtacatagagcttttgcatagagtagtttatgtggcagttatctcaagaattttcatctggtggatgtacagggttcgtatagcaacatttccttgtagaaagttgaagttgtatatcgagggtggatttacctgtgtttatcttttcgaccctaagcctctgggaagctgtgaaccatagcctcatgaaatatgcctgttgttgattcagtgtttgtgtttttcttgtttgtcattattttgtactcgcttttaatataacacacattttgtatataagttactgtggtattatatgttct

SEQ ID NO: 216822 - DNA, 4133 bp, Zea Mays
ctcagaccgacttccacgccagcttgggtccaccccaaaaggatagggttcatggactttgatgagaccaaaagtatgtgcatcgctgaagcaaaaggttagctgttaaatcttggcggagaaacatgcatggctatctgaaattaaagtgattacacgcaaaaagtgcttccttgacgtactgctgctaacttgctatatgttaatagagaaggtcaaaaattacattaactaccagccattcagaaaaggaacaaacaaaaagataaaggtctatagaccataaacaaaaatggctacaaccaagcaaaaagtatggctcactagaccacatacttcactataatctatagacaatgcactaagaaattcactgtcaagttgaatagtggtgagtgcacataattttaagtcgatactcgatacttaagacttttgtatgatcaatgaacgacagggcatgtttctttgatagtagtacaaaagataaaggtataagctttctgtaatttgacaaagttattacatagactgtataccgggcttgtttggatacaggggctcattgttttcagatcggctgactaatcgcgattagtcgggctgattgtttctctgtgctcgattagggtgttggactcgattagtgtaactgatcgtccatatcatccgatttctcgaagacctcttgtacttttctttgcttatatgactcttcagtcatcatacttgagagcttattgtgttctgaaaatgaaaagtgatgtgactaggatatatccaaatgtcactctctcccttaccagagatttaggactctggtaattattttatgaaaccatacgcaatatgccttactgccatgatgactttctttatccctttgggtttctctctgaaattatgtcctggttgtgaaacaagaaaatgcagacataccgtttcttgttactactaacaccagctggtatgttctttcaaaaaaaagtggtacatagttttactttgaaaagtgagctgcacaatcattattgtaaataggacatatagaagagaacgaaaaacagctctgaaattcaccatgccacgccacacttcgcgcgccgcagttgtggcggccgaatcggccgcgacaccttaggcggggtgtggtgctggacgtcagcgtccaaacaggccctcagtcagtcattgatgtgcaccattttgatggcataagtgatttgtttatgtcttgcatcatagtactataaatctgattcttagaattcagtcatatatcagtcatcatggcctcatatgttctcaacggaagccatttaggagcaacagtaagaaccattgcaattggttcattatgtagtacttgaaatccacgatttctattatgaaaaaatacagccaaatttgagggatagttacacatcgaggctttttgaacgctactcttctggcttcctcctggtatgcccctatccacttcctccattccgcctttcagaggaaagcatttgccttttggccctttgattattgtgtggtttcaaattaatttattcattcatagcttcctaggtcgaaggtaaatagaaagtcgttggtttttgttaaacctggattgttatggctatcgatgttacttggacctctggtactaggctcctcatattccgctcactagatttctgatgttgattcaatttccttccattcaataaaatccatgtgtgtgattgttgtcctatgttaatttgaggccaaggaagtgaatgggtgaaaatgattttgtctattatcacatgatttggttttttacagcatactcttatagcccacctgtaattcatcagcatggattgattatgtgcctctctattttgttgtatcagttatgaagtttaaataaacattgaatccatgttcttgcacactttttgtaatgttcaaccaaaaaatctgcttcaaatatgttcagcaagacagaagttaataggttacattcagctttttcagttggtaatgttcacaacaacaaaaaggatgtattcagttttttcagtccttttctgttcagttcttaaccacttgtagttgcctatttggtaatgtttaagttcccatgaccgatctggcagtgcagttaaatttatgggttcttttagagccatggattagattaatgtacgttgtccacaaactcttaacaccgacaaactatccttcaagaggcgctaggcaaggaggtgagtaatacctattacctcgtgctccatccaaatcccaaaagtgtaactcctctacagctagcaccaacacatgattgttttgtgcaaatgtttaggtgtgttaaatgattatgagcaatagtctgatttgatggttgagttattttcagatattaagatagtttaccttttaacgttatcaacacattgatatgctacatgatctctgtccgtgcaatcttttgatatgttacagaatgcactattcctaattgcttagttgaagcatcctgcagatcaaggtagaggatatggatgcgtatgcccctaaagatcttttggttgtcactacaggttcacaaggagagccacgtgcagctttgaatcttgcatcttatgggggaagtcacactcttaaactatcaaaagaggatgtccttctttattcagctaaggttattcctggaaatgagacacgggtaatgaagatgatgaatcgtctcactgatcttggcccaaaaattatcatgggtaaagattctggcctgcatacctctgggcatgcctaccgagaggagctggaggaagttcttcggattgttaaaccacaacatttcttgcctgttcatggagaactcctatttctcaaagaacatgaatcacttggaagatcaactggcatacggcacacaactgtaataaaaaatggagaaatgcttggtgtatcgcatctaagaaacagaagagttttgtccaatgggtttgtttcattagggaaggaggatctttagcatggagatcttccgacctcagaaggaacatggtttagcgcagactggtttgaaaggaaaatttaagattactacaagatgtctatggcttgataatggaagattgttggacgcactctacaaagcagctcatgctgcattgttaagttgtcctatgaattgtccacttagtcacatggagaggatggtagctgaaatcttgaggaaaatggtacggaagtatagtgagaagaggcctgatgtcattgcggttgctatggagaacaccacagcaagtttctcagaacacctcgatgctaaatcatctggaaattttgaaccttcctcagctactagccatctgagcaggagtccagctatgagtcttgaaggcagttataaaacacacccagacaacccagaggtggatgctgaagaagcccttcctgaggccacgagaacagcactggatgatgcaaccacactgttatgcatctatcatgcataatggataatatccgatgttatgtttctttcaccagtggaaatttgctcatgttacattcagtaagccggaatacctccaagatttagatattgtaatgaacagattccataaacagagacctgtttatggaggttgggaacaacaccttggattggagcatacaaccactaccccaaaaaggtcctacttaggcaacaaccagagcaattacagaaccaccattcttttgagaagcctatgaagatttacaactaaagctgggaatactttttacaagtgatgaatggatatgaaggcagccttgttccaaaagcagtcttttggtgatgtacatagagcttttgcatagagtagtttatgtggcagttatctcaagaattttcatctggtggatgtacagggttcgtatagcaacatttccttgtagaaagttgaagttgtatatcgagggtggatttacctgtgtttatcttttcgaccctaagcctctgggaagctgtgaaccatagcctcatgaaatatgcctgttgttgattcagtgtttgtgtttttcttgtttgtcattattttgtactcgcttttaatataacacacattttgtatataagttactgtggtattatatgttct

SEQ ID NO: 216823 - DNA, 4334 bp, Zea Mays
atgaattgatacctgaagaatgtgcacagttaaagcactgcaatttctctctattttggctgtatcggaagagaagatacaaggaatatacaacaccttatgtcaagagcatttccatgatatcgtgcatcaaaataactcaatacaatccccaggttcatctgggcaacacccattagtatagacatcttcatctttaatgaatttagaaagggtagctcagaccgacttccacgccagcttgggtccaccccaaaaggatagggttcatggactttgatgagaccaaaagtatgtgcatcgctgaagcaaaaggttagctgttaaatcttggcggagaaacatgcatggctatctgaaattaaagtgattacacgcaaaaagtgcttccttgacgtactgctgctaacttgctatatgttaatagagaaggtcaaaaattacattaactaccagccattcagaaaaggaacaaacaaaaagataaaggtctatagaccataaacaaaaatggctacaaccaagcaaaaagtatggctcactagaccacatacttcactataatctatagacaatgcactaagaaattcactgtcaagttgaatagtggtgagtgcacataattttaagtcgatactcgatacttaagacttttgtatgatcaatgaacgacagggcatgtttctttgatagtagtacaaaagataaaggtataagctttctgtaatttgacaaagttattacatagactgtataccgggcttgtttggatacaggggctcattgttttcagatcggctgactaatcgcgattagtcgggctgattgtttctctgtgctcgattagggtgttggactcgattagtgtaactgatcgtccatatcatccgatttctcgaagacctcttgtacttttctttgcttatatgactcttcagtcatcatacttgagagcttattgtgttctgaaaatgaaaagtgatgtgactaggatatatccaaatgtcactctctcccttaccagagatttaggactctggtaattattttatgaaaccatacgcaatatgccttactgccatgatgactttctttatccctttgggtttctctctgaaattatgtcctggttgtgaaacaagaaaatgcagacataccgtttcttgttactactaacaccagctggtatgttctttcaaaaaaaagtggtacatagttttactttgaaaagtgagctgcacaatcattattgtaaataggacatatagaagagaacgaaaaacagctctgaaattcaccatgccacgccacacttcgcgcgccgcagttgtggcggccgaatcggccgcgacaccttaggcggggtgtggtgctggacgtcagcgtccaaacaggccctcagtcagtcattgatgtgcaccattttgatggcataagtgatttgtttatgtcttgcatcatagtactataaatctgattcttagaattcagtcatatatcagtcatcatggcctcatatgttctcaacggaagccatttaggagcaacagtaagaaccattgcaattggttcattatgtagtacttgaaatccacgatttctattatgaaaaaatacagccaaatttgagggatagttacacatcgaggctttttgaacgctactcttctggcttcctcctggtatgcccctatccacttcctccattccgcctttcagaggaaagcatttgccttttggccctttgattattgtgtggtttcaaattaatttattcattcatagcttcctaggtcgaaggtaaatagaaagtcgttggtttttgttaaacctggattgttatggctatcgatgttacttggacctctggtactaggctcctcatattccgctcactagatttctgatgttgattcaatttccttccattcaataaaatccatgtgtgtgattgttgtcctatgttaatttgaggccaaggaagtgaatgggtgaaaatgattttgtctattatcacatgatttggttttttacagcatactcttatagcccacctgtaattcatcagcatggattgattatgtgcctctctattttgttgtatcagttatgaagtttaaataaacattgaatccatgttcttgcacactttttgtaatgttcaaccaaaaaatctgcttcaaatatgttcagcaagacagaagttaataggttacattcagctttttcagttggtaatgttcacaacaacaaaaaggatgtattcagttttttcagtccttttctgttcagttcttaaccacttgtagttgcctatttggtaatgtttaagttcccatgaccgatctggcagtgcagttaaatttatgggttcttttagagccatggattagattaatgtacgttgtccacaaactcttaacaccgacaaactatccttcaagaggcgctaggcaaggaggtgagtaatacctattacctcgtgctccatccaaatcccaaaagtgtaactcctctacagctagcaccaacacatgattgttttgtgcaaatgtttaggtgtgttaaatgattatgagcaatagtctgatttgatggttgagttattttcagatattaagatagtttaccttttaacgttatcaacacattgatatgctacatgatctctgtccgtgcaatcttttgatatgttacagaatgcactattcctaattgcttagttgaagcatcctgcagatcaaggtagaggatatggatgcgtatgcccctaaagatcttttggttgtcactacaggttcacaaggagagccacgtgcagctttgaatcttgcatcttatgggggaagtcacactcttaaactatcaaaagaggatgtccttctttattcagctaaggttattcctggaaatgagacacgggtaatgaagatgatgaatcgtctcactgatcttggcccaaaaattatcatgggtaaagattctggcctgcatacctctgggcatgcctaccgagaggagctggaggaagttcttcggattgttaaaccacaacatttcttgcctgttcatggagaactcctatttctcaaagaacatgaatcacttggaagatcaactggcatacggcacacaactgtaataaaaaatggagaaatgcttggtgtatcgcatctaagaaacagaagagttttgtccaatgggtttgtttcattagggaaggaggatctttagcatggagatcttccgacctcagaaggaacatggtttagcgcagactggtttgaaaggaaaatttaagattactacaagatgtctatggcttgataatggaagattgttggacgcactctacaaagcagctcatgctgcattgttaagttgtcctatgaattgtccacttagtcacatggagaggatggtagctgaaatcttgaggaaaatggtacggaagtatagtgagaagaggcctgatgtcattgcggttgctatggagaacaccacagcaagtttctcagaacacctcgatgctaaatcatctggaaattttgaaccttcctcagctactagccatctgagcaggagtccagctatgagtcttgaaggcagttataaaacacacccagacaacccagaggtggatgctgaagaagcccttcctgaggccacgagaacagcactggatgatgcaaccacactgttatgcatctatcatgcataatggataatatccgatgttatgtttctttcaccagtggaaatttgctcatgttacattcagtaagccggaatacctccaagatttagatattgtaatgaacagattccatagacctgtttatggaggttgggaacaacaccttggattggagcatacaaccactaccccaaaaaggtcctacttaggcaacaaccagaaccaccattcttttgagaagcctatgaagatttacaactaaagctgggaatactttttacaagtgatgaatggatatgaaggcagccttgttccaaaagcagtcttttggtgatgtacatagagcttttgcatagagtagtttatgtggcagttatctcaagaattttcatctggtggatgtacagggttcgtatagcaacatttccttgtagaaagttgaagttgtatatcgagggtggatttacctgtgtttatcttttcgaccctaagcctctgggaagctgtgaaccatagcctcatgaaatatgcctgttgttgattcagtgtttgtgtttttcttgtttgtcattattttgtactcgcttttaatataacacacattttgtatataagttactgtggtattatatgttct

SEQ ID NO: 216824 - DNA, 2849 bp, Zea Mays
ggaaggcctcgtttggcaagccgatccacagtccatcatcggttatttttggcaagccaaagaaagaacttgcagcggagaggagcccaactcctccaaattaatctccaaggtctgaacttgacagacccctcaaagaaagcagagtaggctgatttgctagtgtagcaaccggattgagtaaacttccacacatgctgatctggcccccctccaagggtcacaccctccaagacatcccaaatctgaagaatatgtatagaaaggcagctgcactttgggttgaactgcgtgttgaactcctatcagccattgaatattatgcagaagataaagtcaattcagctcaaatttggcggctatactgggcaagtcatcagcgtttctttaggcatatgtgtatgtctgcaaaggtacctgctgtcgtgagattggcaaaagaagccttagcagaagaaaaatgtgtggtgattggtcttcagagcactggagaagctcgaacagaggaagctgttgctaaatatggcattgaattggaagatttcgtttctggtcctagagagcttcttcttaagctggtagaagataattatcctttgcctccaaagcctgattgttttgagcaaggtgaagaaaaagtccaggagtttcagcacaagcggcattatggatctgacatgtccttaaaaggacgagttagtaaacttggaaaaaaggaagacgtgagtgaagatgggggtgatgagtatcctccacattcagatcatgaatcaacagaatctgatgaggacttctatatgtgtcagatttgcaacactgaagaggagaaaaactcattgttttgttgctgtatttgtgcttcacgggttcaccctggttgcctcactccaccttcgactgacatcgtgaatgatgattggtcatgttatggttgcaaggagaaagtaaaaagctacttaaaagaaagagatgcttacttgactgaactctcaaagaggtatgatgctgcattggacagaaagtcaaaaattcttgacataatccgttccttggatttacctagtaatcctttagatgatatcatcgatcagcttggtggtcctgacaatgttgcagaaataactggacgacgtggtatgctaataagagcatcagatggaaaaggtgttatttaccaggcgcgaaacacgaaagaagttgcattggacatgatcaatatgcatgaaaagcagcaattcatggatggagaaaagaatgttgccataatatcagaagcaggatcagctggcgtttctctacatgctgatcgaagggcaaaaaatcagaggagaagagtgcacataacactagagcttccttggagtgcagaccgtgcgattcagcagtttgggagaacccatcgttctaatcaaacttctgcacctgaatataggcttcttttcacaaaccttggtggtgaaaagcgatttgcatcaatcgtggcaaagagactggagtctcttggagctttaacgcaaggagatcgaagggctggaccatcacttagcgccttcaactatgacagtaattatggaaagaaagccctgacaatgatgtacagaggaataatggaacaggatgcctttcctgttgtgcctttcgaatgctctgagaatcaagctacccttgaagagttcatcactaaagcaaaagctgctttagtgtcagttggaattattagggaccctataatgtgcaatggtaaaaatggtggaaagcttactggtaggattattgattctgatatgcatgatgttgcccgtttccttaatcgtattctgggattgtttccagacattcagaatagattatttgaccttttcacaagcatacttgatatagtcattcagaatgcacgaattgaaggacaacttgattctggtattgttgatatcaaagctaaaagtgtcgaaatgaaagaatcaccaaagactgttcatgttgatactgtgtccggtgctagtacaatattatatacttttacagttgaccgtggagtttcttgggaggtaactttcatattgaagccattatctgtttctcctaagaacttgtgtgacatgaaatgtatttatatttcagttttgttctacattacctttttttctcgaaacgcaggagagctgtgcatcatattataaaagaggaaaattaggggaaaagaatcccttacaattgtagaacatgaaggtgcttgatatatttgatagatggggtacaatatatagactcacaaccctaaccctaatgggccggcagcccaacagtggtgccggcccacgcacacacacacaatctaacatctccccgcagtcgcaacgggggcaccacacatgatgagactagagtagaagcagaaggtaggagccaacgggttgaaatccccttgtagtcacaacgtcgtaagggtgcgaatgttgcggctggagtagagaccggtgtgtgctccaaggagacgatagcccgtagatgccaaggtagttgaagtcgaggtggccgcagtcgggagacacgtagcatgagcctgttcgttgggaggggtcgacgttcgagcgtcaacgaatggtgagggcgacacaacaaaagagcaccagcaacctcagagccttcttacttcgttccacgatcgatcgtcgaggagcctcgccagggaggccggcgacagcgcacgcatctgcgccagtcagggtgggtcgcgcccgcggcagaaaagaaggggtatcggcggatccggtcggaaaagccacgacagcgatggatccagccatgaagacgacgatctagacaaagggatggcggatctagtcggg

SEQ ID NO: 216825 - DNA, 2746 bp, Zea Mays
ccgtctgcgaggacgtgctacctggttgatcctgccagtagtcatatgcttgtctcaaagattaagccatgcatgtgcaagtatgaactaattcgaactgtgaaactgcgaatggctcattaaatcagttatagtttgtttgatgaatatgtatagaaaggcagctgcactttgggttgaactgcgtgttgaactcctatcagccattgaatattatgcagaagataaagtcaattcagctcaaatttggcggctatactgggcaagtcatcagcgtttctttaggcatatgtgtatgtctgcaaaggtacctgctgtcgtgagattggcaaaagaagccttagcagaagaaaaatgtgtggtgattggtcttcagagcactggagaagctcgaacagaggaagctgttgctaaatatggcattgaattggaagatttcgtttctggtcctagagagcttcttcttaagctggtagaagataattatcctttgcctccaaagcctgattgttttgagcaaggtgaagaaaaagtccaggagtttcagcacaagcggcattatggatctgacatgtccttaaaaggacgagttagtaaacttggaaaaaaggaagacgtgagtgaagatgggggtgatgagtatcctccaccagattcagatcatgaatcaacagaatctgatgaggacttctatatgtgtcagatttgcaacactgaagaggagaaaaactcattgttttgttgctgtatttgtgcttcacgggttcaccctggttgcctcactccaccttcgactgacatcgtgaatgatgattggtcatgttatggttgcaaggagaaagtaaaaagctacttaaaagaaagagatgcttacttgactgaactctcaaagaggtatgatgctgcattggacagaaagtcaaaaattcttgacataatccgttccttggatttacctagtaatcctttagatgatatcatcgatcagcttggtggtcctgacaatgttgcagaaataactggacgacgtggtatgctaataagagcatcagatggaaaaggtgttatttaccaggcgcgaaacacgaaagaagttgcattggacatgatcaatatgcatgaaaagcagcaattcatggatggagaaaagaatgttgccataatatcagaagcaggatcagctggcgtttctctacatgctgatcgaagggcaaaaaatcagaggagaagagtgcacataacactagagcttccttggagtgcagaccgtgcgattcagcagtttgggagaacccatcgttctaatcaaacttctgcacctgaatataggcttcttttcacaaaccttggtggtgaaaagcgatttgcatcaatcgtggcaaagagactggagtctcttggagctttaacgcaaggagatcgaagggctggaccatcacttagcgccttcaactatgacagtaattatggaaagaaagccctgacaatgatgtacagaggaataatggaacaggatgcctttcctgttgtgcctttcgaatgctctgagaatcaagctacccttgaagagttcatcactaaagcaaaagctgctttagtgtcagttggaattattagggaccctataatgtgcaatggtaaaaatggtggaaagcttactggtaggattattgattctgatatgcatgatgttgcccgtttccttaatcgtattctgggattgtttccagacattcagaatagattatttgaccttttcacaagcatacttgatatagtcattcagaatgcacgaattgaaggacaacttgattctggtattgttgatatcaaagctaaaagtgtcgaaatgaaagaatcaccaaagactgttcatgttgatactgtgtccggtgctagtacaatattatatacttttacagttgaccgtggagtttcttgggaggtaactttcatattgaagccattatctgtttctcctaagaacttgtgtgacatgaaatgtatttatatttcagttttgttctacattacctttttttctcgaaacgcaggagagctgtgcatcatattataaaagaggaaaattaggggaaaagaatcccttacaattgtagaacatgaaggtgcttgatatatttgatagatggggtacaatatatagactcacaaccctaaccctaatgggccggcagcccaacagtggtgccggcccacgcacacacacacaatctaacatctccccgcagtcgcaacgggggcaccacacatgatgagactagagtagaagcagaaggtaggagccaacgggttgaaatccccttgtagtcacaacgtcgtaagggtgcgaatgttgcggctggagtagagaccggtgtgtgctccaaggagacgatagcccgtagatgccaaggtagttgaagtcgaggtggccgcagtcgggagacacgtagcatgagcctgttcgttgggaggggtcgacgttcgagcgtcaacgaatggtgagggcgacacaacaaaagagcaccagcaacctcagagccttcttacttcgttccacgatcgatcgtcgaggagcctcgccagggaggccggcgacagcgcacgcatctgcgccagtcagggtgggtcgcgcccgcggcagaaaagaaggggtatcggcggatccggtcggaaaagccacgacagcgatggatccagccatgaagacgacgatctagacaaagggatggcggatctagtcggg

SEQ ID NO: 216826 - DNA, 4659 bp, Zea Mays
gttcaattacgttggattgtatccggaatcgtttcggctaatcaaaatttatataaattaaagaaacaatcccgttacgttccgcccaccaatcgcgaagatgctaatcttcgccggtcgccactcgcccgtctcggagctactgccgctggccaaccatttcacctgttgcggctctcgcccctccatcgaaatcgccatgccgcatggtcacgccgcagccgtggtggaccggctgctgcgcaggctggggtccgccgcttgccggctggaggtgcccccgaatatagacggggacctagcgcatgtgtggacaactctggcgaggttgcaagatatgctggttagcctggagatccgtccggagctgcaagaatggatgggggatatcaagcaggtcgcgtacgatgttgaggatctggtcgatgaattggaagaccacaatagcatggaatctcagatgagcggctgcgttgcagttggagaggaaacaagatggtgctgttcatgttcgtttctcatgcatagtacaagagcggacagaatgaagacaatcaaaagaaggttggactttttagtaaaagattctgtcatcttcagtttgatgcagtacccttttcctgatgttgagagatttgataatgaagcatttgatagagctgcagtcgttggaagagataatgacaaagcaaagataaaggacatgatcttgcaaagtttatggaatggataacagagtagttcctacaacattctacattcataactttgtccatgaatttgcaagacatgttgcttgtgatgatattataattttcgatggtaccaaaatgcaaaagggctgtgcaaaaagacaaaccttccaatatgcactcttgacatgttaccgggtgcagtcaacattttcccactcaacgctgacaaggacaagggcattgcatatcatgaactctgaggcgataacatttcctcgtgaagcatttgaattactgaagcacttgcgtgttttgaatcttagtggatgttgcattgaagaattaccagcctctataggttgtctaaagcgtctaaaatatcttgatgtttctggtgtgcagatacaaacattgccattcccggtgagtaggttgacaaaccttgaggtactggatctatcaaaaacatgtatgaaggaattaccctctttcattggtaatttacagaacctaaaatatttaaacatgcaaggttgtgataaacttcaaaacctacctttatcccttggtcatctacaacgacttgagcaacttcgactgtcatgctgcagatgcattgctatgctaccagactctttgtgcaaccttatcaatcttcgaattttggatttatcaagatgcactatgctgcgacacttacctgctttatttggtaacttagtgaacttggaggatctaagcctatctagttgtttcaaccttaagcagttaccagaatcttttggtaacctttattttcttaggttcctgaacctatcaagctgctatgaacttcagcagtttcctgaatctgttacaaacctcgagaaactggaagttcttatactccggagatgttgtagacttcgaattctccccccctcctttgcaatgattaagtaccttcgaattcttgatctggctggctgtgaagcacttcatgtaagtactgagatgctaacaaccaatttggagtatctgaacctacaacggtgcctaaatcttcagactcagccatactatttcgaaaacttcaataagttgaagtttttgaatctttcccattgcctccctaccgttgattgcctggaatctattagttacttgttcaacttagaatatctagatctgtcagaaacttcccttgacatacctatgtcttttgcaaggcttcagaagttgcacacactgaacctcactggttgtgctccaatgcatccatcctctaatgtacaccaaacatggccaggtatattagcaaaaattacaagtctcaagtctgtgctgacgatggacccagtattagcggcctctcttcaaggacacaccgagtgctctgctgactatgattatcactcactcacaacaaccgatgagcttgttattaaagagatcacaggcggttcccgaggccttcgtattgctgagcagttgaatctgcagaatcgactggaggtttgtttccttaagctggaatgggttcctaggtcccaatcagctcaagatcaactattggaatatacagatgaggaagtgctggagaagttccaaccaaatgagactctggagcattttatgctagttaaatatacaggcaatgtgtttcctacatggatgatgaacaaactgacttcactcccataccttgtcaatctttgtttgttccacctgcataactgcagtgctctccctccaattggccatctacaaaatctgcgttacttgcatattaaagatatgcccaacctcacaaatctagagatgggtctttctggggggcctgtgtccttggggaaattgactcacctcaaactggaagcactgaatttagaagagctgtctatactcttgtcagccaacaatgagagtccctgtttcatgtttcccaatcttgaggagttatctgttctatcatgctctaagcttgtcttcaaaccatctgtgcctaagtgtgcgaaatatgtaataaaagagagtaacatggttctgtcatgttggcagcctctggggccattctcatctccaccaatagaaaaagtagagataagtgggtgtgtgatgccttctggttggttgcaatggcttagatccatacagactcttgagaaagtagtgatagatggtgaagctctttcatcttttgagctccagaagatatatgcatttcaagaagcatctggtagtaagatttcaaaggaaactgtaagttcatctaggacaaatatgtcacgtgagttgaccactgagaacgtttatatgctgttaaatataggatggtgcccttaaagctattggtatcgacaactcaacaatcaaacatattccaaggtttaacaccacttctgaactctcagtggatactatttcatcctctaaagtaagcacaccatccaaggagatcccatcaactttacgccgtccggacaagtcaaaaatgcctgcactaatacctggagatggatctttaaacttaagccttaagcaggttcagaaggttactcataatttctcacctttatttgagttaggtgaagggggaacctgggcagtttacagggctgtattatcagataaccaggttgttatcatccggagagctaaaaagggccacgttcaagaggcaaaacatcttatggaagtgaagctccttacaaaaattaatcactggagtttggtgagattcttaggttttattgatgaaaaagatgagtgtattcggatcacagagtatgttccaaatggcactcttagggaacacctacatgaccaacgtaagagaatcctgaattttaatcaacgtatagtgattgcccttgatgttgctattgcattgacttatctccatttgtgttctggggacgctttaatctgttacaacttgaggacgtcaaacatcctactgacagagagctaccgagccaaagtgtgctgttctgaactgtcaaaaagtggtaatatcgtgctattaaagggaacagggggctacattgatccagagtacttggagacctcagagctcactgccaaatctgatgtctactcttttggaataatactcttagaaatcatatcttctcatgggccacaagactgggatgtattgatgaaccaccggcaaagcagtgttgtacaatgggctcttgagaaattctatgacgacctcatgaatgagatattggattaccgtatggaggatcgcgtggatggagatgtggtcagggacttgctcagcttagcgttgagttgtgtggtttcgcgtggcgctgatcgcccaagcatcgtagttgtcggggagcgactgtggaaaatatggcaagatcatcgaagaaacgtaggggaacagcacgagtaccaaggaagctgggcagaatttatcgaacaagagggaatcctgaggcatcacaagtgtgtgctcaagagaagttgggagccttcaacaacgcagcaggattggtctgtgtatgttaggcagattgaattagttcaagaagcttacgataccccatggggagaggaaattttttcggggtctgtttcattggacgatatcacagtatattctcggtagaaagcttcaatacgattatattactcctgttttctccgcggtattacatgtgtagattggaggacaataacctatttgttctatttctgtttcattggacgataaatcatagtgtctcctcggtatgaactcttgaaagtttcaactcgttgttttcctcactctatttattcagtgatattgctgttagaaaattacgcaatttcagtactaatttggtctagaaaatattaataatatattggtggcatcaggcttgcacgtgtgatcatagtgcaacagacatgaacatgatatcgtgtgatcatagtgcaaaagacatgaacatgatatcgatcgtaatgattttaatcacag

SEQ ID NO: 216827 - DNA, 5305 bp, Zea Mays
gttcaattacgttggattgtatccggaatcgtttcggctaatcaaaatttatataaattaaagaaacaatcccgttacgttccgcccaccaatcgcgaagatgctaatcttcgccggtcgccactcgcccgtctcggagctactgccgctggccaaccatttcacctgttgcggctctcgcccctccatcgaaatcgccatgccgcatggtcacgccgcagccgtggtggaccggctgctgcgcaggctggggtccgccgcttgccggctggaggtgcccccgaatatagacggggacctagcgcatgtgtggacaactctggcgaggttgcaagatatgctggttagcctggagatccgtccggagctgcaagaatggatgggggatatcaagcaggtcgcgtacgatgttgaggatctggtcgatgaattggaagaccacaatagcatggaatctcagatgagcggctgcgttgcagttggagaggaaacaagatggtgctgttcatgttcgtttctcatgcatagtacaagagcggacagaatgaagacaatcaaaagaaggttggactttttagtaaaagattctgtcatcttcagtttgatgcagtacccttttcctgatgttgagagatttgataatgaagcatttgatagagctgcagtcgttggaagagataatgacaaagcaaagataaaggacatgatcttgcaaagtaatgcacaaaagttctcaatcattcccattcttggcctcgtggggttggggaaaacaactcttgctagattaattttccttgaccagggagaaggttgggattttgatcttcgtatctggatatccttaaataggaaactaaacataaaaatgattgctagtgatataatctcgcaatgtaatcatagagaagaaaagcttttagatgttcgtacggacatggagatccaggaaaactttcagttgctaaagaggtgtttgcaagaggcactccatgaaaaacattgtctgattgtcttggatgacctttctagcacagataaaaaccagttggatgaattgaaggaaatgctgaagggtacaaatgagtctatcaaggttttagtgacgacctccagcgaaataactgcagaactactgcacaccattccaccgtacaagttgtgtcctttatctgaagacgacagttggaaaatattttctcaaaaggcttttgggaattgtgatggtgataacactgaccttaagaaaatcggaaaggaaatagtaaaaaggtgtgagggaataccattattgactcattctcttggtttagttgtacaaaatgaagtcacaaatgtgtggttagctgcaagggatgaagagatatggaaactagaaagaagagttgccactaaaatagaattgttttcaccattatatcaaatatacaatgacttctcctcaactattaaattgtgctttctatatttatccatatttcctaaagggtctacaatagataaggaaaaactgatccaacagtggattgcactcgagattattggatcaaaacatgactccttgcctccttatgtgaatggagagatgtgcatccaggactttttgtcaatatattttctccaagttcgagatacacactcagtttatggaatggataacagagtagttcctacaacattctacattcataactttgtccatgaatttgcaagacatgttgcttgtgatgatattataattttcgatggtaccaaaatgcaaaagggctgtgcaaaaagacaaaccttccaatatgcactcttgacatgttaccgggtgcagtcaacattttcccactcaacgctgacaaggacaagggcattgcatatcatgaactctgaggcgataacatttcctcgtgaagcatttgaattactgaagcacttgcgtgttttgaatcttagtggatgttgcattgaagaattaccagcctctataggttgtctaaagcgtctaaaatatcttgatgtttctggtgtgcagatacaaacattgccattcccggtgagtaggttgacaaaccttgagatgcattgctatgctaccagactctttgtgcaaccttatcaatcttcgaattttggatttatcaagatgcactatgctgcgacacttacctgctttatttggttcctgaacctatcaagctgctatgaacttcagcagtttcctgaatctgttacaaacctcgagaaactggaagttcttatactccggagatgttgtagacttcgaattctccccccctcctttgcaatgattaagtaccttcgaattcttgatctggctggctgtgaagcacttcatgtaagtactgagatgctaacaaccaatttggagtatctgaacctacaacggtgcctaaatcttcagactcagccatactatttcgaaaacttcaataagttgaagtttttgaatctttcccattgcctccctaccgttgattgcctggaatctattagttacttgttcaacttagaatatctagatctgtcagaaacttcccttgacatacctatgtcttttgcaaggcttcagaagttgcacacactgaacctcactggttgtgctccaatgcatccatcctctaatgtacaccaaacatggccaggtatattagcaaaaattacaagtctcaagtctgtgctgacgatggacccagtattagcggcctctcttcaaggacacaccgagtgctctgctgactatgattatcactcactcacaacaaccgatgagcttgttattaaagagatcacaggcggttcccgaggccttcgtattgctgagcagttgaatctgcagaatcgactggaggtttgtttccttaagctggaatgggttcctaggtcccaatcagctcaagatcaactattggaatatacagatgaggaagtgctggagaagttccaaccaaatgagactctggagcattttatgctagttaaatatacaggcaatgtgtttcctacatggatgatgaacaaactgacttcactcccataccttgtcaatctttgtttgttccacctgcataactgcagtgctctccctccaattggccatctacaaaatctgcgttacttgcatattaaagatatgcccaacctcacaaatctagagatgggtctttctggggggcctgtgtccttggggaaattgactcacctcaaactggaagcactgaatttagaagagctgtctatactcttgtcagccaacaatgagagtccctgtttcatgtttcccaatcttgaggagttatctgttctatcatgctctaagcttgtcttcaaaccatctgtgcctaagtgtgcgaaatatgtaataaaagagagtaacatggttctgtcatgttggcagcctctggggccattctcatctccaccaatagaaaaagtagagataagtgggtgtgtgatgccttctggttggttgcaatggcttagatccatacagactcttgagaaagtagtgatagatggtgaagctctttcatcttttgagctccagaagatatatgcatttcaagaagcatctggtagtaagatttcaaaggaaactgtaagttcatctaggacaaatatgtcacgtgagttgaccactgaggatggtgcccttaaagctattggtatcgacaactcaacaatcaaacatattccaaggtttaacaccacttctgaactctcagtggatactatttcatcctctaaagtaagcacaccatccaaggagatcccatcaactttacgccgtccggacaagtcaaaaatgcctgcactaatacctggagatggatctttaaacttaagccttaagcaggttcagaaggttactcataatttctcacctttatttgagttaggtgaagggggaacctgggcagtttacagggctgtattatcagataaccaggttgttatcatccggagagctaaaaagggccacgttcaagaggcaaaacatcttatggaagtgaagctccttacaaaaattaatcactggagtttggtgagattcttaggttttattgatgaaaaagatgagtgtattcggatcacagagtatgttccaaatggcactcttagggaacacctacatgaccaacgtaagagaatcctgaattttaatcaacgtatagtgattgcccttgatgttgctattgcattgacttatctccatttgtgttctggggacgctttaatctgttacaacttgaggacgtcaaacatcctactgacagagagctaccgagccaaagtgtgctgttctgaactgtcaaaaagtggtaatatcgtgctattaaagggaacagggggctacattgatccagagtacttggagacctcagagctcactgccaaatctgatgtctactcttttggaataatactcttagaaatcatatcttctcatgggccacaagactgggatgtattgatgaaccaccggcaaagcagtgttgtacaatgggctcttgagaaattctatgacgacctcatgaatgagatattggattaccgtatggaggatcgcgtggatggagatgtggtcagggacttgctcagcttagcgttgagttgtgtggtttcgcgtggcgctgatcgcccaagcatcgtagttgtcggggagcgactgtggaaaatatggcaagatcatcgaagaaacgtaggggaacagcacgagtaccaaggaagctgggcagaatttatcgaacaagagggaatcctgaggcatcacaagtgtgtgctcaagagaagttgggagccttcaacaacgcagcaggattggtctgtgtatgttaggcagattgaattagttcaagaagcttacgataccccatggggagaggaaattttttcggggtctgtttcattggacgatatcacagtatattctcggtagaaagcttcaatacgattatattactcctgttttctccgcggtattacatgtgtagattggaggacaataacctatttgttctatttctgtttcattggacgataaatcatagtgtctcctcggtatgaactcttgaaagtttcaactcgttgttttcctcactctatttattcagtgatattgctgttagaaaattacgcaatttcagtactaatttggtctagaaaatattaataatatattggtggcatcaggcttgcacgtgtgatcatagtgcaacagacatgaacatgatatcgtgtgatcatagtgcaaaagacatgaacatgatatcgatcgtaatgattttaatcacag

SEQ ID NO: 216828 - DNA, 4392 bp, Zea Mays
gttcaattacgttggattgtatccggaatcgtttcggctaatcaaaatttatataaattaaagaaacaatcccgttacgttccgcccaccaatcgcgaagatgctaatcttcgccggtcgccactcgcccgtctcggagctactgccgctggccaaccatttcacctgttgcggctctcgcccctccatcgaaatcgccatgccgcatggtcacgccgcagccgtggtggaccggctgctgcgcaggctggggtccgccgcttgccggctggaggtgcccccgaatatagacggggacctagcgcatgtgtggacaactctggcgaggttgcaagatatgctggttagcctggagatccgtccggagctgcaagaatggatgggggatatcaagcaggtcgcgtacgatgttgaggatctggtcgatgaattggaagaccacaatagcatggaatctcagatgagcggctgcgttgcagttggagaggaaacaagatggtgctgttcatgttcgtttctcatgcatagtacaagagcggacagaatgaagacaatcaaaagaaggtttatggaatggataacagagtagttcctacaacattctacattcataactttgtccatgaatttgcaagacatgttgcttgtgatgatattataattttcgatggtaccaaaatgcaaaagggctgtgcaaaaagacaaaccttccaatatgcactcttgacatgttaccgggtgcagtcaacattttcccactcaacgctgacaaggacaagggcattgcatatcatgaactctgaggcgataacatttcctcgtgaagcatttgaattactgaagcacttgcgtgttttgaatcttagtggatgttgcattgaagaattaccagcctctataggttgtctaaagcgtctaaaatatcttgatgtttctggtgtgcagatacaaacattgccattcccggtgagtaggttgacaaaccttgaggtactggatctatcaaaaacatgtatgaaggaattaccctctttcattggtaatttacagaacctaaaatatttaaacatgcaaggttgtgataaacttcaaaacctacctttatcccttggtcatctacaacgacttgagcaacttcgactgtcatgctgcagatgcattgctatgctaccagactctttgtgcaaccttatcaatcttcgaattttggatttatcaagatgcactatgctgcgacacttacctgctttatttggtaacttagtgaacttggaggatctaagcctatctagttgtttcaaccttaagcagttaccagaatcttttggtaacctttattttcttaggttcctgaacctatcaagctgctatgaacttcagcagtttcctgaatctgttacaaacctcgagaaactggaagttcttatactccggagatgttgtagacttcgaattctccccccctcctttgcaatgattaagtaccttcgaattcttgatctggctggctgtgaagcacttcatgtaagtactgagatgctaacaaccaatttggagtatctgaacctacaacggtgcctaaatcttcagactcagccatactatttcgaaaacttcaataagttgaagtttttgaatctttcccattgcctccctaccgttgattgcctggaatctattagttacttgttcaacttagaatatctagatctgtcagaaacttcccttgacatacctatgtcttttgcaaggcttcagaagttgcacacactgaacctcactggttgtgctccaatgcatccatcctctaatgtacaccaaacatggccaggtatattagcaaaaattacaagtctcaagtctgtgctgacgatggacccagtattagcggcctctcttcaaggacacaccgagtgctctgctgactatgattatcactcactcacaacaaccgatgagcttgttattaaagagatcacaggcggttcccgaggccttcgtattgctgagcagttgaatctgcagaatcgactggaggtttgtttccttaagctggaatgggttcctaggtcccaatcagctcaagatcaactattggaatatacagatgaggaagtgctggagaagttccaaccaaatgagactctggagcattttatgctagttaaatatacaggcaatgtgtttcctacatggatgatgaacaaactgacttcactcccataccttgtcaatctttgtttgttccacctgcataactgcagtgctctccctccaattggccatctacaaaatctgcgttacttgcatattaaagatatgcccaacctcacaaatctagagatgggtctttctggggggcctgtgtccttggggaaattgactcacctcaaactggaagcactgaatttagaagagctgtctatactcttgtcagccaacaatgagagtccctgtttcatgtttcccaatcttgaggagttatctgttctatcatgctctaagcttgtcttcaaaccatctgtgcctaagtgtgcgaaatatgtaataaaagagagtaacatggttctgtcatgttggcagcctctggggccattctcatctccaccaatagaaaaagtagagataagtgggtgtgtgatgccttctggttggttgcaatggcttagatccatacagactcttgagaaagtagtgatagatggtgaagctctttcatcttttgagctccagaagatatatgcatttcaagaagcatctggtagtaagatttcaaaggaaactgtaagttcatctaggacaaatatgtcacgtgagttgaccactgaggatggtgcccttaaagctattggtatcgacaactcaacaatcaaacatattccaaggtttaacaccacttctgaactctcagtggatactatttcatcctctaaagtaagcacaccatccaaggagatcccatcaactttacgccgtccggacaagtcaaaaatgcctgcactaatacctggagatggatctttaaacttaagccttaagcaggttcagaaggttactcataatttctcacctttatttgagttaggtgaagggggaacctgggcagtttacagggctgtattatcagataaccaggttgttatcatccggagagctaaaaagggccacgttcaagaggcaaaacatcttatggaagtgaagctccttacaaaaattaatcactggagtttggtgagattcttaggttttattgatgaaaaagatgagtgtattcggatcacagagtatgttccaaatggcactcttagggaacacctacatggggacgctttaatctgttacaacttgaggacgtcaaacatcctactgacagagagctaccgagccaaagtgtgctgttctgaactgtcaaaaagtggtaatatcgtgctattaaagggaacagggggctacattgatccagagtacttggagacctcagagctcactgccaaatctgatgtctactcttttggaataatactcttagaaatcatatcttctcatgggccacaagactgggatgtattgatgaaccaccggcaaagcagtgttgtacaatgggctcttgagaaattctatgacgacctcatgaatgagatattggattaccgtatggaggatcgcgtggatggagatgtggtcagggacttgctcagcttagcgttgagttgtgtggtttcgcgtggcgctgatcgcccaagcatcgtagttgtcggggagcgactgtggaaaatatggcaagatcatcgaagaaacgtaggggaacagcacgagtaccaaggaagctgggcagaatttatcgaacaagagggaatcctgaggcatcacaagtgtgtgctcaagagaagttgggagccttcaacaacgcagcaggattggtctgtgtatgttaggcagattgaattagttcaagaagcttacgataccccatggggagaggaaattttttcggggtctgtttcattggacgatatcacagtatattctcggtagaaagcttcaatacgattatattactcctgttttctccgcggtattacatgtgtagattggaggacaataacctatttgttctatttctgtttcattggacgataaatcatagtgtctcctcggtatgaactcttgaaagtttcaactcgttgttttcctcactctatttattcagtgatattgctgttagaaaattacgcaatttcagtactaatttggtctagaaaatattaataatatattggtggcatcaggcttgcacgtgtgatcatagtgcaacagacatgaacatgatatcgtgtgatcatagtgcaaaagacatgaacatgatatcgatcgtaatgattttaatcacag

SEQ ID NO: 216829 - DNA, 3295 bp, Zea Mays
gttcaattacgttggattgtatccggaatcgtttcggctaatcaaaatttatataaattaaagaaacaatcccgttacgttccgcccaccaatcgcgaagatgctaatcttcgccggtcgccactcgcccgtctcggagctactgccgctggccaaccatttcacctgttgcggctctcgcccctccatcgaaatcgccatgccgcatggtcacgccgcagccgtggtggaccggctgctgcgcaggctggggtccgccgcttgccggctggaggtgcccccgaatatagacggggacctagcgcatgtgtggacaactctggcgaggttgcaagatatgctggttagcctggagatccgtccggagctgcaagaatggatgggggatatcaagcaggtcgcgtacgatgttgaggatctggtcgatgaattggaagaccacaatagcatggaatctcagatgagcggctgcgttgcagttggagaggaaacaagatggtgctgttcatgttcgtttctcatgcatagtacaagagcggacagaatgaagacaatcaaaagaaggttggactttttagtaaaagattctgtcatcttcagtttgatgcagtacccttttcctgatgttgagagatttgataatgaagcatttgatagagctgcagtcgttggaagagataatgacaaagcaaagataaaggacatgatcttgcaaagtaatgcacaaaagttctcaatcattcccattcttggcctcgtggggttggggaaaacaactcttgctagattaattttccttgaccagggagaaggttgggattttgatcttcgtatctggatatccttaaataggaaactaaacataaaaatgattgctagtgatataatctcgcaatgtaatcatagagaagaaaagcttttagatgttcgtacggacatggagatccaggaaaactttcagttgctaaagaggtgtttgcaagaggcactccatgaaaaacattgtctgattgtcttggatgacctttctagcacagataaaaaccagttggatgaattgaaggaaatgctgaagggtacaaatgagtctatcaaggttttagtgacgacctccagcgaaataactgcagaactactgcacaccattccaccgtacaagttgtgtcctttatctgaagacgacagttggaaaatattttctcaaaaggcttttgggaattgtgatggtgataacactgaccttaagaaaatcggaaaggaaatagtaaaaaggtgtgagggaataccattattgactcattctcttggtttagttgtacaaaatgaagtcacaaatgtgtggttagctgcaagggatgaagagatatggaaactagaaagaagagttgccactaaaatagaattgttttcaccattatatcaaatatacaatgacttctcctcaactattaaattgtgctttctatatttatccatatttcctaaagggtctacaatagataaggaaaaactgatccaacagtggattgcactcgagattattggatcaaaacatgactccttgcctccttatgtgaatggagagatgtgcatccaggactttttgtcaatatattttctccaagttcgagatacacactcagatggtgcccttaaagctattggtatcgacaactcaacaatcaaacatattccaaggtttaacaccacttctgaactctcagtggatactatttcatcctctaaagtaagcacaccatccaaggagatcccatcaactttacgccgtccggacaagtcaaaaatgcctgcactaatacctggagatggatctttaaacttaagccttaagcaggttcagaaggttactcataatttctcacctttatttgagttaggtgaagggggaacctgggcagtttacagggctgtattatcagataaccaggttgttatcatccggagagctaaaaagggccacgttcaagaggcaaaacatcttatggaagtgaagctccttacaaaaattaatcactggagtttggtgagattcttaggttttattgatgaaaaagatgagtgtattcggatcacagagtatgttccaaatggcactcttagggaacacctacatgaccaacgtaagagaatcctgaattttaatcaacgtatagtgattgcccttgatgttgctattgcattgacttatctccatttgtgttctggggacgctttaatctgttacaacttgaggacgtcaaacatcctactgacagagagctaccgagccaaagtgtgctgttctgaactgtcaaaaagtggtaatatcgtgctattaaagggaacagggggctacattgatccagagtacttggagacctcagagctcactgccaaatctgatgtctactcttttggaataatactcttagaaatcatatcttctcatgggccacaagactgggatgtattgatgaaccaccggcaaagcagtgttgtacaatgggctcttgagaaattctatgacgacctcatgaatgagatattggattaccgtatggaggatcgcgtggatggagatgtggtcagggacttgctcagcttagcgttgagttgtgtggtttcgcgtggcgctgatcgcccaagcatcgtagttgtcggggagcgactgtggaaaatatggcaagatcatcgaagaaacgtaggggaacagcacgagtaccaaggaagctgggcagaatttatcgaacaagagggaatcctgaggcatcacaagtgtgtgctcaagagaagttgggagccttcaacaacgcagcaggattggtctgtgtatgttaggcagattgaattagttcaagaagcttacgataccccatggggagaggaaattttttcggggtctgtttcattggacgatatcacagtatattctcggtagaaagcttcaatacgattatattactcctgttttctccgcggtattacatgtgtagattggaggacaataacctatttgttctatttctgtttcattggacgataaatcatagtgtctcctcggtatgaactcttgaaagtttcaactcgttgttttcctcactctatttattcagtgatattgctgttagaaaattacgcaatttcagtactaatttggtctagaaaatattaataatatattggtggcatcaggcttgcacgtgtgatcatagtgcaacagacatgaacatgatatcgtgtgatcatagtgcaaaagacatgaacatgatatcgatcgtaatgattttaatcacag

SEQ ID NO: 216830 - DNA, 5088 bp, Zea Mays
gttcaattacgttggattgtatccggaatcgtttcggctaatcaaaatttatataaattaaagaaacaatcccgttacgttccgcccaccaatcgcgaagatgctaatcttcgccggtcgccactcgcccgtctcggagctactgccgctggccaaccatttcacctgttgcggctctcgcccctccatcgaaatcgccatgccgcatggtcacgccgcagccgtggtggaccggctgctgcgcaggctggggtccgccgcttgccggctggaggtgcccccgaatatagacggggacctagcgcatgtgtggacaactctggcgaggttgcaagatatgctggttagcctggagatccgtccggagctgcaagaatggatgggggatatcaagcaggtcgcgtacgatgttgaggatctggtcgatgaattggaagaccacaatagcatggaatctcagatgagcggctgcgttgcagttggagaggaaacaagatggtgctgttcatgttcgtttctcatgcatagtacaagagcggacagaatgaagacaatcaaaagaaggttggactttttagtaaaagattctgtcatcttcagtttgatgcagtacccttttcctgatgttgagagatttgataatgaagcatttgatagagctgcagtcgttggaagagataatgacaaagcaaagataaaggacatgatcttgcaaagtaatgcacaaaagttctcaatcattcccattcttggcctcgtggggttggggaaaacaactcttgctagattaattttccttgaccagggagaaggttgggattttgatcttcgtatctggatatccttaaataggaaactaaacataaaaatgattgctagtgatataatctcgcaatgtaatcatagagaagaaaagcttttagatgttcgtacggacatggagatccaggaaaactttcagttgctaaagaggtgtttgcaagaggcactccatgaaaaacattgtctgattgtcttggatgacctttctagcacagataaaaaccagttggatgaattgaaggaaatgctgaagggtacaaatgagtctatcaaggttttagtgacgacctccagcgaaataactgcagaactactgcacaccattccaccgtacaagttgtgtcctttatctgaagacgacagttggaaaatattttctcaaaaggcttttgggaattgtgatggtgataacactgaccttaagaaaatcggaaaggaaatagtaaaaaggtgtgagggaataccattattgactcattctcttggtttagttgtacaaaatgaagtcacaaatgtgtggttagctgcaagggatgaagagatatggaaactagaaagaagagttgccactaaaatagaattgttttcaccattatatcaaatatacaatgacttctcctcaactattaaattgtgctttctatatttatccatatttcctaaagggtctacaatagataaggaaaaactgatccaacagtggattgcactcgagattattggatcaaaacatgactccttgcctccttatgtgaatggagagatgtgcatccaggactttttgtcaatatattttctccaagttcgagatacacactcaatacaaacattgccattcccggtgagtaggttgacaaaccttgaggtactggatctatcaaaaacatgtatgaaggaattaccctctttcattggtaatttacagaacctaaaatatttaaacatgcaaggttgtgataaacttcaaaacctacctttatcccttggtcatctacaacgacttgagcaacttcgactgtcatgctgcagatgcattgctatgctaccagactctttgtgcaaccttatcaatcttcgaattttggatttatcaagatgcactatgctgcgacacttacctgctttatttggttcctgaacctatcaagctgctatgaacttcagcagtttcctgaatctgttacaaacctcgagaaactggaagttcttatactccggagatgttgtagacttcgaattctccccccctcctttgcaatgattaagtaccttcgaattcttgatctggctggctgtgaagcacttcatgtaagtactgagatgctaacaaccaatttggagtatctgaacctacaacggtgcctaaatcttcagactcagccatactatttcgaaaacttcaataagttgaagtttttgaatctttcccattgcctccctaccgttgattgcctggaatctattagttacttgttcaacttagaatatctagatctgtcagaaacttcccttgacatacctatgtcttttgcaaggcttcagaagttgcacacactgaacctcactggttgtgctccaatgcatccatcctctaatgtacaccaaacatggccaggtatattagcaaaaattacaagtctcaagtctgtgctgacgatggacccagtattagcggcctctcttcaaggacacaccgagtgctctgctgactatgattatcactcactcacaacaaccgatgagcttgttattaaagagatcacaggcggttcccgaggccttcgtattgctgagcagttgaatctgcagaatcgactggaggtttgtttccttaagctggaatgggttcctaggtcccaatcagctcaagatcaactattggaatatacagatgaggaagtgctggagaagttccaaccaaatgagactctggagcattttatgctagttaaatatacaggcaatgtgtttcctacatggatgatgaacaaactgacttcactcccataccttgtcaatctttgtttgttccacctgcataactgcagtgctctccctccaattggccatctacaaaatctgcgttacttgcatattaaagatatgcccaacctcacaaatctagagatgggtctttctggggggcctgtgtccttggggaaattgactcacctcaaactggaagcactgaatttagaagagctgtctatactcttgtcagccaacaatgagagtccctgtttcatgtttcccaatcttgaggagttatctgttctatcatgctctaagcttgtcttcaaaccatctgtgcctaagtgtgcgaaatatgtaataaaagagagtaacatggttctgtcatgttggcagcctctggggccattctcatctccaccaatagaaaaagtagagataagtgggtgtgtgatgccttctggttggttgcaatggcttagatccatacagactcttgagaaagtagtgatagatggtgaagctctttcatcttttgagctccagaagatatatgcatttcaagaagcatctggtagtaagatttcaaaggaaactgtaagttcatctaggacaaatatgtcacgtgagttgaccactgaggatggtgcccttaaagctattggtatcgacaactcaacaatcaaacatattccaaggtttaacaccacttctgaactctcagtggatactatttcatcctctaaagtaagcacaccatccaaggagatcccatcaactttacgccgtccggacaagtcaaaaatgcctgcactaatacctggagatggatctttaaacttaagccttaagcaggttcagaaggttactcataatttctcacctttatttgagttaggtgaagggggaacctgggcagtttacagggctgtattatcagataaccaggttgttatcatccggagagctaaaaagggccacgttcaagaggcaaaacatcttatggaagtgaagctccttacaaaaattaatcactggagtttggtgagattcttaggttttattgatgaaaaagatgagtgtattcggatcacagagtatgttccaaatggcactcttagggaacacctacatgaccaacgtaagagaatcctgaattttaatcaacgtatagtgattgcccttgatgttgctattgcattgacttatctccatttgtgttctggggacgctttaatctgttacaacttgaggacgtcaaacatcctactgacagagagctaccgagccaaagtgtgctgttctgaactgtcaaaaagtggtaatatcgtgctattaaagggaacagggggctacattgatccagagtacttggagacctcagagctcactgccaaatctgatgtctactcttttggaataatactcttagaaatcatatcttctcatgggccacaagactgggatgtattgatgaaccaccggcaaagcagtgttgtacaatgggctcttgagaaattctatgacgacctcatgaatgagatattggattaccgtatggaggatcgcgtggatggagatgtggtcagggacttgctcagcttagcgttgagttgtgtggtttcgcgtggcgctgatcgcccaagcatcgtagttgtcggggagcgactgtggaaaatatggcaagatcatcgaagaaacgtaggggaacagcacgagtaccaaggaagctgggcagaatttatcgaacaagagggaatcctgaggcatcacaagtgtgtgctcaagagaagttgggagccttcaacaacgcagcaggattggtctgtgtatgttaggcagattgaattagttcaagaagcttacgataccccatggggagaggaaattttttcggggtctgtttcattggacgatatcacagtatattctcggtagaaagcttcaatacgattatattactcctgttttctccgcggtattacatgtgtagattggaggacaataacctatttgttctatttctgtttcattggacgataaatcatagtgtctcctcggtatgaactcttgaaagtttcaactcgttgttttcctcactctatttattcagtgatattgctgttagaaaattacgcaatttcagtactaatttggtctagaaaatattaataatatattggtggcatcaggcttgcacgtgtgatcatagtgcaacagacatgaacatgatatcgtgtgatcatagtgcaaaagacatgaacatgatatcgatcgtaatgattttaatcacag

SEQ ID NO: 216831 - DNA, 5470 bp, Zea Mays
gttcaattacgttggattgtatccggaatcgtttcggctaatcaaaatttatataaattaaagaaacaatcccgttacgttccgcccaccaatcgcgaagatgctaatcttcgccggtcgccactcgcccgtctcggagctactgccgctggccaaccatttcacctgttgcggctctcgcccctccatcgaaatcgccatgccgcatggtcacgccgcagccgtggtggaccggctgctgcgcaggctggggtccgccgcttgccggctggaggtgcccccgaatatagacggggacctagcgcatgtgtggacaactctggcgaggttgcaagatatgctggttagcctggagatccgtccggagctgcaagaatggatgggggatatcaagcaggtcgcgtacgatgttgaggatctggtcgatgaattggaagaccacaatagcatggaatctcagatgagcggctgcgttgcagttggagaggaaacaagatggtgctgttcatgttcgtttctcatgcatagtacaagagcggacagaatgaagacaatcaaaagaaggttggactttttagtaaaagattctgtcatcttcagtttgatgcagtacccttttcctgatgttgagagatttgataatgaagcatttgatagagctgcagtcgttggaagagataatgacaaagcaaagataaaggacatgatcttgcaaagtaatgcacaaaagttctcaatcattcccattcttggcctcgtggggttggggaaaacaactcttgctagattaattttccttgaccagggagaaggttgggattttgatcttcgtatctggatatccttaaataggaaactaaacataaaaatgattgctagtgatataatctcgcaatgtaatcatagagaagaaaagcttttagatgttcgtacggacatggagatccaggaaaactttcagttgctaaagaggtgtttgcaagaggcactccatgaaaaacattgtctgattgtcttggatgacctttctagcacagataaaaaccagttggatgaattgaaggaaatgctgaagggtacaaatgagtctatcaaggttttagtgacgacctccagcgaaataactgcagaactactgcacaccattccaccgtacaagttgtgtcctttatctgaagacgacagttggaaaatattttctcaaaaggcttttgggaattgtgatggtgataacactgaccttaagaaaatcggaaaggaaatagtaaaaaggtgtgagggaataccattattgactcattctcttggtttagttgtacaaaatgaagtcacaaatgtgtggttagctgcaagggatgaagagatatggaaactagaaagaagagttgccactaaaatagaattgttttcaccattatatcaaatatacaatgacttctcctcaactattaaattgtgctttctatatttatccatatttcctaaagggtctacaatagataaggaaaaactgatccaacagtggattgcactcgagattattggatcaaaacatgactccttgcctccttatgtgaatggagagatgtgcatccaggactttttgtcaatatattttctccaagttcgagatacacactcagtttatggaatggataacagagtagttcctacaacattctacattcataactttgtccatgaatttgcaagacatgttgcttgtgatgatattataattttcgatggtaccaaaatgcaaaagggctgtgcaaaaagacaaaccttccaatatgcactcttgacatgttaccgggtgcagtcaacattttcccactcaacgctgacaaggacaagggcattgcatatcatgaactctgaggcgataacatttcctcgtgaagcatttgaattactgaagcacttgcgtgttttgaatcttagtggatgttgcattgaagaattaccagcctctataggttgtctaaagcgtctaaaatatcttgatgtttctggtgtgcagatacaaacattgccattcccggtgagtaggttgacaaaccttgaggtactggatctatcaaaaacatgtatgaaggaattaccctctttcattggtaatttacagaacctaaaatatttaaacatgcaaggttgtgataaacttcaaaacctacctttatcccttggtcatctacaacgacttgagcaacttcgactgtcatgctgcagatgcattgctatgctaccagactctttgtgcaaccttatcaatcttcgaattttggatttatcaagatgcactatgctgcgacacttacctgctttatttggtaacttagtgaacttggaggatctaagcctatctagttgtttcaaccttaagcagttaccagaatcttttggtaacctttattttcttaggttcctgaacctatcaagctgctatgaacttcagcagtttcctgaatctgttacaaacctcgagaaactggaagttcttatactccggagatgttgtagacttcgaattctccccccctcctttgcaatgattaagtaccttcgaattcttgatctggctggctgtgaagcacttcatgtaagtactgagatgctaacaaccaatttggagtatctgaacctacaacggtgcctaaatcttcagactcagccatactatttcgaaaacttcaataagttgaagtttttgaatctttcccattgcctccctaccgttgattgcctggaatctattagttacttgttcaacttagaatatctagatctgtcagaaacttcccttgacatacctatgtcttttgcaaggcttcagaagttgcacacactgaacctcactggttgtgctccaatgcatccatcctctaatgtacaccaaacatggccaggtatattagcaaaaattacaagtctcaagtctgtgctgacgatggacccagtattagcggcctctcttcaaggacacaccgagtgctctgctgactatgattatcactcactcacaacaaccgatgagcttgttattaaagagatcacaggcggttcccgaggccttcgtattgctgagcagttgaatctgcagaatcgactggaggtttgtttccttaagctggaatgggttcctaggtcccaatcagctcaagatcaactattggaatatacagatgaggaagtgctggagaagttccaaccaaatgagactctggagcattttatgctagttaaatatacaggcaatgtgtttcctacatggatgatgaacaaactgacttcactcccataccttgtcaatctttgtttgttccacctgcataactgcagtgctctccctccaattggccatctacaaaatctgcgttacttgcatattaaagatatgcccaacctcacaaatctagagatgggtctttctggggggcctgtgtccttggggaaattgactcacctcaaactggaagcactgaatttagaagagctgtctatactcttgtcagccaacaatgagagtccctgtttcatgtttcccaatcttgaggagttatctgttctatcatgctctaagcttgtcttcaaaccatctgtgcctaagtgtgcgaaatatgtaataaaagagagtaacatggttctgtcatgttggcagcctctggggccattctcatctccaccaatagaaaaagtagagataagtgggtgtgtgatgccttctggttggttgcaatggcttagatccatacagactcttgagaaagtagtgatagatggtgaagctctttcatcttttgagctccagaagatatatgcatttcaagaagcatctggtagtaagatttcaaaggaaactgtaagttcatctaggacaaatatgtcacgtgagttgaccactgaggatggtgcccttaaagctattggtatcgacaactcaacaatcaaacatattccaaggtttaacaccacttctgaactctcagtggatactatttcatcctctaaagtaagcacaccatccaaggagatcccatcaactttacgccgtccggacaagtcaaaaatgcctgcactaatacctggagatggatctttaaacttaagccttaagcaggttcagaaggttactcataatttctcacctttatttgagttaggtgaagggggaacctgggcagtttacagggctgtattatcagataaccaggttgttatcatccggagagctaaaaagggccacgttcaagaggcaaaacatcttatggaagtgaagctccttacaaaaattaatcactggagtttggtgagattcttaggttttattgatgaaaaagatgagtgtattcggatcacagagtatgttccaaatggcactcttagggaacacctacatggggacgctttaatctgttacaacttgaggacgtcaaacatcctactgacagagagctaccgagccaaagtgtgctgttctgaactgtcaaaaagtggtaatatcgtgctattaaagggaacagggggctacattgatccagagtacttggagacctcagagctcactgccaaatctgatgtctactcttttggaataatactcttagaaatcatatcttctcatgggccacaagactgggatgtattgatgaaccaccggcaaagcagtgttgtacaatgggctcttgagaaattctatgacgacctcatgaatgagatattggattaccgtatggaggatcgcgtggatggagatgtggtcagggacttgctcagcttagcgttgagttgtgtggtttcgcgtggcgctgatcgcccaagcatcgtagttgtcggggagcgactgtggaaaatatggcaagatcatcgaagaaacgtaggggaacagcacgagtaccaaggaagctgggcagaatttatcgaacaagagggaatcctgaggcatcacaagtgtgtgctcaagagaagttgggagccttcaacaacgcagcaggattggtctgtgtatgttaggcagattgaattagttcaagaagcttacgataccccatggggagaggaaattttttcggggtctgtttcattggacgatatcacagtatattctcggtagaaagcttcaatacgattatattactcctgttttctccgcggtattacatgtgtagattggaggacaataacctatttgttctatttctgtttcattggacgataaatcatagtgtctcctcggtatgaactcttgaaagtttcaactcgttgttttcctcactctatttattcagtgatattgctgttagaaaattacgcaatttcagtactaatttggtctagaaaatattaataatatattggtggcatcaggcttgcacgtgtgatcatagtgcaacagacatgaacatgatatcgtgtgatcatagtgcaaaagacatgaacatgatatcgatcgtaatgattttaatcacag

SEQ ID NO: 216832 - DNA, 733 bp, Zea Mays
gaagcatcagctaaacaggcttgtatagtctaggggtgattatggccaccggcgcaacggcaatggcatgtactacgggacgccattctacggtggatatgggtacgcctcaccggtcgcccacccaaacatgtatgccgcggcctacggagcctacccgtactatggaaaccagcagctagtgagctgatgtggcgatgctctctgctcagtttcctccctcggatcggagggaggaaaccaagtttttggtcctgtaagatagtagctacaatgagatattataggcggccatacaaatgggcgagagagacgagaagggtatgtgatgataatgctacctgcagacttgtgctgctatagcagaacataaaagagcttgtagtagacaataaaaacctacttttgtcttggaaattttgactcgctataaaactagagctatcggttgttgtgaccactgtttgcatacacaattgtttgggatgatatctgatgggttctctaatttggctctagactatgtccacctcatttgagttgagcttgctaaataactcattgattgtgagattctcaaagttaggggacttgatgattgtcgagaccttcgctttccaaaccttccgatctaggggcatgtggcaattttagaatctcatagggtaggtgaagtttgtttttccgcaccttattcgcaatttactaaaagctataaaattgaataaacaaa

SEQ ID NO: 216833 - DNA, 3010 bp, Zea Mays
  misc_feature (3009)..(3010): n is a, c, g, or t
atggcccacctgcagctctcagcggtcgccggcgcccggccggccgccgcgggcgggcgcggcgacgagatggaggacgtcgcgctgctcgactcgtacgacgaggagatggggctgccgctgccgggtgcatcgggcgccgaggctgcggaggcgcacgtgcgcgtcaccggcatgacgtgctccgcctgcaccagcgccgtcgaggccgccgtctccgcgcgccgcggagtgaggcgcgtcgccgtgtcgttgctccagaaccgcgcccacgtcatgttcgatcccgcgctggccaaggtagaggatataattgaagcgatagaagatgctggatttgaagcagaaattatccctgaatctgctgtctctcagcctaaatcacagaagactttatcagcacaattcaggatagggggaatgacatgtgccaattgtgtaaattcggttgagggtatcttaaaaaagctacctggtgttaaaggagcagtcgttgccttggcaacctcattaggggaagttgagtatattccttctgccattagcaaagatgaaattgttcaggccatcgaggatgctgggtttgaagcagcattcttgcagagtactgagcaagataaggttttgctgggactgattggtttgcacacagagagggatgtagaactattaagtgatattcttaagaaaatagatggcttgcgacaatttggtgtaaatagtgttctctcagaagttgagattgtattcgatccagaagctgttggtctcagatcaatcgtggatacaattgagatgacaagcaatgggagtttgaaagctcatgttcagaatccatacactcgaggggcttcaaatgatgcacaggaggcctccaaaatgcttaaccttctacgttctagcttgttcctcagcattcctgtatttttcatacgtatggtttgccccagtataccatttttaagtacactactaagcatgcactgtggaccatttctcatgggggatttactgaagtggatattggtaagcattgtacagtttgttgttggcaaacggttctatgttgcggcttatagggctgtgaggcatggctctacaaacatggatgtgctagtggttcttggcaccactgcatcatatgcatactctgtctgtgcactactatacggagcatttactggatatcatcctcccatatattttgagacaagtgcaatgataattacatttgtgttgctcgggaagtatctcgaggtgcttgcaaaagggaagacatcggatgcaattaagaagcttgtagaactggtcccttctactgctgttttggttctgaaagacaaagaagggaaacatgttggtgagagggagattgatgcacggttggtccaacctggtgatgtcttaaaagtgcttcctggttcaaagattccagctgatggtgttgtcgtttggggaacaagtcatgtgaatgaaagtatgataactggtgaatcagcacccattcctaaagaagtatcaagtgtggtaattggggggacgataaacttacatggtatccttcatatacaagcaacaaaagtaggatctggtacagttttgagtcagataatctctctggttgaaactgctcagatgtccaaagctcctattcagaaattcgctgattatgtggctagcatttttgttccaattgtcatcacattgtctatagtaacattttctgcgtggtttttgtgtggatggttaggtgcatatccaaattcttgggttgctgaaaatagcaattgctttgtcttctctctcatgtttgccatatctgttgttgttattgcttgcccttgtgcccttggtttggcaacaccaactgctgtgatggtagcgactggaattggggctaatcatggagtacttgtaaaaggcggagatgctttggagagagctcaaaatgtaaattacgtggtttttgataaaacagggacactaacacaaggaaaggctgttgtaacagctgcaaaggttttctcgggaatggacctaggagatttcctcacactggttgcatcagcagaggcaagcagtgagcatcctcttgccaaagctattttggactatgcattgcatttccatttctttggcaagcttccttcatcaaaagatggcattgagcaacgaaaagacaaggtattatcccagtggctgcttgaagctgaagacttctctgcagtacctggcaaaggagttcagtgctcgatcaatgggaagcatgttttggtcggaaaccgttctttgatgactgaaaacggtgtgaccattcccccagaagcagaaactttcttgatagacctggaatcgaatgcaaaaacaggcatacttgtggcatatgatggcgattttgtgggtttgatgggcataaccgaccccctgaaacgggaggctgctgttgtagtggaaggactaaaaaagttgggtgtccatccagtgatgctcacaggagataattggaggaccgcgcaagctgttgctaaggaggttggtattgaggacgtgagagcagaggtgatgccagccggaaaagctgacgttgttcgctccctccagaaggacgggggcaccgtcgccatggttggcgatggcatcaacgactccccagccctggcagcagccgacgtcgggatggccatcggcgggggaacggacattgccatcgaggccgcggactacgtgctggtgcggaacaacctggaagacgtgatcaccgcgatcgacctatccaggaagacgttcagccggatccggtggaactacttcttcgcgatggcctacaacgtcgtggccatccctattgccgcgggcgcgctgttcccgtttaccgggctccagatgccgccgtggctggccggcgcctgcatggccttctcgtccgtaagtgtagtgtgctcgtcgctactgttgaggaggtacagaaaacccaggctgacgactgtgctgcagataactgtagagtgnn

SEQ ID NO: 216834 - DNA, 3134 bp, Zea Mays
  misc_feature (3133)..(3134): n is a, c, g, or t
atggcccacctgcagctctcagcggtcgccggcgcccggccggccgccgcgggcgggcgcggcgacgagatggaggacgtcgcgctgctcgactcgtacgacgaggagatggggctgccgctgccgggtgcatcgggcgccgaggctgcggaggcgcacgtgcgcgtcaccggcatgacgtgctccgcctgcaccagcgccgtcgaggccgccgtctccgcgcgccgcggagtgaggcgcgtcgccgtgtcgttgctccagaaccgcgcccacgtcatgttcgatcccgcgctggccaaggtagaggatataattgaagcgatagaagatgctggatttgaagcagaaattatccctgaatctgctgtctctcagcctaaatcacagaagactttatcagcacaattcaggatagggggaatgacatgtgccaattgtgtaaattcggttgagggtatcttaaaaaagctacctggtgttaaaggagcagtcgttgccttggcaacctcattaggggaagttgagtatattccttctgccattagcaaagatgaaattgttcaggccatcgaggatgctgggtttgaagcagcattcttgcagagtactgagcaagataaggttttgctgggactgattggtttgcacacagagagggatgtagaactattaagtgatattcttaagaaaatagatggcttgcgacaatttggtgtaaatagtgttctctcagaagttgagattgtattcgatccagaagctgttggtctcagatcaatcgtggatacaattgagatgacaagcaatgggagtttgaaagctcatgttcagaatccatacactcgaggggcttcaaatgatgcacaggaggcctccaaaatgcttaaccttctacgttctagcttgttcctcagcattcctgtatttttcatacgtatggtttgccccagtataccatttttaagtacactactaagcatgcactgtggaccatttctcatgggggatttactgaagtggatattggtaagcattgtacagtttgttgttggcaaacggttctatgttgcggcttatagggctgtgaggcatggctctacaaacatggatgtgctagtggttcttggcaccactgcatcatatgcatactctgtctgtgcactactatacggagcatttactggatatcatcctcccatatattttgagacaagtgcaatgataattacatttgtgttgctcgggaagtatctcgaggtgcttgcaaaagggaagacatcggatgcaattaagaagcttgtagaactggtcccttctactgctgttttggttctgaaagacaaaggtctccaataaatgtttattattggcatatataaaattacacagttatataaaaatacaaaacattatattatttttgtatatacaaactcacacatataatttcaaatacagaagggaaacatgttggtgagagggagattgatgcacggttggtccaacctggtgatgtcttaaaagtgcttcctggttcaaagattccagctgatggtgttgtcgtttggggaacaagtcatgtgaatgaaagtatgataactggtgaatcagcacccattcctaaagaagtatcaagtgtggtaattggggggacgataaacttacatggtatccttcatatacaagcaacaaaagtaggatctggtacagttttgagtcagataatctctctggttgaaactgctcagatgtccaaagctcctattcagaaattcgctgattatgtggctagcatttttgttccaattgtcatcacattgtctatagtaacattttctgcgtggtttttgtgtggatggttaggtgcatatccaaattcttgggttgctgaaaatagcaattgctttgtcttctctctcatgtttgccatatctgttgttgttattgcttgcccttgtgcccttggtttggcaacaccaactgctgtgatggtagcgactggaattggggctaatcatggagtacttgtaaaaggcggagatgctttggagagagctcaaaatgtaaattacgtggtttttgataaaacagggacactaacacaaggaaaggctgttgtaacagctgcaaaggttttctcgggaatggacctaggagatttcctcacactggttgcatcagcagaggcaagcagtgagcatcctcttgccaaagctattttggactatgcattgcatttccatttctttggcaagcttccttcatcaaaagatggcattgagcaacgaaaagacaaggtattatcccagtggctgcttgaagctgaagacttctctgcagtacctggcaaaggagttcagtgctcgatcaatgggaagcatgttttggtgagtcataggtcggaaaccgttctttgatgactgaaaacggtgtgaccattcccccagaagcagaaactttcttgatagacctggaatcgaatgcaaaaacaggcatacttgtggcatatgatggcgattttgtgggtttgatgggcataaccgaccccctgaaacgggaggctgctgttgtagtggaaggactaaaaaagttgggtgtccatccagtgatgctcacaggagataattggaggaccgcgcaagctgttgctaaggaggttggtattgaggacgtgagagcagaggtgatgccagccggaaaagctgacgttgttcgctccctccagaaggacgggggcaccgtcgccatggttggcgatggcatcaacgactccccagccctggcagcagccgacgtcgggatggccatcggcgggggaacggacattgccatcgaggccgcggactacgtgctggtgcggaacaacctggaagacgtgatcaccgcgatcgacctatccaggaagacgttcagccggatccggtggaactacttcttcgcgatggcctacaacgtcgtggccatccctattgccgcgggcgcgctgttcccgtttaccgggctccagatgccgccgtggctggccggcgcctgcatggccttctcgtccgtaagtgtagtgtgctcgtcgctactgttgaggaggtacagaaaacccaggctgacgactgtgctgcagataactgtagagtgnn

SEQ ID NO: 216835 - DNA, 700 bp, Zea Mays
ttttgttgggtattgatatggcaaaaggacaggcctggagccaaaggtcctgagtttgatgcagcctctctgcaatgcagggttgcaatattggtgaaggtggcatttgtctagcagaagctgttcatggttctgctcctgatattgctggcaagaaccttgcgaacccgactgctcttatgctgagtgctgtcatgatgttgcgccacttgcaattcaacgacaaagcagaccggatccacaacgccatcctccagactattgctggggggaagtacaggactgctgatcttggtggaaaggcatcgacatccgagtttacaaatgcagtctgtgatcacatctgagaatcggatgtggttctttccttctgattgttctgtcttcctaatatctttttgtcgcatatggggaggagctttagctttaagaggttaactggcagcacctcgaacttctttgggtggttaacacggtttgagaccgtcaaatatttttgtcacatatcttgctgtccagaaattttttcaacttcagaatcgagtaaataattctgtaatcaacaacagcactacagcagtaggtagggtttatttcattgtcgttcttgaaatattgggctaactggttagaataccagttgggacatgttaatcctggggttttcatttatgcatacaaagaatcaaaatcttgtgtc

SEQ ID NO: 216836 - DNA, 3072 bp, Zea Mays
cgatatgttttgattttaatatatgctggtggaaaaggtgagttctgtcaattttaattctaatctaactatgaaaaagaaaaaagaaacagcttattggactggtgaagatttataatttcttcattccaattggcgacacgactagttctgcaatttatttgatttggatgaattactttataaaaaacaataaagaataatcaaattccctgacgcagcagagaagagactagagagaactccactcaagaaaaaattgcacgcaagggtccacgcggcgaacagatcgtgccgttccgcggcggcgtcggtgcggcgctggagccgaagtgaaaagtcgatcgggattgggccgttgggggtgcgatacccctcgcctcgaatgcgagctccgtaggtccgcccccccggcggatggccgagctgggccgccgccgccgcccgctgggatgaggcagcgtgaggagtcgcgctcgcggcttccctgcccccaggcctccgctctgaatatccccgacgcgacggtaaccgaacaagcctcagttagaaaggctaagatcagagcatctccgtgtctccacaacacatcctggattcgcaattattgaggtgcctccactataaaaggccaaccatcctcaaggaatgaacacagccagccagcaagcaagcagagaacaaggataacacagcaactgaaaaccttattaccaagaacaaacaactacaagaggctttgcaagttcacagaggcagctgttcactgcgaatgaacaaccagaggaagcctggagactggaactgcaagaactgccagcatctcaacttcagccgccgtgactactgccagcgttgccgtgatccacgccctgacttgcagttcggcgacggctatagcacggttggtgtgctgacctccctggacatccgcccaggtgactggtactgcagctgcggctaccacaacttcgccagccgcagcagctgcttcaagtgcggcacgatcgtcagagacttcccagcggggcaaggcgcagccggtgctgagggtgactttgctggtggacgcgacagcgccgcagtccgtgctgggtggaaagctggcgactggatctgcacgaggcctggttgcaacgtacacaactttgcgagcaggatggagtgctataggtgcaatgcaccaagggaggcagtttcagtttttaacaaatgggctggtaattccggaggcccatgtacaattggcccatgggtggcgcgtatagcccactaccacacaagtccacagcccgtcgttctggagtctggacccacatggcatggacacacgccgcctccgtccaatgatccaattcaatccaactacctaccttcactgcactgcactgcacctacccggctacccctgcggccttgccggggagtcggggacggggaaggaaacggcaacgagcctgcagctccagctaccccgaaaccccgtccaacgtccatggctatccacctccgggcccacgccttcgcggccaacccgctgcgtggcgtctccgccgccaccacctccatgtccccctccgcggccgccgaggcactccgctacctcctcgaccccagctccgccgccgccgccgccaatcccagccagtacctctccaagatccttcctttccgccggggccgcccgctcgcgcgctccacggaccctcccgcggtgccggcctggcgcctcgcgtggctcccgccgtcccgcgtccccggggtggccctggatgccttcgtcttcctgggcgcgctcgtcgagggggacggcaaggaagcctccgcgtactgggcggtcgacgtcagcgagggcgagggagccagggttggtgggccggcggacggggatgggccgtcggcgtttgtggacttgaggacgctcatggtggccacggactggagcgacaaggacgccatggcggagctcgccatcgcaggacatgctcgagcactgctagaatggcacagcacggcaaaattttgtggagcttgtggagcaaaggctgtacctactgaagccgggaggcgtaagcagtgcagcaacgattcctgcaagaagaggatataccctagaattgatccggttgtgatcatgttggtcattgataaagaaaatgatcgggcactcttaagccgccagtcaagatttgtgcctcgtatgtggagttgtcttgctggtttcatagagccaggagaaagcctggaagaggcagtgagacgagaaacatgggaggaaactggtatcgaagttgggcaagtcgtttatcacagttctcaaccatggcctgttgggccaaatactatgccgtgtcaactgatggtgggcttctttgcttatgctaaatcattggagataaacgtggacaagcaggagcttgaagatgcccagtggcacaaccgcgaagacgtcaagaaagcgttgacgtttgctgaatacgagaaagcccagagaacaagcgctgccaaggtcgatcagatctgcaagggcgctgagaaagggcagaacccctctgccgacttcaaagttggaagcggcgagcctgctccaatgtttgtcccaggaccctacgccattgctcaccaccttatctcgtcgtgggctttcgagggagcaccgaagctgcctagttcattctcaaacctataagcctggaccctggtgttcagacagacgatgacaggaactggacccctgtgctgcgggctcatggatcacctgtgttgccgtgagtgtaattctgatagtgtgtgtccgttgccggttgtgataaaataaaatagcaatagagtactgggtacagaagacttgccggaggatttggcatcaatggacatgtatatccattgcctttttacatgttgatcctctttgtatcacacgtaatgttgcatacttgcatagatacaacaatgatatacatcacacagtgtactcatgcatttatacatgtattcagataactggattcaatagtagagtctttgtctgtctctctctctttttctcacatgtggtttgataattgctac

SEQ ID NO: 216837 - DNA, 2925 bp, Zea Mays
gcaatttatttgatttggatgaattactttataaaaaacaataaagaataatcaaattccctgacgcagcagagaagagactagagagaactccactcaagaaaaaattgcacgcaagggtccacgcggcgaacagatcgtgccgttccgcggcggcgtcggtgcggcgctggagccgaagtgaaaagtcgatcgggattgggccgttgggggtgcgatacccctcgcctcgaatgcgagctccgtaggtccgcccccccggcggatggccgagctgggccgccgccgccgcccgctgggatgaggcagcgtgaggagtcgcgctcgcggcttccctgcccccaggcctccgctctgaatatccccgacgcgacggtaaccgaacaagcctcagctcagttagaaaggctaagatcagagcatctccgtgtctccacaacacatcctggattcgcaattattgaggtgcctccactataaaaggccaaccatcctcaaggaatgaacacagccagccagcaagcaagcagagaacaaggataacacagcaactgaaaaccttattaccaagaacaaacaactacaagaggctttgcaagttcacagaggcagctgttcactgcgaatgaacaaccagaggaagcctggagactggaactgcaagaactgccagcatctcaacttcagccgccgtgactactgccagcgttgccgtgatccacgccctgacttgcagttcggcgacggctatagcacggttggtgtgctgacctccctggacatccgcccaggtgactggtactgcagctgcggctaccacaacttcgccagccgcagcagctgcttcaagtgcggcacgatcgtcagagacttcccagcggggcaaggcgcagccggtgctgagggtgactttgctggtggacgcgacagcgccgcagtccgtgctgggtggaaagctggcgactggatctgcacgaggcctggttgcaacgtacacaactttgcgagcaggatggagtgctataggtgcaatgcaccaagggaggcagtttcagtttttaacaaatgggctggtaattccggaggcccatgtacaattggcccatgggtggcgcgtatagcccactaccacacaagtccacagcccgtcgttctggagtctggacccacatggcatggacacacgccgcctccgtccaatgatccaattcaatccaactacctaccttcactgcactgcactgcacctacccggctacccctgcggccttgccggggagtcggggacggggaaggaaacggcaacgagcctgcagctccagctaccccgaaaccccgtccaacgtccatggctatccacctccgggcccacgccttcgcggccaacccgctgcgtggcgtctccgccgccaccacctccatgtccccctccgcggccgccgaggcactccgctacctcctcgaccccagctccgccgccgccgccgccaatcccagccagtacctctccaagatccttcctttccgccggggccgcccgctcgcgcgctccacggaccctcccgcggtgccggcctggcgcctcgcgtggctcccgccgtcccgcgtccccggggtggccctggatgccttcgtcttcctgggcgcgctcgtcgagggggacggcaaggaagcctccgcgtactgggcggtcgacgtcagcgagggcgagggagccagggttggtgggccggcggacggggatgggccgtcggcgtttgtggacttgaggacgctcatggtggccacggactggagcgacaaggacgccatggcggagctcgccatcgcaggacatgctcgagcactgctagaatggcacagcacggcaaaattttgtggagcttgtggagcaaaggctgtacctactgaagccgggaggcgtaagcagtgcagcaacgattcctgcaagaagaggatataccctagaattgatccggttgtgatcatgttggtcattgataaagaaaatgatcgggcactcttaagccgccagtcaagatttgtgcctcgtatgtggagttgtcttgctggtttcatagagccaggagaaagcctggaagaggcagtgagacgagaaacatgggaggaaactggtatcgaagttgggcaagtcgtttatcacagttctcaaccatggcctgttgggccaaatactatgccgtgtcaactgatggtgggcttctttgcttatgctaaatcattggagataaacgtggacaagcaggagcttgaagatgcccagtggcacaaccgcgaagacgtcaagaaagcgttgacgtttgctgaatacgagaaagcccagagaacaagcgctgccaaggtcgatcagatctgcaagggcgctgagaaagggcagaacccctctgccgacttcaaagttggaagcggcgagcctgctccaatgtttgtcccaggaccctacgccattgctcaccaccttatctcgtcgtgggctttcgagggagcaccgaagctgcctagttcattctcaaacctataagcctggaccctggtgttcagacagacgatgacaggaactggacccctgtgctgcgggctcatggatcacctgtgttgccgtgagtgtaattctgatagtgtgtgtccgttgccggttgtgataaaataaaatagcaatagagtactgggtacagaagacttgccggaggatttggcatcaatggacatgtatatccattgcctttttacatgttgatcctctttgtatcacacgtaatgttgcatacttgcatagatacaacaatgatatacatcacacagtgtactcatgcatttatacatgtattcagataactggattcaatagtagagtctttgtctgtctctctctctttttctcacatgtggtttgataattgctac

SEQ ID NO: 216838 - DNA, 1513 bp, Zea Mays
gagaactccactcaagaaaaaattgcacgcaagggtccacgcggcgaacagatcgtgccgttccgcggcggcgtcggtgcggcgctggagccgaagtgaaaagtcgatcgggattgggccgttgggggtgcgatacccctcgcctcgaatgcgagctccgtaggtccgcccccccggcggatggccgagctgggccgccgccgccgcccgctgggatgaggcagcgtgaggagtcgcgctcgcggcttccctgcccccaggcctccgctctgaatatccccgacgcgacggtaaccgaacaagcctcagctcagttagaaaggctaagatcagagcatctccgtgtctccacaacacatcctggattcgcaattattgaggtgcctccactataaaaggccaaccatcctcaaggaatgaacacagccagccagcaagcaagcagagaacaaggataacacagcaactgaaaaccttattaccaagaacaaacaactacaagaggctttgcaagttcacagaggcagctgttcactgcgaatgaacaaccagaggaagcctggagactggaactgcaagaactgccagcatctcaacttcagccgccgtgactactgccagcgttgccgtgatccacgccctgacttgcagttcggcgacggctatagcacggttggtgtgctgacctccctggacatccgcccaggtgactggtactgcagctgcggctaccacaacttcgccagccgcagcagctgcttcaagtgcggcacgatcgtcagagacttcccagcggggcaaggcgcagccggtgctgagggtgactttgctggtggacgcgacagcgccgcagtccgtgctgggtggaaagctggcgactggatctgcacgaggcctggttgcaacgtacacaactttgcgagcaggatggagtgctataggtgcaatgcaccaagggaggcaggcaccgggaggtaagaggcgactggggtgataccaagagcgtgagatgtgacgagctggccgagcagtggaacctactgccgtcacacactcaccatcaggcatccaggaaggatgagtctactacgtacacgactatattgctgattgccgcgcgtagtgccgctgctgtggtttgcgtgggtggagaagtacccaagcgcaacacctgttacgtgtgttgtttgctcctttttgaggttgtgttgattcagtgacagctgagttgtacggcctgatgatgtactcgcattgtgtatttgtcttaaacagcatatataattatgtaataataagtgcttgcttatctatgctctgctgatgcatctgtcattctgtctccttgtattgtcaatgttttgctccttggatggttttcaaggtggtttagtctgatgtgggaccatcctagacgctcaacgtggcgtggcgtggcgccatatcaaccaccacgaggaaggtaaaatggactacgttgagcacagttcacgggtcaaatcgttttaccaaa

SEQ ID NO: 216839 - DNA, 2830 bp, Zea Mays
gagaactccactcaagaaaaaattgcacgcaagggtccacgcggcgaacagatcgtgccgttccgcggcggcgtcggtgcggcgctggagccgaagtgaaaagtcgatcgggattgggccgttgggggtgcgatacccctcgcctcgaatgcgagctccgtaggtccgcccccccggcggatggccgagctgggccgccgccgccgcccgctgggatgaggcagcgtgaggagtcgcgctcgcggcttccctgcccccaggcctccgctctgaatatccccgacgcgacggtaaccgaacaagcctcagttagaaaggctaagatcagagcatctccgtgtctccacaacacatcctggattcgcaattattgaggtgcctccactataaaaggccaaccatcctcaaggaatgaacacagccagccagcaagcaagcagagaacaaggataacacagcaactgaaaaccttattaccaagaacaaacaactacaagaggctttgcaagttcacagactgttcactgcgaatgaacaaccagaggaagcctggagactggaactgcaagaactgccagcatctcaacttcagccgccgtgactactgccagcgttgccgtgatccacgccctgacttgcagttcggcgacggctatagcacggttggtgtgctgacctccctggacatccgcccaggtgactggtactgcagctgcggctaccacaacttcgccagccgcagcagctgcttcaagtgcggcacgatcgtcagagacttcccagcggggcaaggcgcagccggtgctgagggtgactttgctggtggacgcgacagcgccgcagtccgtgctgggtggaaagctggcgactggatctgcacgaggcctggttgcaacgtacacaactttgcgagcaggatggagtgctataggtgcaatgcaccaagggaggcagtttcagtttttaacaaatgggctggtaattccggaggcccatgtacaattggcccatgggtggcgcgtatagcccactaccacacaagtccacagcccgtcgttctggagtctggacccacatggcatggacacacgccgcctccgtccaatgatccaattcaatccaactacctaccttcactgcactgcactgcacctacccggctacccctgcggccttgccggggagtcggggacggggaaggaaacggcaacgagcctgcagctccagctaccccgaaaccccgtccaacgtccatggctatccacctccgggcccacgccttcgcggccaacccgctgcgtggcgtctccgccgccaccacctccatgtccccctccgcggccgccgaggcactccgctacctcctcgaccccagctccgccgccgccgccgccaatcccagccagtacctctccaagatccttcctttccgccggggccgcccgctcgcgcgctccacggaccctcccgcggtgccggcctggcgcctcgcgtggctcccgccgtcccgcgtccccggggtggccctggatgccttcgtcttcctgggcgcgctcgtcgagggggacggcaaggaagcctccgcgtactgggcggtcgacgtcagcgagggcgagggagccagggttggtgggccggcggacggggatgggccgtcggcgtttgtggacttgaggacgctcatggtggccacggactggagcgacaaggacgccatggcggagctcgccatcgcaggacatgctcgagcactgctagaatggcacagcacggcaaaattttgtggagcttgtggagcaaaggctgtacctactgaagccgggaggcgtaagcagtgcagcaacgattcctgcaagaagaggatataccctagaattgatccggttgtgatcatgttggtcattgataaagaaaatgatcgggcactcttaagccgccagtcaagatttgtgcctcgtatgtggagttgtcttgctggtttcatagagccaggagaaagcctggaagaggcagtgagacgagaaacatgggaggaaactggtatcgaagttgggcaagtcgtttatcacagttctcaaccatggcctgttgggccaaatactatgccgtgtcaactgatggtgggcttctttgcttatgctaaatcattggagataaacgtggacaagcaggagcttgaagatgcccagtggcacaaccgcgaagacgtcaagaaagcgttgacgtttgctgaatacgagaaagcccagagaacaagcgctgccaaggtcgatcagatctgcaagggcgctgagaaagggcagaacccctctgccgacttcaaagttggaagcggcgagcctgctccaatgtttgtcccaggaccctacgccattgctcaccaccttatctcgtcgtgggctttcgagggagcaccgaagctgcctagttcattctcaaacctataagcctggaccctggtgttcagacagacgatgacaggaactggacccctgtgctgcgggctcatggatcacctgtgttgccgtgagtgtaattctgatagtgtgtgtccgttgccggttgtgataaaataaaatagcaatagagtactgggtacagaagacttgccggaggatttggcatcaatggacatgtatatccattgcctttttacatgttgatcctctttgtatcacacgtaatgttgcatacttgcatagatacaacaatgatatacatcacacagtgtactcatgcatttatacatgtattcagataactggattcaatagtagagtctttgtctgtctctctctctttttctcacatgtggtttgataattgctac

SEQ ID NO: 216840 - DNA, 2921 bp, Zea Mays
gccacacttaatcaccgtcaaaagttgtgctgcattccttttccttttctcctcactctctcagtgcaaaagagggagggagatgcggtaaaaggatgaactgaccctggcattcttctttcctcttttgctactttctgggttctgctgctttccgtgggctttaggataagggcaacagaaaagactgacaaagatctgcaaccgttctttttataatttcatccatctcataagcttttcgtctgtgttgatttgtttatgcattcaatagaaatataatgtagctttagagaagaccaccggcccaccgccatgcagaatttatgttctctatatatgttacgaatacagcaactggacgctgcatacgtgagctccctctcagggaacagttagaaaggctaagatcagagcatctccgtgtctccacaacacatcctggattcgcaattattgaggtgcctccactataaaaggccaaccatcctcaaggaatgaacacagccagccagcaagcaagcagagaacaaggataacacagcaactgaaaaccttattaccaagaacaaacaactacaagaggctttgcaagttcacagaggcagctgttcactgcgaatgaacaaccagaggaagcctggagactggaactgcaagaactgccagcatctcaacttcagccgccgtgactactgccagcgttgccgtgatccacgccctgacttgcagttcggcgacggctatagcacggttggtgtgctgacctccctggacatccgcccaggtgactggtactgcagctgcggctaccacaacttcgccagccgcagcagctgcttcaagtgcggcacgatcgtcagagacttcccagcggggcaaggcgcagccggtgctgagggtgactttgctggtggacgcgacagcgccgcagtccgtgctgggtggaaagctggcgactggatctgcacgaggcctggttgcaacgtacacaactttgcgagcaggatggagtgctataggtgcaatgcaccaagggaggcagtttcagtttttaacaaatgggctggtaattccggaggcccatgtacaattggcccatgggtggcgcgtatagcccactaccacacaagtccacagcccgtcgttctggagtctggacccacatggcatggacacacgccgcctccgtccaatgatccaattcaatccaactacctaccttcactgcactgcactgcacctacccggctacccctgcggccttgccggggagtcggggacggggaaggaaacggcaacgagcctgcagctccagctaccccgaaaccccgtccaacgtccatggctatccacctccgggcccacgccttcgcggccaacccgctgcgtggcgtctccgccgccaccacctccatgtccccctccgcggccgccgaggcactccgctacctcctcgaccccagctccgccgccgccgccgccaatcccagccagtacctctccaagatccttcctttccgccggggccgcccgctcgcgcgctccacggaccctcccgcggtgccggcctggcgcctcgcgtggctcccgccgtcccgcgtccccggggtggccctggatgccttcgtcttcctgggcgcgctcgtcgagggggacggcaaggaagcctccgcgtactgggcggtcgacgtcagcgagggcgagggagccagggttggtgggccggcggacggggatgggccgtcggcgtttgtggacttgaggacgctcatggtggccacggactggagcgacaaggacgccatggcggagctcgccatcgcaggacatgctcgagcactgctagaatggcacagcacggcaaaattttgtggagcttgtggagcaaaggctgtacctactgaagccgggaggcgtaagcagtgcagcaacgattcctgcaagaagaggatataccctagaattgatccggttgtgatcatgttggtcattgataaagaaaatgatcgggcactcttaagccgccagtcaagatttgtgcctcgtatgtggagttgtcttgctggtttcatagagccaggagaaagcctggaagaggcagtgagacgagaaacatgggaggaaactggtatcgaagttgggcaagtcgtttatcacagttctcaaccatggcctgttgggccaaatactatgccgtgtcaactgatggtgggcttctttgcttatgctaaatcattggagataaacgtggacaagcaggagcttgaagatgcccagtggcacaaccgcgaagacgtcaagaaagcgttgacgtttgctgaatacgagaaagcccagagaacaagcgctgccaaggtcgatcagatctgcaagggcgctgagaaagggcagaacccctctgccgacttcaaagttggaagcggcgagcctgctccaatgtttgtcccaggaccctacgccattgctcaccaccttatctcgtcgtgggctttcgagggagcaccgaagctgcctagttcattctcaaacctataagcctggaccctggtgttcagacagacgatgacaggaactggacccctgtgctgcgggctcatggatcacctgtgttgccgtgagtgtaattctgatagtgtgtgtccgttgccggttgtgataaaataaaatagcaatagagtactgggtacagaagacttgccggaggatttggcatcaatggacatgtatatccattgcctttttacatgttgatcctctttgtatcacacgtaatgttgcatacttgcatagatacaacaatgatatacatcacacagtgtactcatgcatttatacatgtattcagataactggattcaatagtagagtctttgtctgtctctctctctttttctcacatgtggtttgataattgctac

SEQ ID NO: 216841 - DNA, 2651 bp, Zea Mays
attcaatagaaatataatgtagctttagagaagaccaccggcccaccgccatgcagaatttatgttctctatatatgttacgaatacagcaactggacgctgcatacgtgagctccctctcagggaacagttagaaaggctaagatcagagcatctccgtgtctccacaacacatcctggattcgcaattattgaggtgcctccactataaaaggccaaccatcctcaaggaatgaacacagccagccagcaagcaagcagagaacaaggataacacagcaactgaaaaccttattaccaagaacaaacaactacaagaggctttgcaagttcacagactgttcactgcgaatgaacaaccagaggaagcctggagactggaactgcaagaactgccagcatctcaacttcagccgccgtgactactgccagcgttgccgtgatccacgccctgacttgcagttcggcgacggctatagcacggttggtgtgctgacctccctggacatccgcccaggtgactggtactgcagctgcggctaccacaacttcgccagccgcagcagctgcttcaagtgcggcacgatcgtcagagacttcccagcggggcaaggcgcagccggtgctgagggtgactttgctggtggacgcgacagcgccgcagtccgtgctgggtggaaagctggcgactggatctgcacgaggcctggttgcaacgtacacaactttgcgagcaggatggagtgctataggtgcaatgcaccaagggaggcagtttcagtttttaacaaatgggctggtaattccggaggcccatgtacaattggcccatgggtggcgcgtatagcccactaccacacaagtccacagcccgtcgttctggagtctggacccacatggcatggacacacgccgcctccgtccaatgatccaattcaatccaactacctaccttcactgcactgcactgcacctacccggctacccctgcggccttgccggggagtcggggacggggaaggaaacggcaacgagcctgcagctccagctaccccgaaaccccgtccaacgtccatggctatccacctccgggcccacgccttcgcggccaacccgctgcgtggcgtctccgccgccaccacctccatgtccccctccgcggccgccgaggcactccgctacctcctcgaccccagctccgccgccgccgccgccaatcccagccagtacctctccaagatccttcctttccgccggggccgcccgctcgcgcgctccacggaccctcccgcggtgccggcctggcgcctcgcgtggctcccgccgtcccgcgtccccggggtggccctggatgccttcgtcttcctgggcgcgctcgtcgagggggacggcaaggaagcctccgcgtactgggcggtcgacgtcagcgagggcgagggagccagggttggtgggccggcggacggggatgggccgtcggcgtttgtggacttgaggacgctcatggtggccacggactggagcgacaaggacgccatggcggagctcgccatcgcaggacatgctcgagcactgctagaatggcacagcacggcaaaattttgtggagcttgtggagcaaaggctgtacctactgaagccgggaggcgtaagcagtgcagcaacgattcctgcaagaagaggatataccctagaattgatccggttgtgatcatgttggtcattgataaagaaaatgatcgggcactcttaagccgccagtcaagatttgtgcctcgtatgtggagttgtcttgctggtttcatagagccaggagaaagcctggaagaggcagtgagacgagaaacatgggaggaaactggtatcgaagttgggcaagtcgtttatcacagttctcaaccatggcctgttgggccaaatactatgccgtgtcaactgatggtgggcttctttgcttatgctaaatcattggagataaacgtggacaagcaggagcttgaagatgcccagtggcacaaccgcgaagacgtcaagaaagcgttgacgtttgctgaatacgagaaagcccagagaacaagcgctgccaaggtcgatcagatctgcaagggcgctgagaaagggcagaacccctctgccgacttcaaagttggaagcggcgagcctgctccaatgtttgtcccaggaccctacgccattgctcaccaccttatctcgtcgtgggctttcgagggagcaccgaagctgcctagttcattctcaaacctataagcctggaccctggtgttcagacagacgatgacaggaactggacccctgtgctgcgggctcatggatcacctgtgttgccgtgagtgtaattctgatagtgtgtgtccgttgccggttgtgataaaataaaatagcaatagagtactgggtacagaagacttgccggaggatttggcatcaatggacatgtatatccattgcctttttacatgttgatcctctttgtatcacacgtaatgttgcatacttgcatagatacaacaatgatatacatcacacagtgtactcatgcatttatacatgtattcagataactggattcaatagtagagtctttgtctgtctctctctctttttctcacatgtggtttgataattgctac

SEQ ID NO: 216842 - DNA, 2350 bp, Zea Mays
atttcaatttaataaataagttatatgcaaggggcagctgttcactgcgaatgaacaaccagaggaagcctggagactggaactgcaagaactgccagcatctcaacttcagccgccgtgactactgccagcgttgccgtgatccacgccctgacttgcagttcggcgacggctatagcacggttggtgtgctgacctccctggacatccgcccaggtgactggtactgcagctgcggctaccacaacttcgccagccgcagcagctgcttcaagtgcggcacgatcgtcagagacttcccagcggggcaaggcgcagccggtgctgagggtgactttgctggtggacgcgacagcgccgcagtccgtgctgggtggaaagctggcgactggatctgcacgaggcctggttgcaacgtacacaactttgcgagcaggatggagtgctataggtgcaatgcaccaagggaggcagtttcagtttttaacaaatgggctggtaattccggaggcccatgtacaattggcccatgggtggcgcgtatagcccactaccacacaagtccacagcccgtcgttctggagtctggacccacatggcatggacacacgccgcctccgtccaatgatccaattcaatccaactacctaccttcactgcactgcactgcacctacccggctacccctgcggccttgccggggagtcggggacggggaaggaaacggcaacgagcctgcagctccagctaccccgaaaccccgtccaacgtccatggctatccacctccgggcccacgccttcgcggccaacccgctgcgtggcgtctccgccgccaccacctccatgtccccctccgcggccgccgaggcactccgctacctcctcgaccccagctccgccgccgccgccgccaatcccagccagtacctctccaagatccttcctttccgccggggccgcccgctcgcgcgctccacggaccctcccgcggtgccggcctggcgcctcgcgtggctcccgccgtcccgcgtccccggggtggccctggatgccttcgtcttcctgggcgcgctcgtcgagggggacggcaaggaagcctccgcgtactgggcggtcgacgtcagcgagggcgagggagccagggttggtgggccggcggacggggatgggccgtcggcgtttgtggacttgaggacgctcatggtggccacggactggagcgacaaggacgccatggcggagctcgccatcgcaggacatgctcgagcactgctagaatggcacagcacggcaaaattttgtggagcttgtggagcaaaggctgtacctactgaagccgggaggcgtaagcagtgcagcaacgattcctgcaagaagaggatataccctagaattgatccggttgtgatcatgttggtcattgataaagaaaatgatcgggcactcttaagccgccagtcaagatttgtgcctcgtatgtggagttgtcttgctggtttcatagagccaggagaaagcctggaagaggcagtgagacgagaaacatgggaggaaactggtatcgaagttgggcaagtcgtttatcacagttctcaaccatggcctgttgggccaaatactatgccgtgtcaactgatggtgggcttctttgcttatgctaaatcattggagataaacgtggacaagcaggagcttgaagatgcccagtggcacaaccgcgaagacgtcaagaaagcgttgacgtttgctgaatacgagaaagcccagagaacaagcgctgccaaggtcgatcagatctgcaagggcgctgagaaagggcagaacccctctgccgacttcaaagttggaagcggcgagcctgctccaatgtttgtcccaggaccctacgccattgctcaccaccttatctcgtcgtgggctttcgagggagcaccgaagctgcctagttcattctcaaacctataagcctggaccctggtgttcagacagacgatgacaggaactggacccctgtgctgcgggctcatggatcacctgtgttgccgtgagtgtaattctgatagtgtgtgtccgttgccggttgtgataaaataaaatagcaatagagtactgggtacagaagacttgccggaggatttggcatcaatggacatgtatatccattgcctttttacatgttgatcctctttgtatcacacgtaatgttgcatacttgcatagatacaacaatgatatacatcacacagtgtactcatgcatttatacatgtattcagataactggattcaatagtagagtctttgtctgtctctctctctttttctcacatgtggtttgataattgctac

SEQ ID NO: 216843 - DNA, 2353 bp, Zea Mays
aaaagatcaagggacctcacgtgtagctcctttagggcagctgttcactgcgaatgaacaaccagaggaagcctggagactggaactgcaagaactgccagcatctcaacttcagccgccgtgactactgccagcgttgccgtgatccacgccctgacttgcagttcggcgacggctatagcacggttggtgtgctgacctccctggacatccgcccaggtgactggtactgcagctgcggctaccacaacttcgccagccgcagcagctgcttcaagtgcggcacgatcgtcagagacttcccagcggggcaaggcgcagccggtgctgagggtgactttgctggtggacgcgacagcgccgcagtccgtgctgggtggaaagctggcgactggatctgcacgaggcctggttgcaacgtacacaactttgcgagcaggatggagtgctataggtgcaatgcaccaagggaggcagtttcagtttttaacaaatgggctggtaattccggaggcccatgtacaattggcccatgggtggcgcgtatagcccactaccacacaagtccacagcccgtcgttctggagtctggacccacatggcatggacacacgccgcctccgtccaatgatccaattcaatccaactacctaccttcactgcactgcactgcacctacccggctacccctgcggccttgccggggagtcggggacggggaaggaaacggcaacgagcctgcagctccagctaccccgaaaccccgtccaacgtccatggctatccacctccgggcccacgccttcgcggccaacccgctgcgtggcgtctccgccgccaccacctccatgtccccctccgcggccgccgaggcactccgctacctcctcgaccccagctccgccgccgccgccgccaatcccagccagtacctctccaagatccttcctttccgccggggccgcccgctcgcgcgctccacggaccctcccgcggtgccggcctggcgcctcgcgtggctcccgccgtcccgcgtccccggggtggccctggatgccttcgtcttcctgggcgcgctcgtcgagggggacggcaaggaagcctccgcgtactgggcggtcgacgtcagcgagggcgagggagccagggttggtgggccggcggacggggatgggccgtcggcgtttgtggacttgaggacgctcatggtggccacggactggagcgacaaggacgccatggcggagctcgccatcgcaggacatgctcgagcactgctagaatggcacagcacggcaaaattttgtggagcttgtggagcaaaggctgtacctactgaagccgggaggcgtaagcagtgcagcaacgattcctgcaagaagaggatataccctagaattgatccggttgtgatcatgttggtcattgataaagaaaatgatcgggcactcttaagccgccagtcaagatttgtgcctcgtatgtggagttgtcttgctggtttcatagagccaggagaaagcctggaagaggcagtgagacgagaaacatgggaggaaactggtatcgaagttgggcaagtcgtttatcacagttctcaaccatggcctgttgggccaaatactatgccgtgtcaactgatggtgggcttctttgcttatgctaaatcattggagataaacgtggacaagcaggagcttgaagatgcccagtggcacaaccgcgaagacgtcaagaaagcgttgacgtttgctgaatacgagaaagcccagagaacaagcgctgccaaggtcgatcagatctgcaagggcgctgagaaagggcagaacccctctgccgacttcaaagttggaagcggcgagcctgctccaatgtttgtcccaggaccctacgccattgctcaccaccttatctcgtcgtgggctttcgagggagcaccgaagctgcctagttcattctcaaacctataagcctggaccctggtgttcagacagacgatgacaggaactggacccctgtgctgcgggctcatggatcacctgtgttgccgtgagtgtaattctgatagtgtgtgtccgttgccggttgtgataaaataaaatagcaatagagtactgggtacagaagacttgccggaggatttggcatcaatggacatgtatatccattgcctttttacatgttgatcctctttgtatcacacgtaatgttgcatacttgcatagatacaacaatgatatacatcacacagtgtactcatgcatttatacatgtattcagataactggattcaatagtagagtctttgtctgtctctctctctttttctcacatgtggtttgataattgctac

SEQ ID NO: 216844 - DNA, 2516 bp, Zea Mays
atggctatgtggctgttgatgaaagaagacgtcctctgcacttgtgagaatggatgtcatcttcaatttaatagaaaagtcaaaggtctcaaggcagctcatgcccaggcagtccatcatattcttgtttcagccccaggtcttcagcttcaaagcttcactctccagacttaaggagttgctttcaggatgttgcctcttgaaaatgagattgaccactgaagttgcttgattttattcttgcaaggaggttaagtgaggggaattaaggagaattaggagagttatgggagttgtgcttctgggtttcttgggccagctaatcgaacggcgagcttctctgcggtggaagcaagcggggagagcatcttaccgctgcagctagagcctcctgaactgtattacttcctgctaactgtatacataattctcctagtttattcatgtacctttatgcatgaaattttagctgggatgagcacacatatcatacaattgttacaaggcctgtgttctgatggtttatggaggtatggtgtcttctggtcattcaaaagtgagacgaatgggtggatcttgacttggggtgatggatatgtcaataaaatgatagaagactggcaaatgggagatctatctgctagccccactgttcgtaagaatcagacaataccttcttcgtggtgcaagaaaagctatccattttgccccattgaggcagcactgatgagaatgcctagccatttgtaccctcttggagaagggattattggtaaagtagcacttacaggacaacattgctggatttctgccaatgagctttgttcaacagctatgcataagtaccaagaagactggcagctgcagtttgcagcgggaatcaagacggttctgcttgtaccagtggttcctcacggggttcttcagctgggctctttagatacggttttcgaaagtgcagtgttggtggcactcataaaggacatgtttcataagatttgtgatgcttcggtttctcatgcttctttatccactgggtctgcctactcaaataatttgagtctaccaactgcaaccctatcaatcaatcatccagatgttaacttgatatatagttctgctcagatcgtgaatgctgatcaccacagtttaacacatcccttcagtacatcggaaattccaatactagaagacatcactataggttcttacagaactattccaacaggttggcctaatggactgttgggcgataatggcaccattgggcatgaatattttgaaggcttttctctgacagatatggcacattggaaccaagagaatactcatggcagcactattgttgtaaatgatggtgcaatgctttcgaatacttcaattcattcagagtttcacggagatgtcatggtaatgtccagggaagaacatgagctcttcacgtggcgttgtaggctgaaacaagaacctacaagccctgctctccctcaactgaatgacaacagtgctgatctttatgtgcagcttgaaaccaacaattatgcggaattgttactagacacaataatctaccagactggtcatacatcaaacattgaatctgctccctcagctgagtctccaatttcatgcaaaacacaagttaaaaaagatcattcattgagggtcgatgaatcgccaatttctgatatcccaggtcgtcaagacctttcacctatatccataaatgaagggtttataagttgtgcaatgactgatggacgtgtggaaatcaacaagaccatacctgaagaatgcttagttgaaaatacgcacaggataaattcagctgaaatcaaaagaagatgcagaaaagttgagctccagagaccaagaccaagggacaggcaattaattcaagataggatgaaggggttgagggagcttattccaaatgcatcaaagtgcagcattgatgctctactggacaaaaccatagcatacatgctgttcctgcaaagtgtatccgagaaagctgagaagattcagaatacattggaagacaaggaatcccacgatgagacaaagaagcaacttgaaaggtgcccactaagagtggaagagcttaaccagcctggccatcttctcatcgagatgttgtgcgaggactatgaagtctttcttgagatggcacacgtgctgaagggtcttaaggtgagcatactgaaaggagtgctggagtatcgttccgacaagttttgtgctcgctttgtcatcgagggttcggatggtttcaaccagatgcagattctgtgcccgctgatgcatctcctgcgcaggagatgaagtttgtgtgtcgttgaaatgttaccgagactcttcttactctctgtttgctttggcataaatgtacagcaaaataatggatggatgcattttttttagatcccagcgagactggaatgttgctatatatatatccatattcaatcgtgaacagcaaacaattcaatcgtgattcagcttcatgtctttag

SEQ ID NO: 216845 - DNA, 4739 bp, Zea Mays
aattgtctaacttaatttctatgtatctttatatgtgtttttctgctgttgtagtcattggctgagaaaggtggttctgtgttagagaagattgtagcacatccaaacttcttcatccttgcaacgatgaaccctggtggtgactatggaaaaaaagagctttctcctgcattaagaaatcgatttactgaaatttgggttcctgctgttattgatgttgatgaacttaggagcataacttttgggaggttcaccaaaactgacttctcttgccttggagattgcattgttaacttctggaagtggttcaaccaattgcacatcgggagaacattgacgatacgggacctgctgtcatggatttcatttataaacgtgactgaacaaaatcttgggcccgagcaagctttgatacatggcctgtttcttattttgcttgatgggctctcattaggtctaaatgtttctaaaactgaggctactgagatgaggaatacttgcttgtccttccttctagaagaattgcagaaagttgggggcacggcagtagattcatacttgaatgatctaaataattatggctggggtgacaatatgaaaaaaaaagatatagatcatggttgtttggaagatcatttcggcattgcaccattctatattcctaaaggccattttccttgtaagcaacaggactttgaaataatggcgcccacgaccagtaagaatgtcttgcgagttttgcgtggtatgcaactacctaaacctctccttctggaaggtagtcctggagttggaaaaacaagtttaattgtagcattagctggattttctggtcatgatgttgtacggataaatctatctgaacagacagatatgatggatcttctaggttcagacctgccagctcaagggggaaatggaatggaattttcctggtctgatggtattcttctccaggctttaaagaatggaagctgggttcttttggatgagctcaatcttgctccacaatctgtcttagagggcctgaatgccattctggaccaccgtgctgaggtcttcatacctgagcttggtcaaacttacaaatgctcatcgtcttttcgggtctttgcatgccagaatccttcatcgcagggtggtggacggaaaggccttcccaagtcctttctgaaccgcttcaccaaagtttatgttgatgagctatcagaggaagattatctattcatctgtaaatcacgatatggttcattgatttctgaaagtttcatccgaaatcttattcactttaatagcagactgtatatggataccatggtatataggaagtatggccaacaaggttctccctgggaatttaatctacgtgatattatcagatcttgtgagatgatagcaggttccccaaatcctatgatggatgattcttttttaaatactgtttatctgcaaagaatgcgcacattggttgatcgccatgaagttgtcaagctttatgaggatgtctttaagaaaaagatcagcattcaccaaccaaaaatgctccatgttaatccacattgcttggttgttggaagtgcctctattagaagaaataacatccaatcatataaagtgcaaaacaatcaactcaacatatttccaggtgtccttaatagtcttgaagcagccatgcactgtatccagcaaggttggttgtgcattcttattggacaaaattcagctggtaaaacatcattaatccgcttgctggctcagctttctggaaatacgttgaatgagttaaatctgtcgtctgcaactgatgtgtccgaattgttgggatgctttgagcagtataacttctttaggcactacaaaactgttttatcagaagttgagcattatgttgatgtgtatttcagcctgagtattgatacgaaccagaagaattttgttgcagaaagaaggggtttgtttaccaaatggtttgaatttgtggctgcaaaagggcactcctcaattaagacttcgaaattaatgagtgggaatgcatctttgccttcattaagcttgcttgctgaaatagttgagcagatgaaatgtgatctggaaatgtttgacttctctataccattgacaaaagatgatcttagtgaaacactgaagtccatcaacaacttgcagcaaaatggagctgcacaccaaccagttagattcaaatgggttgcgggagatttgattagagccattgagcgtggtgaatggattgttttagataatgcaaatttttgtaaccctactgtacttgataggataaactccttggttgagcaagaaaggtctattatggtcaatgagtgtggtcttgttgatggaaatcctgtagttatcaaagcccaccctaagtttcgaatgtttttgacagtaaattcaaactatggtgaagtttcaagagccatgcgaaacagaggagtggagatctttctgatggaccaaagttggaatctgaaaggatttagcaatgtacctggggacagtgaacggaaggatgtgataagatttttaatttcttgcggaatacccagaatggaactggtctcgtcaatgtgtgaagcacacatgtacgcaaaaggtgaaggttcacgtgttgctagtttgcattctggattatctttgtccttgccgggtggttggccaattgagcaaaaactaagggatctcatttggtattcaaaagaaacttgtgtcatgaggaattgcatgtttctacagtcattgggtgcccaatacgctgcttatcagataagcagtttgaatgataattcattattgttgggtcagattagtctcatccacccatctattcttcctgctgcaagcttacgcgaattacagtttcctacggttaatggtcagcctgtcaaaatttgtgtcactggggcattcaattcatacttagctgatcagatgcttttctttgctgcaaactgggtaatggagcaatgtactaaaaacgatcttgaactatatggcaaatggtttaattggtataactctctggtccagccttattgcaacttctttgagagctattggtatattctggagcaagaaagtgagcatcctatttggcataacatccttgaatattacagggaaatagttgcctatcacaatattgatattgttactcagcatattccattactctcgaagaagttgctggatatggctggttgtgatagcctgaaagcatgccaaaaccggctgcatcgttcttttaaggctttgggcttgttgcggcttactctgcagcaatggcaaattgagacaaaatgtcctgatctttctgtcctggaatgtactttgttgccagcattgaagtccctcagatgcttagagggcgaggtacttaaaacgattgcgaaatcttggaagcggctcaaaatatactctctccttcttgattaccacagatcaatatggaaaatgatgattgcatctcagttagaggggctaccaattgtttggaatcttttgaggaaagaaatactgaagttgcagcagaagttcccggttgaagttgacgtctttttgatggaatgtgtgaatctcaacaatataaatgataccaattttcaatatggtaaaccaactttgtgggattatggtggtcatcctcatctgccatcatctagcgagatatttgacaaaatgcaagaacttttgtccttcacaacagatgtgtggccaaggaagaatcttttgaatatagagcttgatgataggaaacagttgactgatgctatgctgtcagccaacaaggatcttagacaccttgcaatggaaggtgtctctatggcttgcattgctacaatgaaaactgaggaagatgttttagctgttgtcccccaattggatgaagttcacaagcggcttgtaggaaaggttaactctgtgagggataatcttggattattgtccaagacatcagtgcctgaatttaagttctgttgctcagtgtcctctgagattctatgtaacatttatggtttcaatggctggctagcaagtcttcctttgctcaacttgaagagcttaaacttggatacccttttacttcaacagctatgcaagtgcacacaaaaagattcttctgaaactcatgagattcttgttaattctgagtacctgctgaagtatgctatggattactcactgggttcatcttcaagatctcctctggactatattcaacatcagatcatttggtggatttgtcatgactgggccaaagttgacaatgcacatttaaaagttgctagttgtattcttgaaatgtggtacaactatcactcttccttgtggacttattgctcaggaagcccaaagtgtctattctcagtcacacatgatgattcctgtgacttggcacacctgacaaaaatggacgccatcaatactattatcaggatttacatgtggtggattatctgaagagtggtgtaatgcttaaagttgcatctagaaacctctgggaaggtgtttcgtgtttgggaaactttgtttctagtctgcactctgctgctgattccctctttaagcagattatatttgtccataagaagcatttcgaggaagagaactataaccagttagagtctctcctgttccaacaatcgagacgtttgatagaggtttgtgcaccatcctctgatgttattggaaaaagtttgatgttcatgtcaagtggttaa

SEQ ID NO: 216846 - DNA, 4189 bp, Zea Mays
cccgcactcaccaacagaaagggaaaagaccatcctacccacgccagctccggagttccgacgcaacttcccattccgatccacatcagccccgtcgctgtctctccaggatctggagaccctacccgcctgagccctcagccggccgcgcggtgcggcaccgcaccaccgccaccgagccacgaacccgccggagtaccgacccgcctgcgccctccgctggccgtgcggcgtggcagcgcaccacctacggcgggctgcggcaccgccccggccctcgcaccagttccgcggcgacgtggtccagcagcaccgccaggccgcctacggccatttcactcgcggcttctgagcatctacctgcacttcttcaattacctgcagctttcatcgtatttcctttgcattgcataccgtgcagccacctctgcacatgatgtttcggatgttatcttattattaaaaaactagatttactcatgtttttcttcctctgtcattattgctgatttggtaactaatctttctgtggggtttatgcactgttaatttttccctgtcattttaggtctaatttgtattcgacactctcatcgtagtaactgcctcataggttttgtgccctctgtatacatctctatcggctccatgtccaaggcactgcaccacccttttgttatcaggttttaaaccggcttttggaattgtacacatggatcaatttgtgggagtggaaattagagcagatttctgtgcttttttttttccagcacatctgccagactagtatcatcagcaattgtccatcgcagcataggtacttattacttttgtagtcctattctcctgcataagtacgctattattggtaatcatttatacgctgttacgttcgatatttcttctggtcttcaaatgttagttttccaccctcatacaagacaactagatgttatgtttggatcatatatatagtgtgtttgccactgttaaacatggtgtttgagtattgtaaaaccatactaaacaaattctctgtccctggattattgtatttgatagcttcacatattccttccattattcaacaatttcttgatttatggatccacatatgcatgattggggaacggtagatctaaacagtgaatctggaccatacatgcatgaacaacaccgtccagatctagaactaccaccagtaaaaactaccgcaagtgggaaggaaataaagggtgggtagtatcgttgcctcgcaggttgggagaacatgtttaattatgctgcaatggctcgatttagttgcctagtagctgggactggtccaccaacttaaaatatataaggtacatgtccacacatatataggtagtggagaagatgatggcagaaacaggagttgaaatcagtcgcaaccgtccgcttcactctcgctatgactgatgaagatgttaggaaataaagatagatatggttagacatatttggagataataaaactctcagtatttattttataacagaacaaagttcagtctctatcgtctagagaaaacaaatcccttaatataaagataaggacagaatgctagagatgacttaggttaggcctagtacaagttgatttaaggcctgtttggtttgatgcctaatttgccacactttgcctaacttttctgcctaaggttagttcttcaattcgaacgactaaccttaggcaaagtgtgacacatttagccacgaaccaaacggccccttatactccaactctcctcacatgcacctataaatacccctgaggggtcaacaccagaaaaaccaacaaatcaacagcaaattgctaggctttttcatatataatatccatcttttttccacactcagggaccccaaacaaaagttgaattgtacacattgaatcacatggaatgagccagatgcaatgagggctgcctgaaagtgtataggcaggcagagcacagcagcaactttcgcgttagatatttgcggatgaatagggcggcgaggaaactatctgttgacctggcagggcgctttgcggcttttcctgtgtatttacgcccgctacctcacgctcgaggttccaaaaggcggaacggctaagggggagtggcaacgactgccacaaaacccacctcgtggtcattgctttggaatccccttccctttccctttagccaaagacgctctgctcagcataaagagaagggcgggcggcatcttctcctcccttccctttgccctaccttttgctatactacaagagcttcaaattctccgccttcattcatgcatgctttctgttggcaaacaacaaacatactagcactgctttgacttaaaaggttccgagacagcctgatggtcaagagagagatagtttacgtacctgcaagtgtgctcaggcaggctggccccggccggtctaattctgcagcctcgcatcgccaaacagagcatcaaatctttatctgagagcgactccgtgtctgaaggattggtgctcacgtcgcgacatccaaagccagccacaagataggcacacagcgctgctccgcaccaagaatgacgccaagtgtcacgccctggattcctctggcacccaccctcctattagtactctgcactggacttgcagcgctgtggatccatcactgcaacttcatggattataattttgacaccagcgtcctcgacgaggacgtcgccgggagaggaggcagggaagggagctgcccgccagcatgggccagggcgtgcgacgggtgccgcgcagcccccagcgtggtgtactgccatgcggacaccgcgtacctgtgcgcgtcatgcaactcgcgggtgcatgccgccaatcgcgtggcctcgcgccatgagcgcgtgcgcgtctgcgaggcctgcgagtgcgcccccgcggtgctcgcgtgccgcgccgacgcggcggcgctctgcgctgcctgcgacgcgcaggtccactccgccaacccgcttgcggggaggcaccagcgcgtgcccgtcctgccgctcccggccgccgccgtcccggctgcctctgtgctcgccgaggcagctgccaccgccgcggccgttgctggtgacaaggacgaggaggtcgactcctggctgctgctcaccaaggacccagacgacgacgacaagaaccacaactgcagtagcaacaacaacaacatcagcagcaacaccagcacgttctacgcagacgttgacgagtacttcgatctggtcgggtacagttcctactgtgacaaccacatcaatagcaacacgaaacagtacgggatgcaagagcagcagctcctgctgcacaaggagtttggagacaaggagggaagcgagtacgtggtgccttcacaggtcgggcagcagcagagtggctatcacagagttattgggacggagcaggctgcctccatgactcccggggtcagtgcttacacagattccatcagcaacagcatctctttctcatcgtcaatggaggtgggtatagtaccagacaacatggcaacgacagacatgccaagctccggcatcctgctgacgcctgctggggccatcagcctgttctcgtcgggtcctccgctccagatgccgcttcacttggcctccatggacagggaggccagggtgctgaggtacagggagaagaagaagagcaggaagtttgagaagaccatacggtatgcaacgaggaagacgtacgcagaagcacggccgaggatcaagggacgcttcgcgaaaagatcgtctgatatggatgtcgaagtggatcagatgttctcagctgcggctctgtcgtctgatggtagctatggtaccgttccatggttctgaaggaactttagtgagacattatatgtatcatacagtataataattgtaacatgcgttgaccatatatagtggtaaggtcaagtacaagtagttctaggaaaccgatggtaatgagtgatattgtgtttgttttgaaagataaatgaacaaatatcttagcatttgagttttggtttgtaattgcatgcacatatcaggtctatacagaattttcagtcacttaaacatttttcactgaacagatgattctttgttgccatggattagcaacagcatatagcagtataatgctatgggacagagacatgatttcgtg

SEQ ID NO: 216847 - DNA, 974 bp, Zea Mays
ataccccgccagccgccatcccctccgaccaaaccctagccggccatggcgtggcgtggccccgcctcccgggccgtccttgccgccgtccgccgcccagccgcagcgcccgcggccgcacgcctccacgccccgcgacctttcgcggccccgcgccgccgcgtcccgtccgccttcgccacctcctcgctcccgtccgcgcggcctctggcggcgatgatggggtccccggtgacggtggccgcggtgatggcgcgtctcacggcgcaccccggtgccagcgcgcgggcgtgctgcgagctctcccaggagggagtgggaaagatggttgatgctggaggctgcacaacttgatggggaccttccgtcctagcataatgaaacggaaaggatgggtgatgcaagaaaggccgttgtagagcctgccaaagaagctggtttgaagcatgtactcctttggtacttgaagctgctgtgtagatcccatccttttcgaaaggataaaaggtgtctttttttttgggggggggggggggggaaatgctattgtggcacttcttccactgcaaagttggaagaatttacccacccagcgatagccagttccctcgttaggatgttagaatatactggaataattttaatgttattcatggcacggtttgagcacatggatttaccttctcttccccttagagattcattgatgtcatgtttcagttggcatgagttaaatgattgtgttaccgtgctttgggcgttagcatagttttcattgtcgtttttgaaatcattggcgacgacacaaatatcccctaaatgacaggccacgtacatccatgtgggcaattttcaggcatgtaataataacagtactcaatctcaaggtcatttatttttttttataaaaaaacagcagaattctgtgtccctgcttcgccccttccctatcctcactctcccctacactctcc

SEQ ID NO: 216848 - DNA, 1398 bp, Zea Mays
ctataccccgccagccgccatcccctccgaccaaaccctagccggccatggcgtggcgtggccccgcctcccgggccgtccttgccgccgtccgccgcccagccgcagcgcccgcggccgcacgcctccacgccccgcgacctttcgcggccccgcgccgccgcgtcccgtccgccttcgccacctcctcgctcccgtccgcgcggcctctggcggcgatgatggggtccccggtgacggtggccgcggtgatggcgcgtctcacggcgcaccccggtgccagcgcgcgggcgtgctgcgagctctcccaggggagtgggaaagatggttgatgctggaggctgcacaacttgatggggaccttccgtcctagcataatgtaggtccccctttttcacattctttccccatttcccttgaatattgaatcacgcaagtatatttcattagttgagtttgtaattgtttcagaaaaagaaagtgagctatgcggagttccactgttagcagtaccacactaatgctctgatatgcagagtgcagctttcactgttagcagtaccacactaatgctcggatgcattgctggtgttttgattcatcaccaacctttttgtgccgtcatttctgaagcgtggaaagcgtataacgattcacatttatctataatcagttgtttaatgctatattcactttaaccaagttggttacagtgtacagctgttcaaataccctgcctagagaaacatttttacacaatattgaaactttagttgattgtgggtacggttgggatttgttaggaaacggaaaggatgggtgatgcaagaaaggccgttgtagagcctgccaaagaagctggtttgaagcatgtactcctttggtacttgaagctgctgtgtagatcccatccttttcgaaaggataaaaggtgtctttttttttgggggggggggggggggaaatgctattgtggcacttcttccactgcaaagttggaagaatttacccacccagcgatagccagttccctcgttaggatgttagaatatactggaataattttaatgttattcatggcacggtttgagcacatggatttaccttctcttccccttagagattcattgatgtcatgtttcagttggcatgagttaaatgattgtgttaccgtgctttgggcgttagcatagttttcattgtcgtttttgaaatcattggcgacgacacaaatatcccctaaatgacaggccacgtacatccatgtgggcaattttcaggcatgtaataataacagtactcaatctcaaggtcatttatttttttttataaaaaaacagcagaattctgtgtccctgcttcgccccttccctatcctcactctcccctacactctcc

SEQ ID NO: 216849 - DNA, 976 bp, Zea Mays
ctataccccgccagccgccatcccctccgaccaaaccctagccggccatggcgtggcgtggccccgcctcccgggccgtccttgccgccgtccgccgcccagccgcagcgcccgcggccgcacgcctccacgccccgcgacctttcgcggccccgcgccgccgcgtcccgtccgccttcgccacctcctcgctcccgtccgcgcggcctctggcggcgatgatggggtccccggtgacggtggccgcggtgatggcgcgtctcacggcgcaccccggtgccagcgcgcgggcgtgctgcgagctctcccaggggagtgggaaagatggttgatgctggaggctgcacaacttgatggggaccttccgtcctagcataatgtgaaacggaaaggatgggtgatgcaagaaaggccgttgtagagcctgccaaagaagctggtttgaagcatgtactcctttggtacttgaagctgctgtgtagatcccatccttttcgaaaggataaaaggtgtctttttttttgggggggggggggggggaaatgctattgtggcacttcttccactgcaaagttggaagaatttacccacccagcgatagccagttccctcgttaggatgttagaatatactggaataattttaatgttattcatggcacggtttgagcacatggatttaccttctcttccccttagagattcattgatgtcatgtttcagttggcatgagttaaatgattgtgttaccgtgctttgggcgttagcatagttttcattgtcgtttttgaaatcattggcgacgacacaaatatcccctaaatgacaggccacgtacatccatgtgggcaattttcaggcatgtaataataacagtactcaatctcaaggtcatttatttttttttataaaaaaacagcagaattctgtgtccctgcttcgccccttccctatcctcactctcccctacactctcc

SEQ ID NO: 216850 - DNA, 1046 bp, Zea Mays
tccggcccacgactcctctccccttctcctcaccatcttctagcaagacagttgtgctaaatgaaaaaacccctataccccgccagccgccatcccctccgaccaaaccctagccggccatggcgtggcgtggccccgcctcccgggccgtccttgccgccgtccgccgcccagccgcagcgcccgcggccgcacgcctccacgccccgcgacctttcgcggccccgcgccgccgcgtcccgtccgccttcgccacctcctcgctcccgtccgcgcggcctctggcggcgatgatggggtccccggtgacggtggccgcggtgatggcgcgtctcacggcgcaccccggtgccagcgcgcgggcgtgctgcgagctctcccaggggagtgggaaagatggttgatgctggaggctgcacaacttgatggggaccttccgtcctagcataatgaaacggaaaggatgggtgatgcaagaaaggccgttgtagagcctgccaaagaagctggtttgaagcatgtactcctttggtacttgaagctgctgtgtagatcccatccttttcgaaaggataaaaggtgtctttttttttgggggggggggggggggaaatgctattgtggcacttcttccactgcaaagttggaagaatttacccacccagcgatagccagttccctcgttaggatgttagaatatactggaataattttaatgttattcatggcacggtttgagcacatggatttaccttctcttccccttagagattcattgatgtcatgtttcagttggcatgagttaaatgattgtgttaccgtgctttgggcgttagcatagttttcattgtcgtttttgaaatcattggcgacgacacaaatatcccctaaatgacaggccacgtacatccatgtgggcaattttcaggcatgtaataataacagtactcaatctcaaggtcatttatttttttttataaaaaaacagcagaattctgtgtccctgcttcgccccttccctatcctcactctcccctacactctcc

SEQ ID NO: 216851 - DNA, 966 bp, Zea Mays
tccggcccacgactcctctccccttctcctcaccatcttctagcaagacagttgtgctaaatgaaaaaacccctataccccgccagccgccatcccctccgaccaaaccctagccggccatggcgtggcgtggccccgcctcccgggccgtccttgccgccgtccgccgcccagccgcagcgcccgcggccgcacgcctccacgccccgcgacctttcgcggccccgcgccgccgcgtcccgtccgccttcgccacctcctcgctcccgtccgcgcggcctctggcggcgatgatggggtccccggtgacggtggccgcggtgatggcgcgtctcacggcgcaccccggtgccagcgcgcgggcgtgctgcgagctctcccaggggagtgggaaagatggttgatgctggaggctgcacaacttgatggggaccttccgtcctagcataatgtacttgaagctgctgtgtagatcccatccttttcgaaaggataaaaggtgtctttttttttgggggggggggggggggaaatgctattgtggcacttcttccactgcaaagttggaagaatttacccacccagcgatagccagttccctcgttaggatgttagaatatactggaataattttaatgttattcatggcacggtttgagcacatggatttaccttctcttccccttagagattcattgatgtcatgtttcagttggcatgagttaaatgattgtgttaccgtgctttgggcgttagcatagttttcattgtcgtttttgaaatcattggcgacgacacaaatatcccctaaatgacaggccacgtacatccatgtgggcaattttcaggcatgtaataataacagtactcaatctcaaggtcatttatttttttttataaaaaaacagcagaattctgtgtccctgcttcgccccttccctatcctcactctcccctacactctcc

SEQ ID NO: 216852 - DNA, 1465 bp, Zea Mays
ctataccccgccagccgccatcccctccgaccaaaccctagccggccatggcgtggcgtggccccgcctcccgggccgtccttgccgccgtccgccgcccagccgcagcgcccgcggccgcacgcctccacgccccgcgacctttcgcggccccgcgccgccgcgtcccgtccgccttcgccacctcctcgctcccgtccgcgcggcctctggcggcgatgatggggtccccggtgacggtggccgcggtgatggcgcgtctcacggcgcaccccggtgccagcgcgcgggcgtgctgcgagctctcccaggggagtgggaaagatggttgatgctggaggctgcacaacttgatggggaccttccgtcctagcataatgtaggtccccctttttcacattctttccccatttcccttgaatattgaatcacgcaagtatatttcattagttgagtttgtaattgtttcagaaaaagaaagtgagctatgcggagttccactgttagcagtaccacactaatgctctgatatgcagagtgcagctttcactgttagcagtaccacactaatgctcggatgcattgctggtgttttgattcatcaccaacctttttgtgccgtcatttctgaagcgtggaaagcgtataacgattcacatttatctataatcagttgtttaatgctatattcactttaaccaagttggttacagtgtacagctgttcaaataccctgcctagagaaacatttttacacaatattgaaactttagttgattgtgggtacggttgggatttgttaggaaacggaaaggatgggtgatgcaagaaaggccgttgtagagcctgccaaagaagctggtttgaagcatgtactcctttggtaataatgattttcccccctcaatccatcctaaaccaaaattcagcggaactggtcctattagtatctctgtgaaacatttgtcaggttttactttaatgtcagaaaataaccctgcagtatcaaccggacataataaacatgacctatgtttcttattctttgtttgatatctattgctttttttgtctgcaatctttttcagctagagaatggcaccaccgatccaactgttttctatgactgtcgcataacacttactaacacattttcagttctcttagtttctactattcatagattcgtttttctaatttcctgtttatttggagttagtatcgatttagtcagtgtggtaccttttttttccgtggttgtccaaatgtggtgccaacaagcatttaatctaattttcttacctttgctttgggccctgatgaatgaatgcttcctttctgccccttgacgtttctttaattccatatatttccgtcttgaatattccattttttttccagatttgtctgatctttgttcttgatgtctcatattacagtgagctttaaatttcccaggcctttg

SEQ ID NO: 216853 - DNA, 1685 bp, Zea Mays
gcgtcagctgccgagctcactgtgtattcggtcggcgcgtgccgcttcccatacccccgcgcgctccccatggccgacgtcgacatggctgacctcccacagaccccgcgatccaccgccggcgacgacgacctctccttgctggacggagagggcgacctcgccgccgccatcctcgcgcgcctcggcggctcgccgcgggaggactttcagcacctctgtgccaccgccgccgccatggcgcaggccgttagcgaccaaggagtgcccgccaccccagtagcctacttcgcagcggctgctgcggcgcttgccccgctcgctcgcgcgggggacgccggcgccgaccgccacgtcgccggagcgctcctcgccttcctctccgcggcgctgccggccctcccggccgcagtggtgcgcgcccgtggccgtgaggtcgccgatgacgtgatgcgcgtgctcgatttcccttccacgcctgattcaggcgtcagggcggggctgagatgcctcgcgcatttgatatctgcgggggacagggcgaactgggaggcggtagagcctttatacactgtgattctgcgcctcagtaccgatcaccggctaaaggtgcggaaacaatctcattcatgcttgcatgatgttctcctgagttttcaaaggcaaacaattttgattccagcaagtgaagcaataacaagatcttttgagcggtttctgctgcttgctggaggatctagtgctgtaaatacaggtgtatcagaggaaggccccaagggggctaaggaggtcctgtatattttgaatgctttgatatgctgccttccccttatggcctccaaaccttccaatactatcttgaaatattttaaaccactattagatttgcatcaaccaattttgataaggagtcttctggacattctgcatgctgtttgtgagagtccaaccgtacagctcaaatctgatgtgttattggaccttctgtgctcgttgggtctgtcagtgtcttcagaaaggaaatcaggagatgaaatggcttcaattgcacgacttctacatgttggcactaaaaaaatttacaagcaaaacagggacatttgtgttgtaaaacttccattgatatttacctcacttggagatattatcaagtgaattcgaagaggcgagattttcatctctggagggttttaaaggtttaatagataactgcattgatgaaaccttggtgtcacagggtattgctcagatgaaggctagacatcaagggttgaaatcagatccaacaatcatagataagatatgtgctatcctagaaggcttgctagatgtccgctacagtgacgtctgggacagatcatttcatgtaatttcagtggcatttgacaaactaggagagttttcagctgatctattgcccgaagcagtcaggaacttggcagacatgcaaaacttgtcagatgatgacttttcctttcggaagcagcttgatgcatgtcttggttcagcggttgctgcaatggggccaaagaatattctggaaattcttcagattcagtcaataagtgatgaaaatgaatggattctccctattctggagaagcacattgttggtgccagtttacaatttttcttaagagatattctgagtatggttggtgccatagagaaaaacattcctaagg

SEQ ID NO: 216854 - DNA, 1681 bp, Zea Mays
cagctgccgagctcactgtgtattcggtcggcgcgtgccgcttcccatacccccgcgcgctccccatggccgacgtcgacatggctgacctcccacagaccccgcgatccaccgccggcgacgacgacctctccttgctggacggagagggcgacctcgccgccgccatcctcgcgcgcctcggcggctcgccgcgggaggactttcagcacctctgtgccaccgccgccgccatggcgcaggccgttagcgaccaaggagtgcccgccaccccagtagcctacttcgcagcggctgctgcggcgcttgccccgctcgctcgcgcgggggacgccggcgccgaccgccacgtcgccggagcgctcctcgccttcctctccgcggcgctgccggccctcccggccgcagtggtgcgcgcccgtggccgtgaggtcgccgatgacgtgatgcgcgtgctcgatttcccttccacgcctgattcaggcgtcagggcggggctgagatgcctcgcgcatttgatatctgcgggggacagggcgaactgggaggcggtagagcctttatacactgtgattctgcgcctcagtaccgatcaccggctaaaggtgcggaaacaatctcattcatgcttgcatgatgttctcctgagttttcaaaggcaaacaattttgattccagcaagtgaagcaataacaagatcttttgagcggtttctgctgcttgctggaggatctagtgctgtaaatacaggtgtatcagaggaaggccccaagggggctaaggaggtcctgtatattttgaatgctttgatatgctgccttccccttatggcctccaaaccttccaatactatcttgaaatattttaaaccactattagatttgcatcaaccaattttgataaggagtcttctggacattctgcatgctgtttgtgagagtccaaccgtacagctcaaatctgatgtgttattggaccttctgtgctcgttgggtctgtcagtgtcttcagaaaggaaatcaggagatgaaatggcttcaattgcacgacttctacatgttggcactaaaaaaatttacaagcaaaacagggacatttgtgttgtaaaacttccattgatatttacctcacttggagatatattatcaagtgaattcgaagaggcgagattttcatctctggagggttttaaaggtttaatagataactgcattgatgaaaccttggtgtcacagggtattgctcagatgaaggctagacatcaagggttgaaatcagatccaacaatcatagataagatatgtgctatcctagaaggcttgctagatgtccgctacagtgacgtctgggacagatcatttcatgtaatttcagtggcatttgacaaactaggagttttcagctgatctattgcccgaagcagtcaggaacttggcagacatgcaaaacttgtcagatgatgacttttcctttcggaagcagcttgatgcatgtcttggttcagcggttgctgcaatggggccaaagaatattctggaaattcttcagattcagtcaataagtgatgaaaatgaatggattctccctattctggagaagcacattgttggtgccagtttacaatttttcttaagagatattctgagtatggttggtgccatagagaaaaacattcctaagg

SEQ ID NO: 216855 - DNA, 1578 bp, Zea Mays
cgagctcactgtgtattcggtcggcgcgtgccgcttcccatacccccgcgcgctccccatggccgacgtcgacatggctgacctcccacagaccccgcgatccaccgccggcgacgacgacctctccttgctggacggagagggcgacctcgccgccgccatcctcgcgcgcctcggcggctcgccgcgggaggactttcagcacctctgtgccaccgccgccgccatggcgcaggccgttagcgaccaaggagtgcccgccaccccagtagcctacttcgcagcggctgctgcggcgcttgccccgctcgctcgcgcgggggacgccggcgccgaccgccacgtcgccggagcgctcctcgccttcctctccgcggcgctgccggccctcccggccgcagtggtgcgcgcccgtggccgtgaggtcgccgatgacgtgatgcgcgtgctcgatttcccttccacgcctgattcaggcgtcagggcggggctgagatgcctcgcgcatttgatatctgcgggggacagggcgaactgggaggcggtagagcctttatacactgtgattctgcgcctcagtaccgatcaccggctaaaggtgcggaaacaatctcattcatgcttgcatgatgttctcctgagttttcaaaggcaaacaattttgattccagcaagtgaagcaataacaagatcttttgagcggtttctgctgcttgctggaggatctagtgctgtaaatacaggtgtatcagaggaaggccccaagggggctaaggaggtcctgtatattttgaatgctttgatatgctgccttccccttatggcctccaaaccttccaatactatcttgaaatattttaaaccactattagatttgcatcaaccaattttgataaggagtcttctggacattctgcatgctgtttgtgagagtccaaccgtacagctcaaatctgatgtgttattggaccttctgtgctcgttgggtctgtcagtgtcttcagaaaggaaatcaggagatgaaatggcttcaattgcacgacttctacatgttggcactaaaaaaatttacaagcaaaacagggacatttgtgttgtaaaacttccattgatatttacctcacttggagggtattgctcagatgaaggctagacatcaagggttgaaatcagatccaacaatcatagataagatatgtgctatcctagaaggcttgctagatgtccgctacagtgacgtctgggacagatcatttcatgtaatttcagtggcatttgacaaactaggagagttttcagctgatctattgcccgaagcagtcaggaacttggcagacatgcaaaacttgtcagatgatgacttttcctttcggaagcagcttgatgcatgtcttggttcagcggttgctgcaatggggccaaagaatattctggaaattcttcagattcagtcaataagtgatgaaaatgaatggattctccctattctggagaagcacattgttggtgccagtttacaatttttcttaagagatattctgagtatggttggtgccatagagaaaaacattcctaagg

SEQ ID NO: 216856 - DNA, 293 bp, Zea Mays
gtaaagtaaaaattaggccaccagcaaagacaaaaattcctcctcctccagtcatagcgtatcaacctgactgcatacaaatagttcctttccttgctcatttcgttttcagctcagatgatgtgtttgctccatctctcgctccgcttatcatcatcatcaacatcatgaaagtgacagtgattggacttggtttcgtgaaagctgaaggtgtggttaactccatgactaggcatggagaccgcaggattgtgtagctgccatatgtcgccaattggattgtgtaatagcgg

SEQ ID NO: 216857 - DNA, 2447 bp, Zea Mays
gtaaaattccagttcctcttcctcacgtgatggcacgtgcccaccctggcatgaggccccatgccgaagccaccagcgaaatgaacggaagaagagagcggagggaacaactgccgcacggcacggagacagacgcggacagaccgagcgattggtcggcgaccacctcacctccgccgccatccactcctcggctcgggctccacgcaatgttactcgttaccatcattagctgttgatgggcatatgaacgatgtccacatctcgtcagatagatgatgggcctgctgtactacagttatgcagatggacattgctacaaccccatctcaaactatcaaaatttcgagaggcttttatatctccaacaaggcgtctttttggactgctctcagaccatggggatcttgtcctggcaactgctgagatcaactcatcacaagttgaatctcatagagctctatcggatacctgtactcaggcagtcttcaaaacgttttctactattccccgagtgaagtctttagcatggggatactgttctgatgcttttgatgactcaagttttaatgaaattctagtggtatcaagtgatgcttctatcacagtccatgcattctgccattctcgcaaaagcacactaacagttaattcaatgtctgatgctaaagagttgcatggggagtggaaagagtggcgccctactgaatgttcagtgttggaggatggtgagtcaggtccagaaaattggttttgttctttcctaactacagtcactgcgtctgtttctaatggaaaataccaagccagattgcccatgaaatctttattgcctaattcagcagaagttgtatcctttagcatatatgacattactctctctttcttgaaatattggtatagcaaatgttctctgaagactatggcggaaactgacagtgaatcaccacgacgttttcttagagcatcgtgcagttgtcagtgggagtgtctaaaagttttgtctagctcgtcatgttatttgatcggcttagttctgactcctaatgaatcagtacgttgtgaggcccatccatccaatgcggagtgtattttggttactgttctggagctaaaccactggggcatacagtggaactttgtggcagaccttcaggatgtatctgatggtattacgccaagtccaaaatgggttgattttcagttatcagatgtgtttcttgcctgccttaatacagcaggttttgttgccatttggaacgtgaaaactggtggtcttgtgacgtcattcagtgttcttcaacaatgcagaactgatctggagatgcctctgaggagctctatgtccattgtgacaaatttggacgagggaaatatccatgttgagaactttgttggcagaatgtttaagcggttagttttggcatcatattcttatcttcttgctgttgtagatgaggttggagtagtgtatgtgttctatgcggatgacatcttaaacttcaaagctaatgtgcacgaaaactttgatctgcctgttatgaatcagtttgctgattgtttttctatctgggaagctgctggtcatgagataggaagtctatcattttgtgctaatcagtccatacaacaagggtcacttagtctaaccaaattggttcctgagttctcagggaaaagcgatgatattgtcaggcctagagaaagaagaaaatatagatgcgatgaaaatgaagtggacagctggccaagtggctttgtcactgcagggcagatgaaagttggggcaggttatcgtcgcacaaattcctcttgtttctttaggaggataattcttcctccatgcagatcacagcaggatgtaattagcctgtgtccacttggactaactagaatttttaaaggttctattgcggatggaaacgagcatgtcaaaatttttcattccgagttgcttatgtattcatcttttcttggcaaaggagatattgatattggttttatggacgaaatgcttccatttaaaaaggattccacttttgtcggagattctgttgtttgctcctgccagggatatttgtatttaattacccagtatggcctttctgtggtccttcctccagtttctatatcatccttttcatctcaatgtgacgctatcaaattctggcaaatgggtcctgctgctggtagcacatgcaatgctctgaacttactatctgttgacaaatcagacacaagctggaaaacctggcaaatagaagtcctggatagagctttgttgtatgaaggtcccgcactagcagacaggctctgttgggagaatggatgggatttgaaattctctaggttacgttggctgcaattagcccttcattactcaatgattggtgatctagagcaatagtatcagaagcagataaaaataaaatcacagtacaacacat

SEQ ID NO: 216858 - DNA, 833 bp, Zea Mays
  misc_feature (833)..(833): n is a, c, g, or t
atcagaatccaagcctattccatcgaatgaccaggacccagacctggagctgatgctgatgcctcctccacgcataatgccaatgccactccccactctcagcctccaagagctttcactgattggagcgcgtccaacagtgcctttgccgcacagcccgcccctgctaccaccaatacacccttccactacaacctctcccagtcttatgccctatggacccattacatgctcaacaagaatgtatcctactctacttactctacaccacatgagccgttgcgccatacccacatcccggataagtattcaggttgtgcattcagccttgggtttgactctttcactacgatgtcccttggaccaaatatttgtgccaacatgacgcccatggaaagatctatatctgccaaagaacctgagaattcagaggatttgcctacagtagttagaagcagtgatgaaatggacactagaaacagtggcgacgttcgtcgtgacacagttgacactcttcctgagtcgaagcagagccatgaaagttgcgcttctaagttcgactctggagagtaccaagtcattttgcgcaaggagttgactaagagtgacgttgcaaattccgggcgaattgtgcttcccaagaaggatgctgaggctggtcttccaccattggtgcaaggagatcctctgatactacagatggatgacatggtgcttccgattatatggaaatttaagtatagattttggccaaacaacaaaagcagaatgtatattctggaagctgcaggtgaattcgtgaagacacatggccttcaggcaggggatacacn

SEQ ID NO: 216859 - DNA, 1561 bp, Zea Mays
agggtatatagatttatatgaacaatcgatgtgttaataagttttagaatttttaaatgaccaaaatatagttcccaccgcatattttccaatatttggcctaacctgaggtaaccctggctgtgggccaaattcttactgacaaccttgaggaggaagacatccgatgcccgatgccgagcccaaacccgcgagtcagcgtgcggcagcgctccaatccgacttcatccctgctcggctggccgctacattgctgctgaaccctagccgccgcgccgctacctgctaccatcgctccacccgccgtccgccgcgacgccgcccatcgcgtcaccatcgtccggaaactgggcaataggggttgcggccgcccgttgccaccaggtcctctgcgcctgctgctacgggctgtccgcggcaccgcgcgtcacagtcgtcggaggcgcgttgggcggccgcctggttggccagccggcgactgcgtgtctctgtgctccgtggtccctttccttctgcgagaattgcagagcaattggggtacacagcacaggcacatgaatacaacacaacagtttgctctctgattcgatcgatccaactagcctccaagcatggtgttcggccggagcaaatcaacttcgtcgacgacgccatccgcgccctcaaaggcggcggctgcgtgctccgagctgcgcaccgcgtaccacgactgcttcaaccggtggtacgcggagaaattcgctaaggggcagtggcagagggacgactgcgccgaccactggcacaagtaccgcgcctgcctcgaggaacatctggaagacaagcatctgaggcaaatcctactggatgcagaaacttctgcattttatgccatgcctgaggccaaccctcccacaggacaaggaactacaaaatgacaatccacctgattggttacccgcacggccgcaccatctcatcttggatcacctgacgtggtcactcaccctgtggcgggtgctctgtgcttggaggagcagcaggcagcagctaaggcgagtgctctgctatctggacttcttgtcgatccttgtaataactcttctgaagtttggtgagtgttccaattttttttatttgggtcttgtttcatgtttttttgcatattttaagtgtgaaaaactttgcgctgggtaatccaacttccagactacacgacatgttcaggtgctatgataactgtttttgcttgtcggatttcatgcctagctttgtcttgttttggagctcatgtacagacttgtgaaacaccaaattccgtaatgaatgtaatatattgctttttttcagactccgtatgtgatagtattgtcaatgacttctatcgggtaccataattagggatatctagattacatctctaaatgtaccaacactctcgagtaccagggaagcatagaaacaacgcgctccctgacccaaggtcacataggaccaaatcacgattcgcctgaggctccacgtaccaaatgcacaaatacgcttcgcccaagcccaaccttgaatgaacgctatatctgtg

SEQ ID NO: 216860 - DNA, 1953 bp, Zea Mays
agggtatatagatttatatgaacaatcgatgtgttaataagttttagaatttttaaatgaccaaaatatagttcccaccgcatattttccaatatttggcctaacctgaggtaaccctggctgtgggccaaattcttactgacaaccttgaggaggaagacatccgatgcccgatgccgagcccaaacccgcgagtcagcgtgcggcagcgctccaatccgacttcatccctgctcggctggccgctacattgctgctgaaccctagccgccgcgccgctacctgctaccatcgctccacccgccgtccgccgcgacgccgcccatcgcgtcaccatcgtccggaaactgggcaataggggttgcggccgcccgttgccaccaggtcctctgcgcctgctgctacgggctgtccgcggcaccgcgcgtcacagtcgtcggaggcgcgttgggcggccgcctggttggccagccggcgactgcgtgtctctgtgctccgtggtccctttccttctgcgagaattgcagagcaattggggtacacagcacaggcacatgaatacaacacaacagtttgctctctgattcgatcgatccaactagcctccaagcatggtgttcggccggagcaaatcaacttcgtcgacgacgccatccgcgccctcaaaggcggcggctgcgtgctccgagctgcgcaccgcgtaccacgactgcttcaaccggtggtacgcggagaaattcgctaaggggcagtggcagagggacgactgcgccgaccactggcacaagtaccgcgcctgcctcgaggaacatctggaagacaagcatctgaggcaaatcctactggatgcagaaacttctgcattttatgccatgcctgaggccaaccctcccacaggacaaggaactacaaaatgacaatccacctgattggttacccgcacggccgcaccatctcatcttggatcaccgacggcggcagcctgcgcatggacgcgcagccatccaatcaggctgatatctccttcaccatatgccatatcggacttcattcaatcaggatatatagaaccttggtagatgaattagaaactccttggatcttgacaattgttaggcccctggatcatgtaacacttaacaagcaaaatttgcgtgtgtcagaatggtgtgtgccctgctatctggaaaccttgcaacagttgagaatagaatcagctgtagagctgtacatgttgaagaacgttgtgtttcaactgtggcttagcttttagcagagtttgttgagtaatatgtttcggacatggtattggtttcaatacattagtttctgatgttgttaaggtttcatgaatcctgacagtgacgtggtcactcaccctgtggcgggtgctctgtgcttggaggagcagcaggcagcagctaaggcgagtgctctgctatctggacttcttgtcgatccttgtaataactcttctgaagtttggtgagtgttccaattttttttatttgggtcttgtttcatgtttttttgcatattttaagtgtgaaaaactttgcgctgggtaatccaacttccagactacacgacatgttcaggtgctatgataactgtttttgcttgtcggatttcatgcctagctttgtcttgttttggagctcatgtacagacttgtgaaacaccaaattccgtaatgaatgtaatatattgctttttttcagactccgtatgtgatagtattgtcaatgacttctatcgggtaccataattagggatatctagattacatctctaaatgtaccaacactctcgagtaccagggaagcatagaaacaacgcgctccctgacccaaggtcacataggaccaaatcacgattcgcctgaggctccacgtaccaaatgcacaaatacgcttcgcccaagcccaaccttgaatgaacgctatatctgtg

SEQ ID NO: 216861 - DNA, 4140 bp, Zea Mays
cctagcgccaccaccccaccccaagctgcttcgcgaagcaacaactatccctcgttccctcccagtccccgcctcggctccctcgcctcctcctccattcctacttccttcgctctctcctttatcccttccttgcagtccccttctctccccgacgcctcgtttttttatccatcggtgtcgacgaggggaccgacgaagcggaggacgcctcagatctagggttccttccttgcgtgcccttcgaggagagacagagagagggtctgcatcatgagggccaccggggagcacacaactgcggtgcccatgcccgccccgccgccgcctcctgctgcggcctctgcgagtgaggaagacgacaaggagaggaggaagaaccgccgccgctcctcgcggcgctccaggcaggcggccgttgccgcgccgcagggcctgcacgcggacgctgcggggccgaggacggtcagatcgatgccgcccatgcacgtgggcagcagcgccggcgtcgacgccgaggcagagccgtccgcggcgggaacgagccaatcctgccccctgccccccacgccgagacccacggaggcgcctgtgtcgaggctgggcaggggagctccggggacgcgttacttccagcctcactggcctgagcgggccgtggaggaggccgtcaagagagggcatgctttcgtggggaagttcagggtgaatgctcacaaccgaaatgaggcgtactgtacgattgatggcgtctcggtggatgttctcattacaggattggcacaaaaccgagcggttgaaggtgatcttgttgctatcacactggaccctgttgctcactggactagaatgaaaggaccaaacgttgcgtgcaaccctctgataggagattctgtggtgtgtgaggttagtgaaacaaataggaatcatagttggaagaaaggacaggcagacgacggctgcaagtttgaaaattgcagtaacggagtacctgttttggataggacacatccccctcacaagaacagtggttttagtcaagctgttaagtgtggaaatgggaatgctactatccctgaaaggaatgagatagacttgaatgatggaaagagtgaggttgcaagagcattacaaaggatcagtgccacgatatactctcatccaagcagacgtcctactgggaaagtattatcaataattaagaagtctccgcgccgtgatgccattgtaggtttccttgcttctttctcagagttccctgacggagagcagcagaaaaaccagatgggtctaaacaggatgaacaacagaacacaatcagttacaggcttgttttatctcttgcctactgaccccaaattccctcagatggttgtgagttttagcactttgccagatagtgtcaggcagagcctaagaggtaacgtagctgttaagaaggaattggttgctgcacgaattgatgaatggaatgaggaaaacctctatccctatgcccatgttatacggttcttggggaaggttggacatgtcaaaacacacatggatgctatattatttgagaatgtgatctgtgatgctgagttttcccctgagtccttggcatgccttcctgacaattgttggaagattcctcaaaaagaacttgaagctagaaaagatttgaggaaggtcttgacttttacaatagaccctcctactgcatcggatctggatgatgctatatcaattgaaatactttcaggaggaactgtccgtattggggttcacattgctgatgtttcttactttttacatccagagactgctttagatgctgaagctcaaagtcgatctacaagtgtttacaccctgaaacataaaatctcaatgttgccttcaggattttcggaagtggtttcacttaatccaggtgtagataggcttgccttttcaattatttgggatattgatcctcatggtaacctaattagtcgttggattggtcgaagcatcatcttttcgtgctgcaagctgtcatatgagcttgtgcaggatctgatttgtaatgaaaccagtcagactaggcctgaagtttcttctcttgaagtacatggtatatttgggagagatgatgttatcaagtcacttagaggcctctatgaagtctcaaaaaatctgaaggaaattaggttcaagggtggagctctttctcttgatactgcaaagattatgatcctgtttgatgaagatggggatccatgtgatagctatcgttacgtgaggaagaatgcgtgcttcattgttgaggagctaatgttgttggcgaatatgtcagctgcagaagtcatatctaatgcatttcctgattgtgccttacttcgtaggcaccctgaacctaatttgcggaagtccagagagttcgaggcattttgtgctaagaatggttttgaattggatgtttcatcatctggtcaactccacctttcactttctagaataaaggaaaagctgcaggaggatcctgttatgtttgatattatcatgttttatgcttcaaagcaaatgcagtcagcagaatacttttgcacaggggacctgataagcaagaaagatgattgggcacattatgcgctgtctgtccctttgtatacacacttcacttcaccacttcgaagatatcctgatataattgttcacaggactctgaatgcggtgattgaagctgaacaagtgtatatgaaacagaagaaatcttccgcaggccagaatggagtcaaagcatcttgtgaattgatggatatgtgttttactggccttcagttgtgcaaggatgctgctgaatctgaagaagggaaaaaggcactttctgctgcagctaagaaatttaaggttccttcctctgaaaatcttggggagattgctgaacactgtaatgaaagaaagtgggctggtcgccgtgcagaagaagctggacagaagctctacatgtgggctctgataaagaacaaagagactgtggtatgcaatgctagagttctgggacttggtcccaggttcatgtcagtttatgtgcccaagcttgcgatggaacgaaggatatattatgatgaagttgagggattatcagttgaatggttagaagtcactggaacgttagtgcttgatacatgcaggaacaagcctgctcaaaggagaggaactcagatgaagcgcaggccgattgaggaagtcgcggtggtggtgaacccttcagagttgtctgaagaagacgaggaatcaggagcaacagaagctggcggctgcactgccaagtctgttttgttgagtggcgacgcagtgaaagctcagaccgccccagccgttctccccttggtgatacattaccttagtgacatccctgtggttcttcatgcaattggtggtgaggattgtgcggtggacattggcgtaagactgtacatggcgtcatacttcaagttataggaaacctcctgtcatgacaggaaatagttggtcgatttcaacagtttttcagtcgaacgaaagtaataaaatgatggtgggcaaattccaacttagtgctgtagatatttcattcatgtatagcaaattaggtacccttccagcacagaaaaagaaaacccctaccccaatccgttctttcccatcctgtgacatgaggttttgatggcagagtcaagtggcttccgtttttaatcccagactgcctgttgaggtaccaaaatggtggaagtgggagtctacattaatgccacactattttagtggttccatcaatgatcttctgctagtttgtgaaacgagggtttgttccttttgctcttaattcatgtggattgagtgagtttaaatcctaaataaattaaaaaattataattcattcaatcttatccaattcatatgggacagaaataactgaactagccctgatgtttttttatgggttcactcaaatgttgggataataagtctatttggtgattgttgctgtcgtttgtgtaattgtgttttcatccgtttcgtgaggccgagatatatggcgcagtactgcagtgctctttatgaagttgtggtcatgtaattattctttgcgattgcagttttacccgtgcacatgcgagcaactcagaaatgttg

SEQ ID NO: 216862 - DNA, 4119 bp, Zea Mays
aagctgcttcgcgaagcaacaactatccctcgttccctcccagtccccgcctcggctccctcgcctcctcctccattcctacttccttcgctctctcctttatcccttccttgcagtccccttctctccccgacgcctcgtttttttatccatcggtgtcgacgaggggaccgacgaagcggaggacgcctcagatctagggttccttccttgcgtgcccttcgaggagagacagagagagggtctgcatcatgagggccaccggggagcacacaactgcggtgcccatgcccgccccgccgccgcctcctgctgcggcctctgcgagtgaggaagacgacaaggagaggaggaagaaccgccgccgctcctcgcggcgctccaggcaggcggccgttgccgcgccgcagggcctgcacgcggacgctgcggggccgaggacggtcagatcgatgccgcccatgcacgtgggcagcagcgccggcgtcgacgccgaggcagagccgtccgcggcgggaacgagccaatcctgccccctgccccccacgccgagacccacggaggcgcctgtgtcgaggctgggcaggggagctccggggacgcgttacttccagcctcactggcctgagcgggccgtggaggaggccgtcaaggagagggcatgctttcgtggggaagttcagggtgaatgctcacaaccgaaatgaggcgtactgtacgattgatggcgtctcggtggatgttctcattacaggattggcacaaaaccgagcggttgaaggtgatcttgttgctatcacactggaccctgttgctcactggactagaatgaaaggaccaaacgttgcgtgcaaccctctgataggagattctgtggtgtgtgaggttagtgaaacaaataggaatcatagttggaagaaaggacaggcagacgacggctgcaagtttgaaaattgcagtaacggagtacctgttttggataggacacatccccctcacaagaacagtggttttagtcaagctgttaagtgtggaaatgggaatgctactatccctgaaaggaatgagatagacttgaatgatggaaagagtgaggttgcaagagcattacaaaggatcagtgccacgatatactctcatccaagcagacgtcctactgggaaagtattatcaataattaagaagtctccgcgccgtgatgccattgtaggtttccttgcttctttctcagagttccctgacggagagcagcagaaaaaccagatgggtctaaacaggatgaacaacagaacacaatcagttacaggcttgttttatctcttgcctactgaccccaaattccctcagatggttgtgagttttagcactttgccagatagtgtcaggcagagcctaagaggtaacgtagctgttaagaaggaattggttgctgcacgaattgatgaatggaatgaggaaaacctctatccctatgcccatgttatacggttcttggggaaggttggacatgtcaaaacacacatggatgctatattatttgagaatgtgatctgtgatgctgagttttcccctgagtccttggcatgccttcctgacaattgttggaagattcctcaaaaagaacttgaagctagaaaagatttgaggaaggtcttgacttttacaatagaccctcctactgcatcggatctggatgatgctatatcaattgaaatactttcaggaggaactgtccgtattggggttcacattgctgatgtttcttactttttacatccagagactgctttagatgctgaagctcaaagtcgatctacaagtgtttacaccctgaaacataaaatctcaatgttgccttcaggattttcggaagtggtttcacttaatccaggtgtagataggcttgccttttcaattatttgggatattgatcctcatggtaacctaattagtcgttggattggtcgaagcatcatcttttcgtgctgcaagctgtcatatgagcttgtgcaggatctgatttgtaatgaaaccagtcagactaggcctgaagtttcttctcttgaagtacatggtatatttgggagagatgatgttatcaagtcacttagaggcctctatgaagtctcaaaaaatctgaaggaaattaggttcaagggtggagctctttctcttgatactgcaaagattatgatcctgtttgatgaagatggggatccatgtgatagctatcgttacgtgaggaagaatgcgtgcttcattgttgaggagctaatgttgttggcgaatatgtcagctgcagaagtcatatctaatgcatttcctgattgtgccttacttcgtaggcaccctgaacctaatttgcggaagtccagagagttcgaggcattttgtgctaagaatggttttgaattggatgtttcatcatctggtcaactccacctttcactttctagaataaaggaaaagctgcaggaggatcctgttatgtttgatattatcatgttttatgcttcaaagcaaatgcagtcagcagaatacttttgcacaggggacctgataagcaagaaagatgattgggcacattatgcgctgtctgtccctttgtatacacacttcacttcaccacttcgaagatatcctgatataattgttcacaggactctgaatgcggtgattgaagctgaacaagtgtatatgaaacagaagaaatcttccgcaggccagaatggagtcaaagcatcttgtgaattgatggatatgtgttttactggccttcagttgtgcaaggatgctgctgaatctgaagaagggaaaaaggcactttctgctgcagctaagaaatttaaggttccttcctctgaaaatcttggggagattgctgaacactgtaatgaaagaaagtgggctggtcgccgtgcagaagaagctggacagaagctctacatgtgggctctgataaagaacaaagagactgtggtatgcaatgctagagttctgggacttggtcccaggttcatgtcagtttatgtgcccaagcttgcgatggaacgaaggatatattatgatgaagttgagggattatcagttgaatggttagaagtcactggaacgttagtgcttgatacatgcaggaacaagcctgctcaaaggagaggaactcagatgaagcgcaggccgattgaggaagtcgcggtggtggtgaacccttcagagttgtctgaagaagacgaggaatcaggagcaacagaagctggcggctgcactgccaagtctgttttgttgagtggcgacgcagtgaaagctcagaccgccccagccgttctccccttggtgatacattaccttagtgacatccctgtggttcttcatgcaattggtggtgaggattgtgcggtggacattggcgtaagactgtacatggcgtcatacttcaagttataggaaacctcctgtcatgacaggaaatagttggtcgatttcaacagtttttcagtcgaacgaaagtaataaaatgatggtgggcaaattccaacttagtgctgtagatatttcattcatgtatagcaaattaggtacccttccagcacagaaaaagaaaacccctaccccaatccgttctttcccatcctgtgacatgaggttttgatggcagagtcaagtggcttccgtttttaatcccagactgcctgttgaggtaccaaaatggtggaagtgggagtctacattaatgccacactattttagtggttccatcaatgatcttctgctagtttgtgaaacgagggtttgttccttttgctcttaattcatgtggattgagtgagtttaaatcctaaataaattaaaaaattataattcattcaatcttatccaattcatatgggacagaaataactgaactagccctgatgtttttttatgggttcactcaaatgttgggataataagtctatttggtgattgttgctgtcgtttgtgtaattgtgttttcatccgtttcgtgaggccgagatatatggcgcagtactgcagtgctctttatgaagttgtggtcatgtaattattctttgcgattgcagttttacccgtgcacatgcgagcaactcagaaatgttg

SEQ ID NO: 216863 - DNA, 1710 bp, Zea Mays
ctcgaacgaatccactttagattagagcgggtcctatgtgcccaactcaactcaataagtccaagcctatccattggcgttgaaaaacagacctctcgacgcctaccattcaccgcgcaggcgccgccatgggcattggagtcgttacgaggtcgaagaggaggagattggacgaggaacagcgcctcgccgacaggatcagcagcctccccgacgacgtcctcggtgaaatcgtgtccctccttcccaccagagccggcgcccgcacgcaggtgctctcctcccgctggcgccacatctggcgctccgctcctctcaacatggacctccatcccgacggccctgaatggcggcacatgcccgtcgagcagatcaggcgcgtgctctcggcgcacccgggccccggacgccgcctctcggtccccagcagattcggctacctccactggatggacggctggcttcggtccgcagccgccctagggcctagacaacctccaggtgctcgaactgaactcacacagccgtcgtcctcatcactggtcggccttgcccacgcggccgcttctgccgccatcggtgcaccgcttctcgtccaccctccgcgtcgcctgcttccgcggcttcgggtttccgaccagtgccaaggcccaaggccctcccctcagccagtccgcctgccgcgtctccagcagctgactctctcgggcgtcaccatctccgagggctccctgcatgccatgctcgctggcgcccctgccctgcggagcctgctcctgctcgacagcaacgggtttgcccgactgcagatagcgtcctgtagcatagaaaacatcggcgtgcgttcccggtgcagaggtgctaagctacaacacctcgttctggaggacacgccgtctctgaagagattgctactgttcgaaggaaccaatcacatggatatctcggtggtctccgcgccaagattggatgtttttgggaaactctgtgacgacgccaccaaacttaagtatagcagcgccacgacggatcttcagggatcacccactgttagcgtgctgcacagtgtgaagcttctagctttgtctagtgtgaggatttcgttgcatgcgctgattgacttgctcaagtgcgttccccacctggagaagctgtacatcgaggcatcaagtgtttgtgtgagaaatggatcgtatcataaataccggaagcacatcggcaccctatgcgtccgtctgaggagggtcgtgctaggagggtacctaggcagcaagccacacgtcaacgtagccaaattcttcgtatcgatcgcgagagcgctggagtcgatgaggctcgagtcatgggtaattataagcaaagcctggttggcgagacagcataggctgcatgctcaacagcaggaagagggcgtcgtctagggctgcacggttcgagttcgtagctcataaagcaaaaatattcaccggttcatcacttgatgatctgcgtgctgagcaggtgcatgatctgtcgacggccgacccccttttcaaatgtggttttaggtctctggtctgatatttggttttgatttgacctttaattgcattgtgttatctctctttcctagagacactgtgattttatcaacccgggaatttggtgctattatatcactatcgaaatccgggcctttgccgagtgtcagcggttttgctgagtgctttt

SEQ ID NO: 216864 - DNA, 1128 bp, Zea Mays
atggtacttcaacttctaccagtgaattccctatcttgtaagcaaattgagaggcgatcatgcatttctttggaggcatttatacgtgattactttttatgtgagtcccctgttatactcagtggatgcattgatcattggcctgcaaggaaaaagtggaaggacataaagtacctagagagtgtagctggagatcggactattcctgttcaggttggaaaaaattatgcatgtactgagttgaaacaggagcttatcacattttctcaatttcttgagaggatgtggtcaagtgattctgcaaacttggcatatattgcgcagcatcaattgtttgaccagataaaggagctccacgaagatattgctgttcctgagtactgttcagctggtggtggcaaactccagtcacttaatgcttggttcggccctcatgggacaataactcctttgcatcatgacccacatcacaacctttttgctcaggttttgggaaggaagtatgttagactctatcctgcttctacatctgtgggcctataccctaacacagaaagcatgctaagcaatactagtgagattttctcctggacgccctgatcaaccctatcattcacgttcaacttttgcttcgttacaatccaaatccattccgtagcgtgttgtgatcctgaagctgctctctgcaccgcccaataaggtagacctcgacaacactgacggaaaagagtacccggagactgcagctcttgagttcgtggactgcgtattggaggaaggtgacctgctttacattcccccgaaatggtggcgttacgtgagatctctctctattagcttttctgttagctttcggtggcgaacatcacagcttccttgaggggaggttcataacgatggttttgacaaatttgatcgtacgtccacgatgtcgttccaatcatcctattggtagagacttaataagaagacttcattgagctgagcccatatttcgtggtctaagtgttgtgtgcggtcgcctcactagactgggattgtaaattgttttcacgacaatgattggtttcaaacatactaagcggtactatcaggtactagtgtggccgttttatattgtgaactgat

SEQ ID NO: 216865 - DNA, 895 bp, Zea Mays
atggtacttcaacttctaccagtgaattccctatcttgaaaaagtggaaggacataaagtacctagagagtgtagctggagatcggactattcctgttcaggttggaaaaaattatgcatgtactgagttgaaacaggagcttatcacattttctcaatttcttgagaggatgtggtcaagtgattctgcaaacttggcatatattgcgcagcatcaattgtttgaccagataaaggagctccacgaagatattgctgttcctgagtactgttcagctggtggtggcaaactccagtcacttaatgcttggttcggccctcatgggacaataactcctttgcatcatgacccacatcacaacctttttgctcaggttttgggaaggaagtatgttagactctatcctgcttctacatctgtgggcctataccctaacacagaaagcatgctaagcaatactagtgaggtagacctcgacaacactgacggaaaagagtacccggagactgcagctcttgagttcgtggactgcgtattggaggaaggtgacctgctttacattcccccgaaatggtggcgttacgtgagatctctctctattagcttttctgttagctttcggtggcgaacatcacagcttccttgaggggaggttcataacgatggttttgacaaatttgatcgtacgtccacgatgtcgttccaatcatcctattggtagagacttaataagaagacttcattgagctgagcccatatttcgtggtctaagtgttgtgtgcggtcgcctcactagactgggattgtaaattgttttcacgacaatgattggtttcaaacatactaagcggtactatcaggtactagtgtggccgttttatattgtgaactgat

SEQ ID NO: 216866 - DNA, 999 bp, Zea Mays
atggtacttcaacttctaccagtgaattccctatcttgtaagcaaattgagaggcgatcatgcatttctttggaggcatttatacgtgattactttttatgtgagtcccctgttatactcagtggatgcattgatcattggcctgcaaggaaaaagtggaaggacataaagtacctagagagtgtagctggagatcggactattcctgttcagataaaggagctccacgaagatattgctgttcctgagtactgttcagctggtggtggcaaactccagtcacttaatgcttggttcggccctcatgggacaataactcctttgcatcatgacccacatcacaacctttttgctcaggttttgggaaggaagtatgttagactctatcctgcttctacatctgtgggcctataccctaacacagaaagcatgctaagcaatactagtgagattttctcctggacgccctgatcaaccctatcattcacgttcaacttttgcttcgttacaatccaaatccattccgtagcgtgttgtgatcctgaagctgctctctgcaccgcccaataaggtagacctcgacaacactgacggaaaagagtacccggagactgcagctcttgagttcgtggactgcgtattggaggaaggtgacctgctttacattcccccgaaatggtggcgttacgtgagatctctctctattagcttttctgttagctttcggtggcgaacatcacagcttccttgaggggaggttcataacgatggttttgacaaatttgatcgtacgtccacgatgtcgttccaatcatcctattggtagagacttaataagaagacttcattgagctgagcccatatttcgtggtctaagtgttgtgtgcggtcgcctcactagactgggattgtaaattgttttcacgacaatgattggtttcaaacatactaagcggtactatcaggtactagtgtggccgttttatattgtgaactgat

SEQ ID NO: 216867 - DNA, 1003 bp, Zea Mays
atggtacttcaacttctaccagtgaattccctatcttgtaagcaaattgagaggcgatcatgcatttctttggaggcatttatacgtgattactttttatgtgagtcccctgttatactcagtggatgcattgatcattggcctgcaaggaaaaagtggaaggacataaagtacctagagagtgtagctggagatcggactattcctgttcaggttggaaaaaattatgcatgtactgagttgaaacaggagcttatcacattttctcaatttcttgagaggatgtggtcaagtgattctgcaaacttggcatatattgcgcagcatcaattgtttgaccagataaaggagctccacgaagatattgctgttcctgagtactgttcagctggtggtggcaaactccagtcacttaatgcttggttcggccctcatgggacaataactcctttgcatcatgacccacatcacaacctttttgctcaggttttgggaaggaagtatgttagactctatcctgcttctacatctgtgggcctataccctaacacagaaagcatgctaagcaatactagtgagacctcgacaacactgacggaaaagagtacccggagactgcagctcttgagttcgtggactgcgtattggaggaaggtgacctgctttacattcccccgaaatggtggcgttacgtgagatctctctctattagcttttctgttagctttcggtggcgaacatcacagcttccttgaggggaggttcataacgatggttttgacaaatttgatcgtacgtccacgatgtcgttccaatcatcctattggtagagacttaataagaagacttcattgagctgagcccatatttcgtggtctaagtgttgtgtgcggtcgcctcactagactgggattgtaaattgttttcacgacaatgattggtttcaaacatactaagcggtactatcaggtactagtgtggccgttttatattgtgaactgat

SEQ ID NO: 216868 - DNA, 3719 bp, Zea Mays
atactagaatccccaataagcccagggtgagaggatactggattcgaatgggccggacaatttgtttcgtccaatagactgaaatgaaggcctgctatatgtcaataacgggcccgcttgttatccattatccacggaatggaatcgaatcgtccaggaaaggggaggaccggagcgagagcgagatggtagtggtggccgccgcggccgcacgcggccgcgctgtaaagcccctgttcctcgtcctcgtccaccacagccgccccgcgccccgcctcccccgccgaaccgcccgcgcccggccgctgcgcttcctctcctgctcgacctcagcgccgccgctgttcgcagccgtcgcatccatggactcgccgccccagggttaccgcaccaacgtcggcatctgcctcgccgacccatccctcaccaagattttctcggcttctaggatcgacattcctagcgcgtggcagatgcctcagggtggtatagatgcaggggaagaaccaagggcggctgccttcagggaattgagagaagagactggtgtcacatccgcagagatcgtggctgaggctcccgtctggttaacatatgatttcccgccagatgtcagaaccaaactgaatgccaggtggggaaccgattggaaaggccaagctcaaaaatggtttttatttaggcttactggaaatgacgatgagattaaccttaatggtgatggatctgagaagccagagtttggtgaatggacatggatgacacccaaggaagttatcgaaaaggcagttgatttcaagaaacctgtatatgaggaagcattgaaacactttgccccctacctgcagtcagatccagccgcttcatcatagaagatttggccaatttgcttgcatccctgctgtatctggacccccaataatttgacacgacgcaatgtagccatgaggtgtgctatacaatttgatagtgtgtggcctgtttgagtgaattatatatgccagcattggatcctcgccctctacttagtcacataagtatacaataagtggtggaaacagtttcagccaatctggaacatggtggccagtgtatcttgtctgccaatgactgaatgctttaggttgaagcaataccataattccagagagactgcggtacagcaacctcaggttatgtggggggtcgtcggcaaaacgacgctcgtttggcattggctacggcagaaactagtgtctggctgccattggttgtgggaggagcagaggaaaacaaattgttggttacactctgtactactgcgtcatgatattgtcggctttcgctttgtggcttttggaggaaaactggagatgtggcagctttggctttacgcatcttggaggaacaggagatataaacacacgcatttcgtttttttttttgttgagttgctgtgctccgtcttcgctgcagaatccagatcaaatgtggtggtggtggtgctgctgctgctggctacacgaatgtggatagcagcatttgtcgtccttgaatgcctgccgagaaaggttggtggtggtagagagagagagagaggagttcttctctcctctcgtctcgtctacctctgtgttctcttctctctcgcctcctcagatgggatggcattacatgtttccttcctggagaagaggctaccgaggccttttcttggtgacgtcgatgcgccaccagccccagtcactgccactgcccactgggaccaaccccgcggacggaggaccacttgtacaccaggtcgatcacgaccataccgtgggctggcctgcagatcttcaagtatacgtgccagtctttatcttggcataaacagatagtaccagtgcacgtagcctctagccagagtgcatgagtcaaagcgctatattctctgtagtgaagtgaagcacgcacgcacgttgcttttccttcactccatcggccaccaagttattaatgcattgcatgccagctggcccatctgattcctagcgacaggaacatcattaagcaactagtactagagtaatgtaggttgatgtcgatgatgtgtcccctcagaatttttgttgacactcgttgctggacctggacctgactagatggcggatggggggccattaccatcatccattcattgtgcgtgcagtactcctgctaccgcctccacggctctccatccatccatccatccatttgcatgcatgacccatcaagtatggaggaagcattacactacacatgtcttggccgaccatattctgctcgacggaaaaaagccagagattggagtctcaacactgactggaattacacatgaaaaaaaaaacaaatgagatgcctaccaccaatgccaaaaaaaaaaaaaaaaactaggaaacatatcatcatgatcatgtatctacaaagcagagcaggagaagaagaagcataaggttgtgcacatggacgacgttcgtttgtacctacagcaacgaattccaacactgtgcgaaaacaggcaagggggaggaccgggagacaagagagacacatgtactgctgcttattatcccatggatggaatgatggatgcatctgatccgatcaccggccgtctgccgaggtgaaggactcggcgaagccggcggggcgggcggggatgctgcccttgctgtcgtccaggctcatgacgctcccgccgccgtccgtcaggccgccggcctccgcgtcctgccagctcttcaccatctgcagcagcggcaggtgcaggtcgatgcccaggtagtcctcggcctcgtccttgacttggcgctggaaagatgaagctcaacaactttatggagaaatggaagagaagcattccttcaggaatgtgctgtccggatcttgagatgcttgaaggggaagtgttgtgtgaaaagcttggggctgagacctgggtgcatgctttcagtgttactgatctgccactggcgcctgctgagaggttcgcagcacttttccgtgatcaggacattggaatggtagaaaaaatagctatggaccttgcagatatagcttatggtgataatgcacactggaagttggtcaggatgtctcatgcaaactatcattcatcatgtctttgctgcggaaccttgttaaggaggggcatcatgtcttaatcttttcgcagacccgtaaaatgctgaaccttattcaggaagcaatattattagagggctacaagtttttgcgcgaccaaggtttctgagcgcgaaaggattgtgaaggacttccaagagggtcctggagctccaatatttttactaaccacacaagttggtggacttggacttaccaaggcagcacgcgtcatagtagttgatcctgcttggaacccaagtacagacaatcaaagcgtagatcgtgcttaccgaattggccagaacaaagatgtgattgtatacagctatcttgtttgtgccctcaggagattccagagctttttagtttgccacaacaaggttttgatgtttccctcacgcataagcagttgcaagaagagcatggtcaacaagttgttatgtaagagatctgttttagctgaacttcctttaatcgagcacggttaatttgattttgatgatagtattatgtgccactatcacataaatttgaaatattagtggtgtcaatcagacagaacctgcgaatcgcaaaagtgttgaattccc

SEQ ID NO: 216869 - DNA, 3589 bp, Zea Mays
attatccacggaatggaatcgaatcgtccaggaaaggggaggaccggagcgagagcgagatggtagtggtggccgccgcggccgcacgcggccgcgctgtaaagcccctgttcctcgtcctcgtccaccacagccgccccgcgccccgcctcccccgccgaaccgcccgcgcccggccgctgcgcttcctctcctgctcgacctcagcgccgccgctgttcgcagccgtcgcatccatggactcgccgccccagggttaccgcaccaacgtcggcatctgcctcgccgacccatccctcaccaagattttctcggcttctaggatcgacattcctagcgcgtggcagatgcctcagggtggtatagatgcaggggaagaaccaagggcggctgccttcagggaattgagagaagagactggtgtcacatccgcagagatcgtggctgaggctcccgtctggttaacatatgatttcccgccagatgtcagaaccaaactgaatgccaggtggggaaccgattggaaaggccaagctcaaaaatggtttttatttaggcttactggaaatgacgatgagattaaccttaatggtgatggatctgagaagccagagtttggtgaatggacatggatgacacccaaggaagttatcgaaaagttgatttcaagaaacctgtatatgaggaagcattgaaacactttgccccctacctgcagtcagatccagccgcttcatcatagaagatttggccaatttgcttgcatccctgctgtatctggacccccaataatttgacacgacgcaatgtagccatgaggtgtgctatacaatttgatagtgtgtggcctgtttgagtgaattatatatgccagcattggatcctcgccctctacttagtcacataagtatacaataagtggtggaaacagtttcagccaatctggaacatggtggccagtgtatcttgtctgccaatgactgaatgctttaggttgaagcaataccataattccagagagactgcggtacagcaacctcaggttatgtggggggtcgtcggcaaaacgacgctcgtttggcattggctacggcagaaactagtgtctggctgccattggttgtgggaggagcagaggaaaacaaattgttggttacactctgtactactgcgtcatgatattgtcggctttcgctttgtggcttttggaggaaaactggagatgtggcagctttggctttacgcatcttggaggaacaggagatataaacacacgcatttcgtttttttttttgttgagttgctgtgctccgtcttcgctgcagaatccagatcaaatgtggtggtggtggtgctgctgctgctggctacacgaatgtggatagcagcatttgtcgtccttgaatgcctgccgagaaaggttggtggtggtagagagagagagagaggagttcttctctcctctcgtctcgtctacctctgtgttctcttctctctcgcctcctcagatgggatggcattacatgtttccttcctggagaagaggctaccgaggccttttcttggtgacgtcgatgcgccaccagccccagtcactgccactgcccactgggaccaaccccgcggacggaggaccacttgtacaccaggtcgatcacgaccataccgtgggctggcctgcagatcttcaagtatacgtgccagtctttatcttggcataaacagatagtaccagtgcacgtagcctctagccagagtgcatgagtcaaagcgctatattctctgtagtgaagtgaagcacgcacgcacgttgcttttccttcactccatcggccaccaagttattaatgcattgcatgccagctggcccatctgattcctagcgacaggaacatcattaagcaactagtactagagtaatgtaggttgatgtcgatgatgtgtcccctcagaatttttgttgacactcgttgctggacctggacctgactagatggcggatggggggccattaccatcatccattcattgtgcgtgcagtactcctgctaccgcctccacggctctccatccatccatccatccatttgcatgcatgacccatcaagtatggaggaagcattacactacacatgtcttggccgaccatattctgctcgacggaaaaaagccagagattggagtctcaacactgactggaattacacatgaaaaaaaaaacaaatgagatgcctaccaccaatgccaaaaaaaaaaaaaaaaactaggaaacatatcatcatgatcatgtatctacaaagcagagcaggagaagaagaagcataaggttgtgcacatggacgacgttcgtttgtacctacagcaacgaattccaacactgtgcgaaaacaggcaagggggaggaccgggagacaagagagacacatgtactgctgcttattatcccatggatggaatgatggatgcatctgatccgatcaccggccgtctgccgaggtgaaggactcggcgaagccggcggggcgggcggggatgctgcccttgctgtcgtccaggctcatgacgctcccgccgccgtccgtcaggccgccggcctccgcgtcctgccagctcttcaccatctgcagcagcggcaggtgcaggtcgatgcccaggtagtcctcggcctcgtccttgacttggcgctggaaagatgaagctcaacaactttatggagaaatggaagagaagcattccttcaggaatgtgctgtccggatcttgagatgcttgaaggggaagtgttgtgtgaaaagcttggggctgagacctgggtgcatgctttcagtgttactgatctgccactggcgcctgctgagaggttcgcagcacttttccgtgatcaggacattggaatggtagaaaaaatagctatggaccttgcagatatagcttatggtgataatgcacactggaagttggtcaggatgtctcatgcaaactatcattcatcatgtctttgctgcggaaccttgttaaggaggggcatcatgtcttaatcttttcgcagacccgtaaaatgctgaaccttattcaggaagcaatattattagagggctacaagtttttgcgcgaccaaggtttctgagcgcgaaaggattgtgaaggacttccaagagggtcctggagctccaatatttttactaaccacacaagttggtggacttggacttaccaaggcagcacgcgtcatagtagttgatcctgcttggaacccaagtacagacaatcaaagcgtagatcgtgcttaccgaattggccagaacaaagatgtgattgtatacagctatcttgtttgtgccctcaggagattccagagctttttagtttgccacaacaaggttttgatgtttccctcacgcataagcagttgcaagaagagcatggtcaacaagttgttatgtaagagatctgttttagctgaacttcctttaatcgagcacggttaatttgattttgatgatagtattatgtgccactatcacataaatttgaaatattagtggtgtcaatcagacagaacctgcgaatcgcaaaagtgttgaattccc

SEQ ID NO: 216870 - DNA, 2129 bp, Zea Mays
tcaatacttggagtgagtgtaggtttttatttaggcttactggaaatgacgatgagattaaccttaatggtgatggatctgagaagccagagtttggtgaatggacatggatgacacccaaggaagttatcgaaaaggcagttgatttcaagaaacctgtatatgaggaagcattgaaacactttgccccctacctgcagtcagatccagccgcttcatcatagaagatttggccaatttgcttgcatccctgctgtatctggacccccaataatttgacacgacgcaatgtagccatgaggtgtgctatacaatttgatagtgtgtggcctgtttgagtgaattatatatgccagcattggatcctcgccctctacttagtcacataagtatacaataagtggtggaaacagtttcagccaatctggaacatggtggccagtgtatcttgtctgccaatgactgaatgctttaggttgaagcaataccataattccagagagactgcggtacagcaacctcaggttatgtggggggtcgtcggcaaaacgacgctcgtttggcattggctacggcagaaactagtgtctggctgccattggttgtgggaggagcagaggaaaacaaattgttggttacactctgtactactgcgtcatgatattgtcggctttcgctttgtggcttttggaggaaaactggagatgtggcagctttggctttacgcatcttggaggaacaggagatataaacacacgcatttcgtttttttttttgttgagttgctgtgctccgtcttcgctgcagaatccagatcaaatgtggtggtggtggtgctgctgctgctggctacacgaatgtggatagcagcatttgtcgtccttgaatgcctgccgagaaagcaacgaattccaacactgtgcgaaaacaggcaagggggaggaccgggagacaagagagacacatgtactgctgcttattatcccatggatggaatgatggatgcatctgatccgatcaccggccgtctgccgaggtgaaggactcggcgaagccggcggggcgggcggggatgctgcccttgctgtcgtccaggctcatgacgctcccgccgccgtccgtcaggccgccggcctccgcgtcctgccagctcttcaccatctgcagcagcggcaggtgcaggtcgatgcccaggtagtcctcggcctcgtccttgacttggcgctggaaagatgaagctcaacaactttatggagaaatggaagagaagcattccttcaggaatgtgctgtccggatcttgagatgcttgaaggggaagtgttgtgtgaaaagcttggggctgagacctgggtgcatgctttcagtgttactgatctgccactggcgcctgctgagaggttcgcagcacttttccgtgatcaggacattggaatggtagaaaaaatagctatggaccttgcagatatagcttatggtgataatgcacactggaagttggtcaggatgtctcatgcaaactatcattcatcatgtctttgctgcggaaccttgttaaggaggggcatcatgtcttaatcttttcgcagacccgtaaaatgctgaaccttattcaggaagcaatattattagagggctacaagtttttgcgcgaccaaggtttctgagcgcgaaaggattgtgaaggacttccaagagggtcctggagctccaatatttttactaaccacacaagttggtggacttggacttaccaaggcagcacgcgtcatagtagttgatcctgcttggaacccaagtacagacaatcaaagcgtagatcgtgcttaccgaattggccagaacaaagatgtgattgtatacagctatcttgtttgtgccctcaggagattccagagctttttagtttgccacaacaaggttttgatgtttccctcacgcataagcagttgcaagaagagcatggtcaacaagttgttatgtaagagatctgttttagctgaacttcctttaatcgagcacggttaatttgattttgatgatagtattatgtgccactatcacataaatttgaaatattagtggtgtcaatcagacagaacctgcgaatcgcaaaagtgttgaattccc

SEQ ID NO: 216871 - DNA, 3263 bp, Zea Mays
atggccgccgctaggatcgccgcctgcaccacctccgcccgcaccgccctcgccttggcagacgaccccgcgccgccggacacgctggacgtggtgcgccggcagcgccagctcctacgccgcgccgcggccctctgcctcgaccccatcgccgaggagtccgacgttatttgccccctcccagtccctcgcatggccgttttttcagcgtcgaaggcggtctcggatgaatccgctttccgtgtggccggtagagtcttcgtcttcgtctcgtctcgtctcgtcccaaacacgcgaacgcgacacgccgacacccgtatcgtaccacctaacttttgctccgagatctcctcctcccgtctcatcagtcttttccaatcaatcaccagctcaaacttgtacccaaaaccctacaccggagggagagggatggtcaagaaagccgtctccaccgcgccagcagacgccgaggccgacgagcgccgccgcctccgctcgctcgccttctccaacggcctgctccagcgaggcgaccccgcggcgccgcgggcgccgctcgcgccggcggctgccgtcacgcgcctacagggccgcgacgtcgtccgccgtggcggccagcgaaagagccgctacctcttctccttccctggcctcctcgcgccagcagcctcgggtggccgggtcggagagctcgccgacctcgggaccaagaaccccctgctgtacctcgagttcccacagggaaggatgaagctcttcgggacgcacgtttaccccaagaacaagtacctcacgctgcagatgaccaggtcggccaagggcgtcgtctgtgaggacgtctttgagagcctgattgtgttttctgaagcctggtgggtgggaacaaaagaagataatccggaagagctcaaacttgagtttccaaaagaattccaaaatgatggcacgacagcagactgtgatttcagaggtggtgcaggtggtgccatcgatgaagcaactggaagcaaagctggaaaggaaattgcagaacctcgttccccaaagtttgcatctgatgacgatgctcctgaggattcaaatcataaggatgagaataacacacagactatgagtggaacaccagttagacagtctgctaggaatgcagggaaaaccttgaaaaggtacacagacttatcttctggaggtgaatcgtctgacaataataatgaaactgatatatctgaggacttggatgataaggaggtggagagtccagaaattaaggacgagattgaaagcgaagatgtcaaacccgcagattcttcagcaatttccctctctagcaagaaggagcctcttgttcaggctactttgtctagcatgtttataagggcagaagaaaaaaagagatctacaaggagtcctaaagggtcccctgcaaccaaaggtgctgctgctaagaagcagcgagcaagtccaatggcaaaacagccagcagggatcaagaaggttagcggaactcggggaaagaaaaaaccaaaggtgggagaagatgaaatcgaagagctctcaagttcctcccaggagtaaggaagccgacaccacttggagttgctgccaactaccgggctcggctgtcaaattctctatctggcagccagcccgtgtccaattccaactccaccggtggtaaaccatcgacagcaggagcagggagggcaggctgcacaagaaaagagcatcattcctgctgatcggctcggctccactccaccccgaataaaatggcttccttctcgggacatctccaccgccccctgtccgccatggccgtggccgccttcgccgccgtctcctcccacgagcttcccgacaagctgtcccaccacaggcttcctgatgccagcacaggcacggacgcgctcgcctcgcttccattgaccagacggtgtaccagtacgccaactttgccaaaacctcgggacaggccgatgcgatgcctgcaattccttcctcgccgtccgatgtgctgtaccgctggcacctgccagaccccagggtctatgccgacttccctgacaagtctcagacggtcgtggtccttcttggttggttgggctcaaggcagaagcacctcaagagatatgccgattggtacacctccaggggcttccatgtcgtcactttcaccctcccgatgtctgacattctcagttataaccttggagggaaggctgagaagaacgttgagatgctatctgaacatattgctgactgggtcagggaggagagtgggaagaagattattttccacaccttcagtaatactggttggctttgttatggcgtaattctggagaacttgcaacagcatgatccttcagcagtggacaaaattaaagcttgtgtagtagactcagcacctgttgctgcacctgatcctcaggtttgggctttgggcttctcggctgccctcatgaaaaaacgcagtgtcaccacgaagggactaggttcagatgattcaaggtctgatgtcctagttgtggagtccaacaaggagctcaagctgggggcaacagaggcggttatactgtcagcgttagagagtttctttgacgttgttttgaactatccaaagatcaataggaggttgtgtgacgtgatggagctcttgtcctggaagcaacccaagtgcccccaattgtacatatacagctccgccgacagggtgatcccagcgaaatcagtggaggcattcatcgacggccagcggaaagccgggcatgaggtgagggcctgcgacttcgtgtcatcgccccatgtggaccattaccggagcaatcctgggctgtatagctctcagctggccaacttcttggaggattgtgtgcttgccaagcgctgtgagggtgcttgcacatcatgattgtctcttttatttgttcctggtcttgaattggaatgcaccagggacactgacatacgtgggttatacatgattttgttctctccttgttttaacggtctttgtgggtgacttttttttccccctcttgtaactcttgtctttgtggttggagtctgggcgcacaattgtaaaaacgtgtgaggagaaataaccaaatgaaaggagaggaaattcttttttttttatccactgagactgactgatagcctgaattacattttgattatgttactcgacctgtatggaatgatgtgcacagtgaatttggacctgtatggaatgattgaatgatgtgcacagtgaatttgtg

SEQ ID NO: 216872 - DNA, 1941 bp, Zea Mays
ctctgctctgcaatctccctcccgtgagggaggtggtggggttcctgctttcctggaacaagcaaatccttgcttgccggttcgtctcccgacgatggtgggagacgaaagcaaaagagaaagcgccgtcctttttccgcccgccgcctcgctttcaattccccaccgccctcccgtgcctactttcgttttccctttctttttttcttctcgcttttccccttctcctacgcctctgcaaattgccgagtaaggaagccgacaccacttggagttgctgccaactaccgggctcggctgtcaaattctctatctggcagccagcccgtgtccaattccaactccaccggtggtaaaccatcgacagcaggagcagggagggcaggctgcacaagaaaagagcatcattcctgctgatcggctcggctccactccaccccgaataaaatggcttccttctcgggacatctccaccgccccctgtccgccatggccgtggccgccttcgccgccgtctcctcccacgagcttcccgacaagctgtcccaccacaggcttcctgatgccagcacaggcacggacgcgctcgcctcgcttccattgaccagacggtgtaccagtacgccaactttgccaaaacctcgggacaggccgatgcgatgcctgcaattccttcctcgccgtccgatgtgctgtaccgctggcacctgccagaccccagggtctatgccgacttccctgacaagtctcagacggtcgtggtccttcttggttggttgggctcaaggcagaagcacctcaagagatatgccgattggtacacctccaggggcttccatgtcgtcactttcaccctcccgatgtctgacattctcagttataaccttggagggaaggctgagaagaacgttgagatgctatctgaacatattgctgactgggtcagggaggagagtgggaagaagattattttccacaccttcagtaatactggttggctttgttatggcgtaattctggagaacttgcaacagcatgatccttcagcagtggacaaaattaaagcttgtgtagtagactcagcacctgttgctgcacctgatcctcaggtttgggctttgggcttctcggctgccctcatgaaaaaacgcagtgtcaccacgaagggactaggttcagatgattcaaggtctgatgtcctagttgtggagtccaacaaggagctcaagctgggggcaacagaggcggttatactgtcagcgttagagagtttctttgacgttgttttgaactatccaaagatcaataggaggttgtgtgacgtgatggagctcttgtcctggaagcaacccaagtgcccccaattgtacatatacagctccgccgacagggtgatcccagcgaaatcagtggaggcattcatcgacggccagcggaaagccgggcatgaggtgagggcctgcgacttcgtgtcatcgccccatgtggaccattaccggagcaatcctgggctgtatagctctcagctggccaacttcttggaggattgtgtgcttgccaagcgctgtgagggtgcttgcacatcatgattgtctcttttatttgttcctggtcttgaattggaatgcaccagggacactgacatacgtgggttatacatgattttgttctctccttgttttaacggtctttgtgggtgacttttttttccccctcttgtaactcttgtctttgtggttggagtctgggcgcacaattgtaaaaacgtgtgaggagaaataaccaaatgaaaggagaggaaattcttttttttttatccactgagactgactgatagcctgaattacattttgattatgttactcgacctgtatggaatgatgtgcacagtgaatttggacctgtatggaatgattgaatgatgtgcacagtgaatttgtg

SEQ ID NO: 216873 - DNA, 1526 bp, Zea Mays
gccgcaagcacaacaccgaaccgctaaacccactcacgcactcgcgcccgcatcactcaccgaccagcgacggcggcgggtttctccgtccgccgccctgcccggtcacccatgtggaagcgcctcctggagaccaccaagcaggtcgtctcctccaagcaggccatcccctacgcagccgtcacccccaagcccgcgacccccgccgccgccccgtcggcatccaagcgcggcgcccctgttgctgcgccgaagctatccaccctgaagagtccctcctacaggcgacgcgccgccgccggcccagccaccaccgtcacgcaggcatccctcctgcggctcaagcaggccgcggcctcgaagaagaccaacttgccgtcctcccccccactgaatgacgcccacgccctagatgaggatgacccgccagaggctctcaccaaggcgctcatgttcgtcatagatgcacctgaagaggtggaatgtacgacttccccggaagcgctaccggagggctccgaagatgttggggaggttgccaggggcaataagatattggactttgagtggttccaggccgaaccatcgagggacccgctgatgctttggaggagggaggtggccagggagaagaagaaacactacatattcaagaatgtggagagccaccactacacaaatttgatgcgtatttgcgctaataagcttgggatggaatcgacaatagaatttcttggaaacttggggcgggaaacaggggtcaaggagttcaattcgatgattaaggtttgcctaggcaaggcaaaggcttgcagggatattgactctgctgtggagtatatttatcgggcgtatcaccttttcaataccatgaaagataaggggttcacgattgagaaagatatctatgacccattcctcttgtatcttatggacacggggatgtttgaggaatttgaggtgttcagtgcattctttaaggaggcgaatccgaagtccttctctagaatagcttattatgagatgttgctttgtattagagttcaagatgaagaaaaaatccaggaactttgtcactctgttgaagactacgatgagaaagttcactatgacctagcagagagttacatgctggcctttgctgaaagcggcagaaaggaagatctggttgccttgttggatttggttgatctatccaaagtttcaggttcaaagtacataactaatattttcaaatcattgggcaagctagaactagagaattatgtggagaaacttcttgagaggatgatgtcaaaaggatgtgctgatcacgacatttcatccttgattttggagtataccgcaaatataccgaatataatggttgaagacatgctagtggcatttcataaatggcatgagaagtttgaggtagcaccctctattgatgcatatgacaagatcgtctctatctgttgcgattcatcaaaggatcgcaaaacaggggatgtgattgggactggccgtcgccgtagaacttcgcc

SEQ ID NO: 216874 - DNA, 4857 bp, Zea Mays
gtcctttccatgtcacttctcgcctggcggccgctgcggcggtagcgatcccgacgattttgttgttagcgatgggactagaggccaggcgggccactgcgccagtggtcgcaaccctcgccgctggtatggctgtgcccccgccttcgatcggctgccttcgcgttggcggcagccggcagctggtcccccaacctccaccccccaactgatttgcttgctctccacaaggcccaccttccgctgcggcgtgatcagctccagcatccgcgtacgcagttacgcacagctggatactatgatcccggccggtatcatgatgttgcttctgtcaagagaaatcaaccatttaaatagttgatgttttattacagaagttttatctgattctgtaatttagcttcttaataccatcgtttcgcatgcattgtacgtccatggtaaaattagtttttgatagataaaaaaactcgacctgtgggggtaagacaacccattgtgacccgggacaagttttagacctatgctttgacgtggaacaaatgagagaatttttttaatcacaagtctgaaatttattgccatatggagttgtacctaggacctcatgagtattactcagactgtctatccaactcagatagaggccgtttcgatagaagtattgttttgcattgaattctaatatatagcattacgtgttggtaatgaccagttagatagcagttctttttttttgaagatgtagatagcagttctttgaggctagaaaagaagctaacaagatttcttgctttatcggtttgcagtgagaaaagtaataagcatgttaaacatgtgcaagtttcatcattgattcttagaaatctgcttgtatcatccaatggataaagagagaataaactttttggttcgatgttgacctcagcttcatagtttgcttttttcctgatgaagattgcattttgtcatgtttttctcgtcgttgctgcaagctctgcaggcatgcatcttccatgacgttcgcccaagttattcttagtctgtctttcccccaatgtttgttcttgcactgagtagtgttcttttttctaaatggtataatatctataccttctaaccattgcagttctagcatgctcaaccgtgggacgagggctaggcccgtgggccggtccggcacggcccgaaattcaaacgggccgggccgacccgaaattcaaacaatgcgggctttttcgggcttgggccgagccggaccgggcggcccgaatgtacacctataaactggagatgaaatgtcttaccatttggttgcaacataatcagacaaacataatcacaatggcttgcaattctgaaggcacatgtttacttgtaggctgtgagaatgttatcatttatcaaaactagaagttgatcgaaataattacatttacagctgatgatgttctgcaccggcaccctgcacattaagctgctatagttatctgtaacttgtcccacgaccacgacactagtatgtacctagtgacagtagtaaagaaccaagatagcagtttgagtctcaactctctgaagtcagctggtcgaagatagtgctatcttttcctaatggatcaaattgtatttgagccttggcttcagcaattcacttatcctaaggctacttttcatagtgggcttgctctaaaattttgaccatcctttattatgcatcaaggattttacaactatgtgttagaagtgtcatccagtattccagtgtaaggaactgaattcggagctttggactgctacaggagaaaatctgaaactttatgccttcccagctgaacaccaagaccttgtctacacgggagacgtacatacaaagtttcgtttcagagccatactacccgtatcgtatcgcttcatcatttggcgcaaggttgttgaagtgctttgcttgccgcttgcagatagaggccacccatctgactcttgctgggtttcgacgtgggcactcaagaggtgggcttaaattctccctttcttcttcccgcattccttaaaagcggcgtgaagttgtgagatcgatctgggtctcccttatggatcgagctggctaaccgcactttatcaggtccatcgttattgacagagctggcatgtccatgcgctgttggcaacaacggaaatctcggtggtggcccagctcctcgagcaagttttctggaaagcagatttcactggtgagctgatcgagcgcgcttttgccgtcatggatgcagccatttctgttgcagcgaccagtaacagttgcactgtgtacatgatttgtagctgatcattcattcatatagagctagctgagcaggcttgcttggttggcttggctgtccacaatttttgcttcggatagcatttctaccaggcgactgcaaagctccaagcacactcgatcttgctgtgataattctgagaggaagggcagagggagcaatggcgccggtcagtttgcctcctggtttcaggttccaccccactgacgaggaactcatcatctactaccttaagaggaagatcaacgggagacagattgagctcgaaatcattccggaggttgatctttacaagtgcgagccatgggatttgccagaaaaatcatttcttccaagcaaagaccttgaatggtacttcttcagcccccgggaccgcaagtacccgaatgggtcaaggacaaaccgtgcaacaaaatctgggtactggaaggcaaccggcaaggaccgaaaagtgaactcgcataggcgtgcagttggtatgaagaagaccctggtgtactatcggggccgagctccacatggttctcgcaccgattgggtcatgcacgagtaccgcctcgacgagagggaatgcgagactgacacgggcttacaggatgcatacgctttatgccgagtgttcaagaagacagcgcctgggccaaaaatcatagagcattatggcgcagtgcaccatcccatcgaacaccctcagtggatggcagaggcaggcagtgttgaccgccactccccaacgctggacttgtccagtgacgctagaggtgacgacttcgagagcagcagcttctcgttcccgacggaggcgcccagcatggactccatgcacgggatgcagatgagcgcaccccacgaggatggcaaatggatgcagttcctgagcgaagacgccttcaacgccaccaataaccctttcttcatgaacccaccttcttcttcaagcttcccatgcctcccgtccaaggtggatgtcgcactggagtgtgcaaggattcagcacaggctctcgttgcctcccctggaggtggaggacttcccacaggacgtcagcctcgacaccaaggcgagcgtgctccgcagcaaccccaacgaggtcgacatcctccaagagttcctctccgtggcgtcggcctcacaggagctcatcaatggcgccaccagcagctgctacgctgcagagttgtggccatcaggcgcgggcacaagcagcaccagcacccactacgtcaacgaactgtcttccctcgttgagctcggggtgaaggccaaagaggaggcagacaacttctactatatggactgcattgttggaacatctgtagggttctcatccaagtcgtcggtccaagtcgatgaacaggccgttaggttggttgagatcgctgacatcgaggggttgaagcaggaagagaagaggcaggtagagaaccttagaggtgtgcggcttcacaacaatgacctaggagagattgttgtacaaggagatgaaagcaatccaacggactgcatcacacaataccccatatcagattattctgctgacaatttaggagaagccggtcacctggccgatcccactgacgttggcggcggcctagccactgcacccatcttctcgcaatctcagcctgacgacttcgctattgggttcggtgacgtcgacgtcaaccctaatgcatctttcgacctgtacgagagggtcgacgtcaagcatgggctcttcgtctcaacggccggtgcgccgaagacattcttccaccacgttgagccatcgaagaaggtcagcgtctacctgagtcccgtagcgagcgacgtcgtcggcaaggcgaccgagaagttccattcccccattactgtgacagcaaccaaagcttccgtttttagcaagttgaaggcgctcgtcactcgtcagggacaaattcctggtggggaagacgcctccatcatgccgccggaggtccttaggcagcaaagaaatagcggcagtgagtgagttgctgcagatagtacgtactgttgtcgctcctcttaatgacaccaatggaggcaggccccacgacgatgaataccgagcaagagttggtcaagaaggcgaagaaggtgatgaagccggggcatggtggtggtgatggaaaccaagcatgtcttcttcttccactctccaagaggagcaaaggcatttccagcatgttcttctcggtgagaaatgggcataatttctgacatccgcgctcagggcgcaatcactggaaggtctttctgatcatgactcgtgcaaaaaagtaagggtcgtcttgtgctactaggcaactagtatcgggtgcctgcatgctgctggtgcatggagatgcatagtctttctcgtgcatcagtcagttaactggtgtgtataactggagaaatgtaataatccgtatttaattttttactcgtccgtacgtgtattaacacgtctgaagaaattgtacatggaaacattgtaagtgcaaatacacatgtgacatgttcatccatatacacggttacgttatatttg

SEQ ID NO: 216875 - DNA, 4982 bp, Zea Mays
gtcctttccatgtcacttctcgcctggcggccgctgcggcggtagcgatcccgacgattttgttgttagcgatgggactagaggccaggcgggccactgcgccagtggtcgcaaccctcgccgctggtatggctgtgcccccgccttcgatcggctgccttcgcgttggcggcagccggcagctggtcccccaacctccaccccccaactgatttgcttgctctccacaaggcccaccttccgctgcggcgtgatcagctccagcatccgcgtacgcagttacgcacagctggatactatgatcccggccggtatcatgatgttgcttctgtcaagagaaatcaaccatttaaatagttgatgttttattacagaagttttatctgattctgtaatttagcttcttaataccatcgtttcgcatgcattgtacgtccatggtaaaattagtttttgatagataaaaaaactcgacctgtgggggtaagacaacccattgtgacccgggacaagttttagacctatgctttgacgtggaacaaatgagagaatttttttaatcacaagtctgaaatttattgccatatggagttgtacctaggacctcatgagtattactcagactgtctatccaactcagatagaggccgtttcgatagaagtattgttttgcattgaattctaatatatagcattacgtgttggtaatgaccagttagatagcagttctttttttttgaagatgtagatagcagttctttgaggctagaaaagaagctaacaagatttcttgctttatcggtttgcagtgagaaaagtaataagcatgttaaacatgtgcaagtttcatcattgattcttagaaatctgcttgtatcatccaatggataaagagagaataaactttttggttcgatgttgacctcagcttcatagtttgcttttttcctgatgaagattgcattttgtcatgtttttctcgtcgttgctgcaagctctgcaggcatgcatcttccatgacgttcgcccaagttattcttagtctgtctttcccccaatgtttgttcttgcactgagtagtgttcttttttctaaatggtataatatctataccttctaaccattgcagttctagcatgctcaaccgtgggacgagggctaggcccgtgggccggtccggcacggcccgaaattcaaacgggccgggccgacccgaaattcaaacaatgcgggctttttcgggcttgggccgagccggaccgggcggcccgaatgtacacctataaactggagatgaaatgtcttaccatttggttgcaacataatcagacaaacataatcacaatggcttgcaattctgaaggcacatgtttacttgtaggctgtgagaatgttatcatttatcaaaactagaagttgatcgaaataattacatttacagctgatgatgttctgcaccggcaccctgcacattaagctgctatagttatctgtaacttgtcccacgaccacgacactagtatgtacctagtgacagtagtaaagaaccaagatagcagtttgagtctcaactctctgaagtcagctggtcgaagatagtgctatcttttcctaatggatcaaattgtatttgagccttggcttcagcaattcacttatcctaaggctacttttcatagtgggcttgctctaaaattttgaccatcctttattatgcatcaaggattttacaactatgtgttagaagtgtcatccagtattccagtgtaaggaactgaattcggagctttggactgctacaggagaaaatctgaaactttatgccttcccagctgaacaccaagaccttgtctacacgggagacgtacatacaaagtttcgtttcagagccatactacccgtatcgtatcgcttcatcatttggcgcaaggttgttgaagtgctttgcttgccgcttgcagatagaggccacccatctgactcttgctgggtttcgacgtgggcactcaagtggttggtccgagctctggaaaacatcggggaaatagaaagaaggattttggattatttccatcttttgaactaaagctcaaccttaaagcaaagtaatgatttttgttgaaaaataaacagagaaggtgggcttaaattctccctttcttcttcccgcattccttaaaagcggcgtgaagttgtgagatcgatctgggtctcccttatggatcgagctggctaaccgcactttatcaggtccatcgttattgacagagctggcatgtccatgcgctgttggcaacaacggaaatctcggtggtggcccagctcctcgagcaagttttctggaaagcagatttcactggtgagctgatcgagcgcgcttttgccgtcatggatgcagccatttctgttgcagcgaccagtaacagttgcactgtgtacatgatttgtagctgatcattcattcatatagagctagctgagcaggcttgcttggttggcttggctgtccacaatttttgcttcggatagcatttctaccaggcgactgcaaagctccaagcacactcgatcttgctgtgataattctgagaggaagggcagagggagcaatggcgccggtcagtttgcctcctggtttcaggttccaccccactgacgaggaactcatcatctactaccttaagaggaagatcaacgggagacagattgagctcgaaatcattccggaggttgatctttacaagtgcgagccatgggatttgccagaaaaatcatttcttccaagcaaagaccttgaatggtacttcttcagcccccgggaccgcaagtacccgaatgggtcaaggacaaaccgtgcaacaaaatctgggtactggaaggcaaccggcaaggaccgaaaagtgaactcgcataggcgtgcagttggtatgaagaagaccctggtgtactatcggggccgagctccacatggttctcgcaccgattgggtcatgcacgagtaccgcctcgacgagagggaatgcgagactgacacgggcttacaggatgcatacgctttatgccgagtgttcaagaagacagcgcctgggccaaaaatcatagagcattatggcgcagtgcaccatcccatcgaacaccctcagtggatggcagaggcaggcagtgttgaccgccactccccaacgctggacttgtccagtgacgctagaggtgacgacttcgagagcagcagcttctcgttcccgacggaggcgcccagcatggactccatgcacgggatgcagatgagcgcaccccacgaggatggcaaatggatgcagttcctgagcgaagacgccttcaacgccaccaataaccctttcttcatgaacccaccttcttcttcaagcttcccatgcctcccgtccaaggtggatgtcgcactggagtgtgcaaggattcagcacaggctctcgttgcctcccctggaggtggaggacttcccacaggacgtcagcctcgacaccaaggcgagcgtgctccgcagcaaccccaacgaggtcgacatcctccaagagttcctctccgtggcgtcggcctcacaggagctcatcaatggcgccaccagcagctgctacgctgcagagttgtggccatcaggcgcgggcacaagcagcaccagcacccactacgtcaacgaactgtcttccctcgttgagctcggggtgaaggccaaagaggaggcagacaacttctactatatggactgcattgttggaacatctgtagggttctcatccaagtcgtcggtccaagtcgatgaacaggccgttaggttggttgagatcgctgacatcgaggggttgaagcaggaagagaagaggcaggtagagaaccttagaggtgtgcggcttcacaacaatgacctaggagagattgttgtacaaggagatgaaagcaatccaacggactgcatcacacaataccccatatcagattattctgctgacaatttaggagaagccggtcacctggccgatcccactgacgttggcggcggcctagccactgcacccatcttctcgcaatctcagcctgacgacttcgctattgggttcggtgacgtcgacgtcaaccctaatgcatctttcgacctgtacgagagggtcgacgtcaagcatgggctcttcgtctcaacggccggtgcgccgaagacattcttccaccacgttgagccatcgaagaaggtcagcgtctacctgagtcccgtagcgagcgacgtcgtcggcaaggcgaccgagaagttccattcccccattactgtgacagcaaccaaagcttccgtttttagcaagttgaaggcgctcgtcactcgtcagggacaaattcctggtggggaagacgcctccatcatgccgccggaggtccttaggcagcaaagaaatagcggcagtgagtgagttgctgcagatagtacgtactgttgtcgctcctcttaatgacaccaatggaggcaggccccacgacgatgaataccgagcaagagttggtcaagaaggcgaagaaggtgatgaagccggggcatggtggtggtgatggaaaccaagcatgtcttcttcttccactctccaagaggagcaaaggcatttccagcatgttcttctcggtgagaaatgggcataatttctgacatccgcgctcagggcgcaatcactggaaggtctttctgatcatgactcgtgcaaaaaagtaagggtcgtcttgtgctactaggcaactagtatcgggtgcctgcatgctgctggtgcatggagatgcatagtctttctcgtgcatcagtcagttaactggtgtgtataactggagaaatgtaataatccgtatttaattttttactcgtccgtacgtgtattaacacgtctgaagaaattgtacatggaaacattgtaagtgcaaatacacatgtgacatgttcatccatatacacggttacgttatatttg

SEQ ID NO: 216876 - DNA, 2542 bp, Zea Mays
ctccctccctctctccttcctcatccgtccgccattagccaaggttgcactgtgtacatgatttgtagctgatcattcattcatatagagctagctgagcaggcttgcttggttggcttggctgtccacaatttttgcttcggatagcatttctaccaggcgactgcaaagctccaagcacactcgatcttgctgtgataattctgagaggaagggcagagggagcaatggcgccggtcagtttgcctcctggtttcaggttccaccccactgacgaggaactcatcatctactaccttaagaggaagatcaacgggagacagattgagctcgaaatcattccggaggttgatctttacaagtgcgagccatgggatttgccagaaaaatcatttcttccaagcaaagaccttgaatggtacttcttcagcccccgggaccgcaagtacccgaatgggtcaaggacaaaccgtgcaacaaaatctgggtactggaaggcaaccggcaaggaccgaaaagtgaactcgcataggcgtgcagttggtatgaagaagaccctggtgtactatcggggccgagctccacatggttctcgcaccgattgggtcatgcacgagtaccgcctcgacgagagggaatgcgagactgacacgggcttacaggatgcatacgctttatgccgagtgttcaagaagacagcgcctgggccaaaaatcatagagcattatggcgcagtgcaccatcccatcgaacaccctcagtggatggcagaggcaggcagtgttgaccgccactccccaacgctggacttgtccagtgacgctagaggtgacgacttcgagagcagcagcttctcgttcccgacggaggcgcccagcatggactccatgcacgggatgcagatgagcgcaccccacgaggatggcaaatggatgcagttcctgagcgaagacgccttcaacgccaccaataaccctttcttcatgaacccaccttcttcttcaagcttcccatgcctcccgtccaaggtggatgtcgcactggagtgtgcaaggattcagcacaggctctcgttgcctcccctggaggtggaggacttcccacaggacgtcagcctcgacaccaaggcgagcgtgctccgcagcaaccccaacgaggtcgacatcctccaagagttcctctccgtggcgtcggcctcacaggagctcatcaatggcgccaccagcagctgctacgctgcagagttgtggccatcaggcgcgggcacaagcagcaccagcacccactacgtcaacgaactgtcttccctcgttgagctcggggtgaaggccaaagaggaggcagacaacttctactatatggactgcattgttggaacatctgtagggttctcatccaagtcgtcggtccaagtcgatgaacaggccgttaggttggttgagatcgctgacatcgaggggttgaagcaggaagagaagaggcaggtagagaaccttagaggtgtgcggcttcacaacaatgacctaggagagattgttgtacaaggagatgaaagcaatccaacggactgcatcacacaataccccatatcagattattctgctgacaatttagactgcaggagaagccggtcacctggccgatcccactgacgttggcggcggcctagccactgcacccatcttctcgcaatctcagcctgacgacttcgctattgggttcggtgacgtcgacgtcaaccctaatgcatctttcgacctgtacgagagggtcgacgtcaagcatgggctcttcgtctcaacggccggtgcgccgaagacattcttccaccacgttgagccatcgaagaaggtcagcgtctacctgagtcccgtagcgagcgacgtcgtcggcaaggcgaccgagaagttccattcccccattactgtgacagcaaccaaagcttccgtttttagcaagttgaaggcgctcgtcactcgtcagggacaaattcctggtggggaagacgcctccatcatgccgccggaggtccttaggcagcaaagaaatagcggcagccccacgacgatgaataccgagcaagagttggtcaagaaggcgaagaaggtgatgaagccggggcatggtggtggtgatggaaaccaagcatgtcttcttcttccactctccaagaggagcaaaggcatttccagcatgttcttctcggtgagaaatgggcataatttctgacatccgcgctcagggcgcaatcactggaaggtctttctgatcatgactcgtgcaaaaaagtaagggtcgtcttgtgctactaggcaactagtatcgggtgcctgcatgctgctggtgcatggagatgcatagtctttctcgtgcatcagtcagttaactggtgtgtataactggagaaatgtaataatccgtatttaattttttactcgtccgtacgtgtattaacacgtctgaagaaattgtacatggaaacattgtaagtgcaaatacacatgtgacatgttcatccatatacacggttacgttatatttg

SEQ ID NO: 216877 - DNA, 1119 bp, Zea Mays
gcaaatcttgctttttttggattgagatcccggattcagacaggtgctaccattcgatttgatttggcgcggagcactttcctatggccgcctccatcgcggcctcgtccttctttccagggtcaccggcgccggccgctcctaagaacggccttggggagcgcccagagagcctggacgtccgcggcgttgcggcgaagccgggagcctcgtctagtgccgtgagggcgagcaagacgcgcgcccacgctgcggtccccaagatgaacggtgggggcaagtccgcggtggcggatggggagcacgaaaccgtaccttcttcggtgccgaagactttctacaaccagcttcccgactggagcatgctccttgcggccatcaccaccatcttcttggccgcagagaagcagtggacgatgcttgactggaagcctaggaggcctgacatgctcactgacacgtttgggtttggccggatcatacatgatgggctcatgttcaggcagaacttctccattaggtcctatgagattggggcagataggacggcatctatagagacgctgatgaaccatttgcaggaaacggcactcaatcatgtgaagaccgctgggctgctaggtgatggatttggctccacaccagagatgagtaaacgaaacttgttctgggtggttagccaaatgcaggccatcatcgagcgttatccatgctggggtgatactgttgaagtagatacatgggttagtgctaatggtaaaaatggaatgcgtagggattggcatatacgcgatcctataacaggcctcacgatactgaaggcaacaagtaaatgggttatgatgaacaaactcactaggaagcttgcaagaattccagatgaagtgcggactgaaatagagccatacttttttgagcattctgctattgttgacgaagacaaccgcaagcttccaaaactgccagagggacaaagcacgtctgtagctaaatatgtgaggacaggcctgactcctcgttgggctgatcttgatataaatcagcatgtcaataatgttaaatacattgcgtggattcttgaggtacctaacaatgtcgctgacgcgtgttgctttcgtg

SEQ ID NO: 216878 - DNA, 1281 bp, Zea Mays
gctgtagctatttctgggcgcttcgctgttcggcctgctagcgtccgggccgtgacagctggggtgaatcgcgggagttcagggtccttgccccggctggatctcgagttcaggaaaccttgcgcccctcttccttctcgtttacgccgctagatttgggttgctgccgcttattttcttggattgagatcccggattcagacaggtgctaccattcgatttgatttggcgcggagcactttcctatggccgcctccatcgcggcctcgtccttctttccagggtcaccggcgccggccgctcctaagaacggccttggggagcgcccagagagcctggacgtccgcggcgttgcggcgaagccgggagcctcgtctagtgccgtgagggcgagcaagacgcgcgcccacgctgcggtccccaagatgaacggtgggggcaagtccgcggtggcggatggggagcacgaaaccgtaccttcttcggtgccgaagactttctacaaccagcttcccgactggagcatgctccttgcggccatcaccaccatcttcttggccgcagagaagcagtggacgatgcttgactggaagcctaggaggcctgacatgctcactgacacgtttgggtttggccggatcatacatgatgggctcatgttcaggcagaacttctccattaggtcctatgagattggggcagataggacggcatctatagagacgctgatgaaccatttgcaggaaacggcactcaatcatgtgaagaccgctgggctgctaggtgatggatttggctccacaccagagatgagtaaacgaaacttgttctgggtggttagccaaatgcaggccatcatcgagcgttatccatgctggggtgatactgttgaagtagatacatgggttagtgctaatggtaaaaatggaatgcgtagggattggcatatacgcgatcctataacaggcctcacgatactgaaggcaacaagtaaatgggttatgatgaacaaactcactaggaagcttgcaagaattccagatgaagtgcggactgaaatagagccatacttttttgagcattctgctattgttgacgaagacaaccgcaagcttccaaaactgccagagggacaaagcacgtctgtagctaaatatgtgaggacaggcctgactcctcgttgggctgatcttgatataaatcagcatgtcaataatgttaaatacattgcgtggattcttgaggtacctaacaatgtcgctgacgcgtgttgctttcgtg

SEQ ID NO: 216879 - DNA, 2829 bp, Zea Mays
gtgagcgacgctcccgtagatccgggcgcgcatccttcggtcgccgccgtcgtctagatctgtgccgtttggggccgtaggggggcgctgtttcgcgctcctccgtgacggtttggggtgcattgcagcgtggattcggttttcttcgtgcggcatttgtcggcgttcgccgcgcgctctttcaagcgtcgttttttattcgttctgtggttctaatttagcccttcgcaaggttgcttcccatgggggcgtagctctgaacccctccggtccggtgcggcggcggattaggctccgatggggaagtctccggcgaagtggatcaagtccgtgctcttcgggaaaaggtcgtcgtcgaggtccggctccaccaaggccaaggatttatcgaagggtacgactaacaaagcagcagctgctgctgctgctgctgccgggaaggagcccgcgttctctgagagctctccggtcatctcggagcctgtgcttgttagcgcccacaacaatgagaccgcgcgggaggccgctaagggtgagaattccagcgtgcaagaagtgccagtgactgatgtcagtcaagacttggagaagcagggcactgttgggtctgatacgtctaatgatgctgagaggttgagggaagagcaagcggccgtgaaggcacaagctgccttccgtggttatctggcacgccgagcattccgtgccctgaaagggatcataagactacaggcactgattcggggacatcttgtaaggaggcaagctgtttcaactctccgtgccacatggttgattgtgaagtttcaagcccttgtccgtggaaggaacgttagactttctaatgtttccattcaagcaactacggaactttcccaacagaacttcgggggttctaaacctggttcctggaaggagaagttgtcttcaaatgcatttgctcggaagcttctctcttcaccaattgtggttgaggctcttcacgtccagtatgatgagatggaccctaattcggccttcaattggttagagaggtggacagtaagtcatgtctggaagcctatttcccaaccaaagagagttggcactgatgctaagcctcatacaaggaaggccagttatgcaatggaaacagagtcagcgaaattaaagcgtaatgcacggaagagccctgcagtgccatttgagccttctcaaacaaacaccaccattgaaaatgagaagacaagacggaatccaaggaaattaagtagcactcctgctgagtcagttcccgatggccagttaacagaacttgagaaggttaaacgtagccttaggaaggttactagttccacggttgaaacctcaaaggtgcctagcccaacaactgagattcctgaccgtcaagaggtacaatgtgagagaccactaagaagtgcaaagcaagctccaattcatgttgagaatcaagaacctcagaatgttaatctatcggagaatgcaaagatggatattctggtaccagatatccagcctgacgtggaagttgcttcagatctagtcacaatcacaaatgaagaaaaagttgatgagacaccgtctgttgttgctccagcggctgaaattatgccactgcaagacatcaacagcgaagaaaatgctttggtgaatgatgtggaagagagatccaaagaagaacattcatctactgataacctgaaaggcagcaagaggaggtcttcattctcagctaaacctgaatatccagaaaatggctccaaaaattctccagccctgccaagctacatggctgctacacaatctgcaaaggcgaaactgcgggggaatagttcaccaagacttagctctgattcagcagagaaaaacgggttcactcgtcgtcactcccttccgtcccctaacaatggtaagataatttcacattctccacgtacgcaaaggccaacccatgctggtggcaaggacggagcaaaaggcgacaaggctatgctgtcatcaagagatgcgagcgagagaccactgaaagctgagtggagacgctgaggtggcgaatcaaaaccccaaaccctccatttgacccccagacttacccccccccccccccccccccccccccccctcctgcttactgagagggctgctgatgttagagagaacgagaacatgtatggattgagttgaacagaacaatcttagtcccgtttggtcaaatctgggctgcgttttgactgatggttgtgtgtcatttatggttattgcccttgaggtcgtagtattcttttccaaaggttcttgtcttcctgatctggttgtcatgcaacgcaaggcggcttgcgaaaaggaaccatgttgtaccatgcgatcaaagtagaagtaactctacgatgcttcagattgcttcaatgcacggtaactctacgatcaaaaagtagaagtaactctaggaagacatggccagatgttgttccaagtgacatgaggtcaagcacaggtcaatggccacagatgatgccatactattacatatgcatagttcttaagacgacgcctgttcccattttgtgctctcggcgaattgacgaattcaggctgagttctagatggctttgggaatagcaattggatctccattgtctatctgcagtgcttgtcagtcttggagcctaccagctcaatgaatgacaattatggtaggtgagcttggtcatcccatggatgcagattaaaggtggttggatgatcaatgaaccagggctacttttttactattattattgtgactgtcctgtagcttaggaccagatgaggtcgacctcggaagtgctt

SEQ ID NO: 216880 - DNA, 5345 bp, Zea Mays
atgtggccttgtatagactgtgcagccaacgcgaacagccccggcaagacgtgtccggatcgacaccgtccaactcaaaccccaacggccggatccgacccggcgtgctctacatatgcgtcccgtcacccctctcctcttcatcctctcttttcttcgcccaaatctcgcgtgctgcctccgtcctgcccccagcgcgtgcgctccgatccgccgggtttcagcgctgcggctgtcgatttacgcgatttgtctggcagaatacagttcagagcctcgagcgctgcagatcgaggacctggtcgtcggattcgggcgccgcgggtgagacctaggcgccggagtttttgtgacggagttttggcgtggttggtggagggggggaggaaggagcggtctcatatgcgcgtgacggtcacgcccaaggacgaggaaaggctggttgacttgatggcgcgcgagcagccgcggtcggcggtggttgcggcgggcggagatttggtcactgctgccgggggcgggggcgaggggtcggatagggactcttcggggtccatagaggagattacggctgacgacttcaagaaggactcgtcgtcggcgttgggcggcgcggcggcggcggcggggccgagatctaggtcttgggtggccccgcccgccgtgggttacatggcccggaactttcgctatgccttcaatagctttgcgtggtcgcaggccgtgcggaataagccgctggggctacaaccgcctgccccagacgacgacgaggtggagcacgccgtggacgtctccgacggagagaaggaagagggcgagattgaggagggggaggctgtggaggccttggcctcgcctgctcctgcgcagcctgagaccatcgatttggactccgacgccccggagaagtcagagtcggtggctatcgatggaagtgccagtgttgtgcctgtcccagctgctgaggaagaggaggtgaaccttgatcagcgtgtggggagtatactggaggagctcgagatggtctccattgaggaagctgagaagtcgttcgagggtgcatgcgcacgactgcatacctgcttcgagaacctgaagcctctgttccaggaactggagaacgggagcccgatggctatccttgaacccctcatgcagcaggcgtttattggaattgacacactcaccactgtggcgaatttgtataacttgccgaggagggagcagaataagacaacacttttgaagttgttgttccacataaaaaacagatattcggacatgctgacgcctgagcagcgagaagagatggacagccgcgtgaggaagttagtttttggagagaaagacaatgtcagtgacccaagtaccagttgtggcaccagtgcgataaatgtttcagctccatctgggcaggtttcaaacacaggaggactgccatttgaatcaggtgcagcaaatctatttagtagcttgccaaggttggaagtacctgccaaaaggaatagtcccttgttgaatcttcatgcagattatgatgagaacagcttaccctcgccaacccgggacaatgcaccgccttttcctgcgctaaagcctattggttttggagcatttccaatggtacctgagaaactatctttcctagacagagttgagcctacaaagaattcgttatatccacccttaaatgatcctctgaaggctgtctcttcctatcagcagaagtatgggcagaaatctgtatatccaagtgatgatctaccaagtccaactccatctggtgatgagggtaaacctgcagataaaggtggtgatatatttagtgatgtttccagcttccctgttccaaagagtattgtattaccaagtacaagtcagatgcctgcttctcaacctagcacagtcagcagcagcagtattagttatgcttcaagtacaagtcagatggctgcttctcaacctatcacagtcagcagtagcggtattagttatgcgtctggtccacctggttttgctaaacaaattgagcagtcgactgcaggtccgaatcatgcaataaaggcagcatccaaaagtagagatccgaggctcagatttttgaaccgtgattctgctggtgctacagatgtaaattggcgtgcaaatttttcagaactgaaggatgggaacttgggtggagtttcagttggtaaccgtaaacagaaagcagttgatgatcctcaggtggatgacaatgcgttaaaaagatttaggggcggaattgcgaatcagagagacatgcagcctacggggaaccccaatcagcttatgaacatcagggctcctacacatagtagcagtatcaatatgaaaactttgcaacctcctcaaactactgctccacatgtcagtgcggctcctgctgtcccattgcctcctatgttgttaaaggacattgctgtgaacccagcattgcttatgcatttgatccaaatggaacatcaaaagaagtcagcatcagaaagtcagggtggcatgtctagtgggatgaccaacaatggaattgcaggcatggttttcacacctggcaatgctccgaagatcacagaagctgcacaagtcccatctgttaggccacaggttccagtgcagacacctcctttgaactcacaaaatgatggtggaatcgttcgcatgaagccccgtgatccacggcgcatcctacacaataacatagcacagaaatctgatgcaatgagcttggagcaagtgaaaaataatggaactacacagccagactctcagggcaccaaggaccagactactccagtgccttctcaaccagccttgccgtctagcattgcaaggccattcagcagcgcaaaacatgttgatcctgtctctaattcacagttagctgctacagctattatggctccgacacaagctttgagtagcgtaaataaggtggatccaagactagcagttgaacagaatggacaaaatgctgatgcaacaacaaatggtgcttctgcaacaacacttgaagctacacagcctgttagtccatggggtgatgttgatcatctccttgatggatatgatgaccagcaaaaggctctgatacagaaggaaagggcaagacgaataacagaacaacacaaaatgttctcagcacggaagctatgcttggtgcttgatttggatcacacccttcttaattctgcaaagtttatagaagtggaaccaattcatgaagagatgttacggaagaaagaggagcaagacaggactttgcctgaacgtcatctctaccgttttcatcatatgaatatgtggacgaagctgaggccaggaatatggaactttcttcagaaggctagtaacctgtttgagttgcatttatacactatgggaaacaaactgtatgctactgagatggccaaggttcttgatcctactgggaccttgttcgctggacgagtcatatcaagaggtgatgatggtgatccttttgacagtgatgaacgagtgccaaaaagtaaagatctggatggggtactgggtatggaatctgcagttgtgatcatagatgattctgtaagagtctggcctcataacaggcacaatttgatagttgtagagagatacacctatttcccctgcagcaggcgtcaatttggccttcctggaccatcacttctagagattgacagagatgagaggcctgaggatggtacccttgcttcttcacttgcggtcattgagagaatccaccacaattttttttcacatcctaacctcaatgaggctgacgtgcggagcatactagcatctgagcagcgaaggatacttactggttgccgtattgtctttagccgggttttcccggttggagacgccagccctcacttgcatcctctgtggcagactgcagaacagtttggtgcagtctgcacaaacctggttgatgatcgggtcactcatattgttgcaaactcccctgggacagacaaggtgaattgggcattatccaaaggcaaattcgtagtgcatccaggatgggtagaagcttcagctctgttgtaccggcgcgccaacgaacatgactttgcagtcaaataacaccctccctgagcccgaattcatcatataggcttcggggaagaattcttctcagggatggaatgtgttcatggtaacctaacatgattaaaaaaaaaccataacaacatatctaaaatgggaccatggtaagaaggaaaaccaccacccaaagaatttcaggccttaaaatgaatggtaacgaagaaaacgctttatgatagcctggaagaggagactgggtctgttgtggatgtcattacctaggtggtgggtggtcaagattcctttttagaaagccagcaaagatgcgcgaaaaaagtgatgatgagcagatgctcaccgcctcatcctttgtaacatgtagtagtaaaagtggtgcagttttggtaagggtcctaggttcagaaatgttgcttctggccaagggaacttgggggattttgccgttttggtagctgccgctggtcgcctgtcgaaagtgtggcctcagctgaacggcgtcatgaatcattggtgcagcgcatttaataggatgggtttgctatgtcagtgtttgtgttaggagtagcttgagtataaagctggttcaaaggcacgggacacctggtgctttgcctgctgctgctcgaaacgtactcgtcccccttccgaaactttaaggcagaaaaacgttttgttcagttgggtcaggtaaaggggttgagttgatggcatcagagtcagagaagaaccagctgattcaggttaacgggttgaagatttcatgccgtcagtgaacgcgttggttgctatatggaaggttggtattccaaaaaagaaacgcgtgacatgtcttctaactgaaaaggaaaaaaaccgttataatttaactgttttcgcgagaattggttcttttgggatgatgcggccggtttttttagtgtttgttttccgaacaagcttttgtttgcggccttactgacaaggatgttttggccattttggttgtttcaactttcgatgggatttggagaatgatgatccgtggtcaaactttccttgcagcttgcaacttccaagttaatacgtcaaaaataccatgtatcttatgaacgacataaagacgtttttcttgttgagtacaataaaaatgctattttcagaaaaaaaatcattgactctaggatcaccatttttgcatcatgacttgaccatgtaatgtctattggactagtcagatatacttggtcagatatacttgataaccatttttt

SEQ ID NO: 216881 - DNA, 4458 bp, Zea Mays
cgacaccgtccaactcaaaccccaacggccggatccgacccggcgtgctctacatatgcgtcccgtcacccctctcctcttcatcctctcttttcttcgcccaaatctcgcgtgctgcctccgtcctgcccccagcgcgtgcgctccgatccgccgggtttcagcgctgcggctgtcgatttacgcgatttgtctggcagaatacagttcagagcctcgagcgctgcagatcgaggacctggtcgtcggattcgggcgccgcgggtcgttcgagggtgcatgcgcacgactgcatacctgcttcgagaacctgaagcctctgttccaggaactggagaacgggagcccgatggctatccttgaacccctcatgcagcaggcgtttattggaattgacacactcaccactgtggcgaatttgtataacttgccgaggagggagcagaataagacaacacttttgaagttgttgttccacataaaaaacagatattcggacatgctgacgcctgagcagcgagaagagatggacagccgcgtgaggaagttagtttttggagagaaagacaatgtcagtgacccaagtaccagttgtggcaccagtgcgataaatgtttcagctccatctgggcaggtttcaaacacaggaggactgccatttgaatcaggtgcagcaaatctatttagtagcttgccaaggttggaagtacctgccaaaaggaatagtcccttgttgaatcttcatgcagattatgatgagaacagcttaccctcgccaacccgggacaatgcaccgccttttcctgcgctaaagcctattggttttggagcatttccaatgaagtatgggcagaaatctgtatatccaagtgatgatctaccaagtccaactccatctggtgatgagggtaaacctgcagataaaggtggtgatatatttagtgatgtttccagcttccctgttccaaagagtattgtattaccaagtacaagtcagatgcctgcttctcaacctagcacagtcagcagcagcagtattagttatgcttcaagtacaagtcagatggctgcttctcaacctatcacagtcagcagtagcggtattagttatgcgtctggtccacctggttttgctaaacaaattgagcagtcgactgcaggtccgaatcatgcaataaaggcagcatccaaaagtagagatccgaggctcagatttttgaaccgtgattctgctggtgctacagatgtaaattggcgtgcaaatttttcagaactgaaggatgggaacttgggtggagtttcagttggtaaccgtaaacagaaagcagttgatgatcctcaggtggatgacaatgcgttaaaaagatttaggggcggaattgcgaatcagagagacatgcagcctacggggaaccccaatcagcttatgaacatcagggctcctacacatagtagcagtatcaatatgaaaactttgcaacctcctcaaactactgctccacatgtcagtgcggctcctgctgtcccattgcctcctatgttgttaaaggacattgctgtgaacccagcattgcttatgcatttgatccaaatggaacatcaaaagaagtcagcatcagaaagtcagggtggcatgtctagtgggatgaccaacaatggaattgcaggcatggttttcacacctggcaatgctccgaagatcacagaagctgcacaagtcccatctgttaggccacaggttccagtgcagacacctcctttgaactcacaaaatgatggtggaatcgttcgcatgaagccccgtgatccacggcgcatcctacacaataacatagcacagaaatctgatgcaatgagcttggagcaagtgaaaaataatggaactacacagccagactctcagggcaccaaggaccagactactccagtgccttctcaaccagccttgccgtctagcattgcaaggccattcagcagcgcaaaacatgttgatcctgtctctaattcacagttagctgctacagctattatggctccgacacaagctttgagtagcgtaaataaggtggatccaagactagcagttgaacagaatggacaaaatgctgatgcaacaacaaatggtgcttctgcaacaacacttgaagctacacagcctgttagtccatggggtgatgttgatcatctccttgatggatatgatgaccagcaaaaggctctgatacagaaggaaagggcaagacgaataacagaacaacacaaaatgttctcagcacggaagctatgcttggtgcttgatttggatcacacccttcttaattctgcaaagtttatagaagtggaaccaattcatgaagagatgttacggaagaaagaggagcaagacaggactttgcctgaacgtcatctctaccgttttcatcatatgaatatgtggacgaagctgaggccaggaatatggaactttcttcagaaggctagtaacctgtttgagttgcatttatacactatgggaaacaaactgtatgctactgagatggccaaggttcttgatcctactgggaccttgttcgctggacgagtcatatcaagaggtgatgatggtgatccttttgacagtgatgaacgagtgccaaaaagtaaagatctggatggggtactgggtatggaatctgcagttgtgatcatagatgattctgtaagagtctggcctcataacaggcacaatttgatagttgtagagagatacacctatttcccctgcagcaggcgtcaatttggccttcctggaccatcacttctagagattgacagagatgagaggcctgaggatggtacccttgcttcttcacttgcggtcattgagagaatccaccacaattttttttcacatcctaacctcaatgaggctgacgtgcggagcatactagcatctgagcagcgaaggatacttactggttgccgtattgtctttagccgggttttcccggttggagacgccagccctcacttgcatcctctgtggcagactgcagaacagtttggtgcagtctgcacaaacctggttgatgatcgggtcactcatattgttgcaaactcccctgggacagacaaggtgaattgggcattatccaaaggcaaattcgtagtgcatccaggatgggtagaagcttcagctctgttgtaccggcgcgccaacgaacatgactttgcagtcaaataacaccctccctgagcccgaattcatcatataggcttcggggaagaattcttctcagggatggaatgtgttcatggtaacctaacatgattaaaaaaaaaccataacaacatatctaaaatgggaccatggtaagaaggaaaaccaccacccaaagaatttcaggccttaaaatgaatggtaacgaagaaaacgctttatgatagcctggaagaggagactgggtctgttgtggatgtcattacctaggtggtgggtggtcaagattcctttttagaaagccagcaaagatgcgcgaaaaaagtgatgatgagcagatgctcaccgcctcatcctttgtaacatgtagtagtaaaagtggtgcagttttggtaagggtcctaggttcagaaatgttgcttctggccaagggaacttgggggattttgccgttttggtagctgccgctggtcgcctgtcgaaagtgtggcctcagctgaacggcgtcatgaatcattggtgcagcgcatttaataggatgggtttgctatgtcagtgtttgtgttaggagtagcttgagtataaagctggttcaaaggcacgggacacctggtgctttgcctgctgctgctcgaaacgtactcgtcccccttccgaaactttaaggcagaaaaacgttttgttcagttgggtcaggtaaaggggttgagttgatggcatcagagtcagagaagaaccagctgattcaggttaacgggttgaagatttcatgccgtcagtgaacgcgttggttgctatatggaaggttggtattccaaaaaagaaacgcgtgacatgtcttctaactgaaaaggaaaaaaaccgttataatttaactgttttcgcgagaattggttcttttgggatgatgcggccggtttttttagtgtttgttttccgaacaagcttttgtttgcggccttactgacaaggatgttttggccattttggttgtttcaactttcgatgggatttggagaatgatgatccgtggtcaaactttccttgcagcttgcaacttccaagttaatacgtcaaaaataccatgtatcttatgaacgacataaagacgtttttcttgttgagtacaataaaaatgctattttcagaaaaaaaatcattgactctaggatcaccatttttgcatcatgacttgaccatgtaatgtctattggactagtcagatatacttggtcagatatacttgataaccatttttt

SEQ ID NO: 216882 - DNA, 5162 bp, Zea Mays
cccaaatctcgcgtgctgcctccgtcctgcccccagcgcgtgcgctccgatccgccgggtttcagcgctgcggctgtcgatttacgcgatttgtctggcagaatacagttcagagcctcgagcgctgcagatcgaggacctggtcgtcggattcgggcgccgcgggtgagacctaggcgccggagtttttgtgacggagttttggcgtggttggtggagggggggaggaaggagcggtctcatatgcgcgtgacggtcacgcccaaggacgaggaaaggctggttgacttgatggcgcgcgagcagccgcggtcggcggtggttgcggcgggcggagatttggtcactgctgccgggggcgggggcgaggggtcggatagggactcttcggggtccatagaggagattacggctgacgacttcaagaaggactcgtcgtcggcgttgggcggcgcggcggcggcggcggggccgagatctaggtcttgggtggccccgcccgccgtgggttacatggcccggaactttcgctatgccttcaatagctttgcgtggtcgcaggccgtgcggaataagccgctggggctacaaccgcctgccccagacgacgacgaggtggagcacgccgtggacgtctccgacggagagaaggaagagggcgagattgaggagggggaggctgtggaggccttggcctcgcctgctcctgcgcagcctgagaccatcgatttggactccgacgccccggagaagtcagagtcggtggctatcgatggaagtgccagtgttgtgcctgtcccagctgctgaggaagaggaggtgaaccttgatcagcgtgtggggagtatactggaggagctcgagatggtctccattgaggaagctgagaagtcgttcgagggtgcatgcgcacgactgcatacctgcttcgagaacctgaagcctctgttccaggaactggagaacgggagcccgatggctatccttgaacccctcatgcagcaggcgtttattggaattgacacactcaccactgtggcgaatttgtataacttgccgaggagggagcagaataagacaacacttttgaagttgttgttccacataaaaaacagatattcggacatgctgacgcctgagcagcgagaagagatggacagccgcgtgaggaagttagtttttggagagaaagacaatgtcagtgacccaagtaccagttgtggcaccagtgcgataaatgtttcagctccatctgggcaggtttcaaacacaggaggactgccatttgaatcaggtgcagcaaatctatttagtagcttgccaaggttggaagtacctgccaaaaggaatagtcccttgttgaatcttcatgcagattatgatgagaacagcttaccctcgccaacccgggacaatgcaccgccttttcctgcgctaaagcctattggttttggagcatttccaatggtacctgagaaactatctttcctagacagagttgagcctacaaagaattcgttatatccacccttaaatgatcctctgaaggctgtctcttcctatcagcagaagtatgggcagaaatctgtatatccaagtgatgatctaccaagtccaactccatctggtgatgagggtaaacctgcagataaaggtggtgatatatttagtgatgtttccagcttccctgttccaaagagtattgtattaccaagtacaagtcagatgcctgcttctcaacctagcacagtcagcagcagcagtattagttatgcttcaagtacaagtcagatggctgcttctcaacctatcacagtcagcagtagcggtattagttatgcgtctggtccacctggttttgctaaacaaattgagcagtcgactgcaggtccgaatcatgcaataaaggcagcatccaaaagtagagatccgaggctcagatttttgaaccgtgattctgctggtgctacagatgtaaattggcgtgcaaatttttcagaactgaaggatgggaacttgggtggagtttcagttggtaaccgtaaacagaaagcagttgatgatcctcaggtggatgacaatgcgttaaaaagatttaggggcggaattgcgaatcagagagacatgcagcctacggggaaccccaatcagcttatgaacatcagggctcctacacatagtagcagtatcaatatgaaaactttgcaacctcctcaaactactgctccacatgtcagtgcggctcctgctgtcccattgcctcctatgttgttaaaggacattgctgtgaacccagcattgcttatgcatttgatccaaatggaacatcaaaagaagtcagcatcagaaagtcagggtggcatgtctagtgggatgaccaacaatggaattgcaggcatggttttcacacctggcaatgctccgaagatcacagaagctgcacaagtcccatctgttaggccacagaactcacaaaatgatggtggaatcgttcgcatgaagccccgtgatccacggcgcatcctacacaataacatagcacagaaatctgatgcaatgagcttggagcaagtgaaaaataatggaactacacagccagactctcagggcaccaaggaccagactactccagtgccttctcaaccagccttgccgtctagcattgcaaggccattcagcagcgcaaaacatgttgatcctgtctctaattcacagttagctgctacagctattatggctccgacacaagctttgagtagcgtaaataaggtggatccaagactagcagttgaacagaatggacaaaatgctgatgcaacaacaaatggtgcttctgcaacaacacttgaagctacacagcctgttagtccatggggtgatgttgatcatctccttgatggatatgatgaccagcaaaaggctctgatacagaaggaaagggcaagacgaataacagaacaacacaaaatgttctcagcacggaagctatgcttggtgcttgatttggatcacacccttcttaattctgcaaagtttatagaagtggaaccaattcatgaagagatgttacggaagaaagaggagcaagacaggactttgcctgaacgtcatctctaccgttttcatcatatgaatatgtggacgaagctgaggccaggaatatggaactttcttcagaaggctagtaacctgtttgagttgcatttatacactatgggaaacaaactgtatgctactgagatggccaaggttcttgatcctactgggaccttgttcgctggacgagtcatatcaagaggtgatgatggtgatccttttgacagtgatgaacgagtgccaaaaagtaaagatctggatggggtactgggtatggaatctgcagttgtgatcatagatgattctgtaagagtctggcctcataacaggcacaatttgatagttgtagagagatacacctatttcccctgcagcaggcgtcaatttggccttcctggaccatcacttctagagattgacagagatgagaggcctgaggatggtacccttgcttcttcacttgcggtcattgagagaatccaccacaattttttttcacatcctaacctcaatgaggctgacgtgcggagcatactagcatctgagcagcgaaggatacttactggttgccgtattgtctttagccgggttttcccggttggagacgccagccctcacttgcatcctctgtggcagactgcagaacagtttggtgcagtctgcacaaacctggttgatgatcgggtcactcatattgttgcaaactcccctgggacagacaaggtgaattgggcattatccaaaggcaaattcgtagtgcatccaggatgggtagaagcttcagctctgttgtaccggcgcgccaacgaacatgactttgcagtcaaataacaccctccctgagcccgaattcatcatataggcttcggggaagaattcttctcagggatggaatgtgttcatggtaacctaacatgattaaaaaaaaaccataacaacatatctaaaatgggaccatggtaagaaggaaaaccaccacccaaagaatttcaggccttaaaatgaatggtaacgaagaaaacgctttatgatagcctggaagaggagactgggtctgttgtggatgtcattacctaggtggtgggtggtcaagattcctttttagaaagccagcaaagatgcgcgaaaaaagtgatgatgagcagatgctcaccgcctcatcctttgtaacatgtagtagtaaaagtggtgcagttttggtaagggtcctaggttcagaaatgttgcttctggccaagggaacttgggggattttgccgttttggtagctgccgctggtcgcctgtcgaaagtgtggcctcagctgaacggcgtcatgaatcattggtgcagcgcatttaataggatgggtttgctatgtcagtgtttgtgttaggagtagcttgagtataaagctggttcaaaggcacgggacacctggtgctttgcctgctgctgctcgaaacgtactcgtcccccttccgaaactttaaggcagaaaaacgttttgttcagttgggtcaggtaaaggggttgagttgatggcatcagagtcagagaagaaccagctgattcaggttaacgggttgaagatttcatgccgtcagtgaacgcgttggttgctatatggaaggttggtattccaaaaaagaaacgcgtgacatgtcttctaactgaaaaggaaaaaaaccgttataatttaactgttttcgcgagaattggttcttttgggatgatgcggccggtttttttagtgtttgttttccgaacaagcttttgtttgcggccttactgacaaggatgttttggccattttggttgtttcaactttcgatgggatttggagaatgatgatccgtggtcaaactttccttgcagcttgcaacttccaagttaatacgtcaaaaataccatgtatcttatgaacgacataaagacgtttttcttgttgagtacaataaaaatgctattttcagaaaaaaaatcattgactctaggatcaccatttttgcatcatgacttgaccatgtaatgtctattggactagtcagatatacttggtcagatatacttgataaccatttttt

SEQ ID NO: 216883 - DNA, 4435 bp, Zea Mays
ctccgtcctgcccccagcgcgtgcgctccgatccgccgggtttcagcgctgcggctgtcgatttacgcgatttgtctggcagaatacagttcagagcctcgagcgctgcagatcgaggacctggtcgtcggattcgggcgccgcgggtcgttcgagggtgcatgcgcacgactgcatacctgcttcgagaacctgaagcctctgttccaggaactggagaacgggagcccgatggctatccttgaacccctcatgcagcaggcgtttattggaattgacacactcaccactgtggcgaatttgtataacttgccgaggagggagcagaataagacaacacttttgaagttgttgttccacataaaaaacagatattcggacatgctgacgcctgagcagcgagaagagatggacagccgcgtgaggaagttagtttttggagagaaagacaatgtcagtgacccaagtaccagttgtggcaccagtgcgataaatgtttcagctccatctgggcaggtttcaaacacaggaggactgccatttgaatcaggtgcagcaaatctatttagtagcttgccaaggttggaagtacctgccaaaaggaatagtcccttgttgaatcttcatgcagattatgatgagaacagcttaccctcgccaacccgggacaatgcaccgccttttcctgcgctaaagcctattggttttggagcatttccaatggtacctgagaaactatctttcctagacagagttgagcctacaaagaattcgttatatccacccttaaatgatcctctgaaggctgtctcttcctatcagcagaagtatgggcagaaatctgtatatccaagtgatgatctaccaagtccaactccatctggtgatgagggtaaacctgcagataaaggtggtgatatatttagtgatgtttccagcttccctgttccaaagagtattgtattaccaagtacaagtcagatgcctgcttctcaacctagcacagtcagcagcagcagtattagttatgcttcaagtacaagtcagatggctgcttctcaacctatcacagtcagcagtagcggtattagttatgcgtctggtccacctggttttgctaaacaaattgagcagtcgactgcaggtccgaatcatgcaataaaggcagcatccaaaagtagagatccgaggctcagatttttgaaccgtgattctgctggtgctacagatgtaaattggcgtgcaaatttttcagaactgaaggatgggaacttgggtggagtttcagttggtaaccgtaaacagaaagcagttgatgatcctcaggtggatgacaatgcgttaaaaagatttaggggcggaattgcgaatcagagagacatgcagcctacggggaaccccaatcagcttatgaacatcagggctcctacacatagtagcagtatcaatatgaaaactttgcaacctcctcaaactactgctccacatgtcagtgcggctcctgctgtcccattgcctcctatgttgttaaaggacattgctgtgaacccagcattgcttatgcatttgatccaaatggaacatcaaaagaagtcagcatcagaaagtcagggtggcatgtctagtgggatgaccaacaatggaattgcaggcatggttttcacacctggcaatgctccgaagatcacagaagctgcacaagtcccatctgttaggccacaggttccagtgcagacacctcctttgaactcacaaaatgatggtggaatcgttcgcatgaagccccgtgatccacggcgcatcctacacaataacatagcacagaaatctgatgcaatgagcttggagcaagtgaaaaataatggaactacacagccagactctcagggcaccaaggaccagactactccagtgccttctcaaccagccttgccgtctagcattgcaaggccattcagcagcgcaaaacatgttgatcctgtctctaattcacagttagctgctacagctattatggctccgacacaagctttgagtagcgtaaataaggtggatccaagactagcagttgaacagaatggacaaaatgctgatgcaacaacaaatggtgcttctgcaacaacacttgaagctacacagcctgttagtccatggggtgatgttgatcatctccttgatggatatgatgaccagcaaaaggctctgatacagaaggaaagggcaagacgaataacagaacaacacaaaatgttctcagcacggaagctatgcttggtgcttgatttggatcacacccttcttaattctgcaaagaagtggaaccaattcatgaagagatgttacggaagaaagaggagcaagacaggactttgcctgaacgtcatctctaccgttttcatcatatgaatatgtggacgaagctgaggccaggaatatggaactttcttcagaaggctagtaacctgtttgagttgcatttatacactatgggaaacaaactgtatgctactgagatggccaaggttcttgatcctactgggaccttgttcgctggacgagtcatatcaagaggtgatgatggtgatccttttgacagtgatgaacgagtgccaaaaagtaaagatctggatggggtactgggtatggaatctgcagttgtgatcatagatgattctgtaagagtctggcctcataacaggcacaatttgatagttgtagagagatacacctatttcccctgcagcaggcgtcaatttggccttcctggaccatcacttctagagattgacagagatgagaggcctgaggatggtacccttgcttcttcacttgcggtcattgagagaatccaccacaattttttttcacatcctaacctcaatgaggctgacgtgcggagcatactagcatctgagcagcgaaggatacttactggttgccgtattgtctttagccgggttttcccggttggagacgccagccctcacttgcatcctctgtggcagactgcagaacagtttggtgcagtctgcacaaacctggttgatgatcgggtcactcatattgttgcaaactcccctgggacagacaaggtgaattgggcattatccaaaggcaaattcgtagtgcatccaggatgggtagaagcttcagctctgttgtaccggcgcgccaacgaacatgactttgcagtcaaataacaccctccctgagcccgaattcatcatataggcttcggggaagaattcttctcagggatggaatgtgttcatggtaacctaacatgattaaaaaaaaaccataacaacatatctaaaatgggaccatggtaagaaggaaaaccaccacccaaagaatttcaggccttaaaatgaatggtaacgaagaaaacgctttatgatagcctggaagaggagactgggtctgttgtggatgtcattacctaggtggtgggtggtcaagattcctttttagaaagccagcaaagatgcgcgaaaaaagtgatgatgagcagatgctcaccgcctcatcctttgtaacatgtagtagtaaaagtggtgcagttttggtaagggtcctaggttcagaaatgttgcttctggccaagggaacttgggggattttgccgttttggtagctgccgctggtcgcctgtcgaaagtgtggcctcagctgaacggcgtcatgaatcattggtgcagcgcatttaataggatgggtttgctatgtcagtgtttgtgttaggagtagcttgagtataaagctggttcaaaggcacgggacacctggtgctttgcctgctgctgctcgaaacgtactcgtcccccttccgaaactttaaggcagaaaaacgttttgttcagttgggtcaggtaaaggggttgagttgatggcatcagagtcagagaagaaccagctgattcaggttaacgggttgaagatttcatgccgtcagtgaacgcgttggttgctatatggaaggttggtattccaaaaaagaaacgcgtgacatgtcttctaactgaaaaggaaaaaaaccgttataatttaactgttttcgcgagaattggttcttttgggatgatgcggccggtttttttagtgtttgttttccgaacaagcttttgtttgcggccttactgacaaggatgttttggccattttggttgtttcaactttcgatgggatttggagaatgatgatccgtggtcaaactttccttgcagcttgcaacttccaagttaatacgtcaaaaataccatgtatcttatgaacgacataaagacgtttttcttgttgagtacaataaaaatgctattttcagaaaaaaaatcattgactctaggatcaccatttttgcatcatgacttgaccatgtaatgtctattggactagtcagatatacttggtcagatatacttgataaccatttttt

SEQ ID NO: 216884 - DNA, 7240 bp, Zea Mays
ggcggctcccccagcaacatccgcctccgaactccgaatcaactacgcccccgacgagcgattgagcgcgagtcaaaaaaaggaccgccaaggaagcgagcgcggaatcaggcgagatccccttcgcctacgacgccagtaggctcgagaatcgcgtccagctcgaggccgaccgagagcgcgtgcaggcagctgctgggcctgcagttccaccacacgtccggcgacctctactacggcgacgcgtacctggggctgatgggcggcgggcgccgcgacgggctggcggaggcggtggcggtgcgccactcaacttcgtcaacagcgtggaggtcgacctggagaccggcgacgtctacttcaccgacagcaacaccacgtactagcggaggtacatacgatcccacgccacaactagagagtccaactccgcctcctactccacgtcgtgcgcggtgcgccgacgccgccactatcgctgacgccgaacgctgcatgtcctcctccccgctagcgcctctgaagccgagtccaactcatgtcgtgcgccgccgccactacggcgccgaccccagctctgcggtttctacgctatggctgcttctctgttttggtctattgatcagaacttcagaagaatattatctcttggagtaccataattgcagggcattaacagaacaaaatatatcatgtgggtgtcggtttgtttactgaaatggttgcttcaggcataaaactaaactctactaccctagcaagcatacttgctagctttttagagctgaggttattgaggtatgaaaaaaattcattgcttctccttaagaaatggaccggaacacagtgattttgtagtcagtgcactaggggatcagaaattttgtttttgaattcaagccgaagaatgatttggtaattttgaattcaatgatcagaggatatgctgtgaatgaggatttagagtctacattaggcctattaagggcactgctgaaagagacttagacttgatcatgtgactgttgttttagttcttcctctatgcaatcaaaactcgaggctcctccaggttaaggaactacatgattattccattaggcataacataagttcatgttgctcagttactaacgcacttataaatatctactgcaagtgtggctgcctagaaatagccagcaagatttttcttctgatgaccgagagaaatgtttttacatataccactctgatttgttctctaggaaagcatggccatgcagaacatgcattcgttctttttgtcctaatgaagagggatgtagtttctccagataaagtgacttcttagctctgttatcatgttgtagcaatgaagactttactagattgataatgtatgcgttccattgtcattcttgatatatgatttccctaattatgttgattacctatgctgcatagcagttctccatttatatttactatttttgaattgttgaattgtatatccgcaactaaaattctgccacttgcctctatgttcatagcacaccttatctgtttgaaaattgttgtttcttatgagtgcaacaactattgtacatttttggtccagttacttacgattagcagatttcttactagcagaggcagcatttttttgccattttctttaatttgtgacttgcgatatgtctgtagcacattgagctgttgtttgcaaaaacacaagggacaaacactatcacgctctaagttatcctgactagcactatgaatggaaacatcttccacattcattacatgctatatttatacctctaccaccaagacaaacacatcacttgtttttcacgatttttgagccatcgttacctgcatcagtgagatcttgcaatatccaaagcttctcttcactgtagatgaccgaatcatgcttcaatcttgatgcaataccaccaagaagatcaatagaaaagcaccgaacattagtgtccttagatttcaatccagcattgtgaaggagcaacacagagagaacctcaaggatagaagcagcagctggatgctccagcaagtttagtatcgttaggaaatcctgaacaagattatctattatttctttggtttccgacatatcttgagatttagcagcagtaactatagaaggagacaaagggatagtatttcacaatgcaatttttaccctatatatttgattcatatcagtttttgttaattccgtagcaacacatgggcactgtacgataatataatgcaacattttcgtgcacgaagccgtttcatgcgtcgcccgatccgtgcattcatgtgtcatccgctcgcatccgccccacacgcgacacaagatgcatgcttgttgtccaggtgcctagatggagtggactgtcgaacgcgcgagccaccatattcggcgatggttaccctttgccagatgaacaataggtttcttgtttactgtcttttgttgttagatacttcaatcaggtaggtagttagtgctccgtttatactggcatttcttgtcatatgatagtcacttcgggcttctgaatgctactatgaaactgttttttggtagtgaattttaatcatcttaaaataaatattcttactttgatttgggaagatttgtgttgacctatgaataagactttgactggaggtgcaattcactgtgcgcttccctgctatacagctgacatctgttttctgcctttcttttaccttctggcataagtcaattgttgccaaggcgcagaaataaattttattaggtatatcttgtttatgatcagatctcacggcttcggtggtgcctcaagtgtatgtcaggtagtagccctaagatttcatcagcattcttagcagtaattgctatagtatcaaatgggattgtggtacgagttgctcgattactaactgttgctatagagtgtgaagctaagtaggtaataacaaaaggggttaaggtttatgtgtggtgcttactgtatttgtttttattattttcttgtgctttatacatgtactgtcattcttttactctgatgttcttttactgcaaagttcgacacaatatatttttatatgaaagactgaagattacttagtattgttttctatttctgttatcctctttgcagatctatattaggatgatgaaaacagtgctacttgatgtgaagtccaccaatactatagatcagattaagtctaagatcggtgctttagaggggattgacaatagccctcaagcgctcttttttgctagaattatggtagcagtcaggtttcagatttctatgaattcggtgaataaaatgagcttattggcgttgtcaatctttttaaatttcctgaaattatgataaaagtatatagggtacctattcaaacaatatggctgttaactacatactatttttataagttacattgtattatgtagcagataaaaaggagaatatcttgtgtagttgttttcctaaattataataggcagtggttgtagctaaaatattattatcttgatataaagactactaaattatcacttttatgagaacaatgtgattatctggacagttcccttcaagttataaagtgtggtagcataattgcatttcagggaatcagtgcaaagcttgcagctgattctggtcggagaatggaccgttccctcctccctcctcccgccccttcccctcccgccccttcccctgccctccccgacggcgagtcccctgcccttcccggcgccatcctcccccacccatctctggcggccgccgtgcagccggcagtgcccttctccaccagccgcacgtcgtcccttaccccaagggcggcggccaccctccaggcgtcgggacgtcttcttcttcaccaggatctcgttcgctcgtcccactcttctggtcgcggcaaggctctcaggtggagagactccagcccttcgtcggattcgttggatgttgggagcccttcttcgttcaaggatatcctgctcgcgggaacggtctcggcctcagtctcggtgacgtctggggacatagtttcccatggcgcccaggctaggaccttgcaggcctccgtgcagaattcctctggtgatggtggacggtttgtccgtcggtcttccccactgcgctctttggttcagcccatgcgtcagaagcctctggtggatcgtgatggtttcacacttgtggagagtcgccgcacacagaagcagagacgccgcctggagaagtcgtttggtattcaagctctggagacctttaaaggacggtgcttcaagtgcctctcacctcatcaccgggttgccctctgccgttccatcatccgctgcctcctttgccatgcacctgggcatacatcctacacttgtccgcgtcgcctcccaccggtctgctcgcgcatggctggacgtctgcgtgctcctgttcatcggctgcctcctgtccatgcggcgcagtgctctgttgatgctgccgaggggccactcccagatgtgagtcgtggtagacggcgtcgcctggagtccgacatcgctgttgacgctggtgatggtgtctgcacggagccacattttgctcctacccggatcatcccatggtctccaagtttcaaccagaggactgaagtgcttgatcgtgccattgttctcacggtaactgtggccattaatgaagcagttgaggaagctattttggacagctttgcgcggcgactggcgcttgttcatgactcgctgtctatgtgtcgactgggtcctgcatgtcttcttcttattcttccaagtttagaaatggcggaccgtgcttttgatgggggcagaattgtgaatttatcccccacaactaaaatccatgttatgcggtggagcagaacccttaactcatctgcggcggcgtctctgcctttccaagttgagattgatgtgtctggcatccctgcacatgcttgggagttggaaactgtgcatgctctcctcaatgagtggtgctggattgctgatcttcacccagattgtgagcgtcagcgtgaggtgttcaaggttaccgcctggtgctccagcccgggctccatccccaaggagtttaaacttgaaattgttgatccggtcacaaccgatggtggcatgctgcgtcgttcattggtctaccctatccgggtgtcggtgaaggtccttgatcgaccggacatgttgcagtccctacagccgtcacctcctccggcggaggatgatcccgatcagggcaggcggcggaggcgacgtcgatctaggaggtcgtcttttggtattaatgctcccggaaaaggttcgactacagcggtcttgcctcgggtgtcggttcatcagcgacttgggccgcgcgtgcaagcctgtgggaaggaaggtgtcagggtgcctcgcctggcggtccataaacggctaggccctctggggatatttaacgctgataaaggtgcagtcaagaagatgaagcgagtttggattcccaagagaaagttggagtcatctgtgtctgtttggagtcctaagacatcgtctgctcttgtgtctccactcccggttgcggttgatgatgcatttttggaagctactagttctactgtcgttactgaagatactttggttggctctccagaggttattccagtggatggtggaatctgttcggaagctgctattatttctgatgctccagcccggtttcccatggttgaatctgttctgcaggacgtaaatgtcctctccgagggagtgggtcttcccttggttgaatctgatttccagaacattcaccttatggagtcttccttatcaaggaagcatcttatgtcaccaagtctgttagtttattccaggaaaagacatcaaaagctacagctgattgacagtattgatgagaatggcaatgtcggggctgctgcagatgctataatttctccagcttcggcgactggtttggctgctgatgggacatatcacgttggtcagggcccagtcattatcggggttgtggcagatgctattgtgtctccagccacggcaataacttttacaagttctgaacctatttcgagtttggttgagcctactgcggctgtggcagacattctgatgtctccagctggggtggctcccagtcttcttccttctccttctggcgagcaggagacttcccagtctttgcagagagaagagttcattaaatctgttactcggcaaccttctaaattgcttcctgctcctccagtcatcttgaagaagaaggacaacaaattgccctccagatcggtgccacgtcgcagccgcagagttgctggtgtaggcgttgaatttaatgcctctgaccttgacagacgtgctatcaagaaaatcatgaaggcagttggtataattgctgataatgtggggattgaccagagggctcaagaggagtatgctgatcttttcaagacatctttgtctgatattcatgtaaaagcccttgcagccttgtttggctggcagatgtttgagagggagattggtcatcttagtgcattgttcctgaccatggaggaaggcttcctcgccctcgtgtcaagcctgtgggagtcccagtcgaacatcaccacggctgggacgtgctgcctcgtcagtgtcatgcacgacaagacccttttcatcgctaacctcggtgactctggggcccttctcggcaagaaggtgggtcgcgctgaatagattaccgcagaacagttatccagtgagcacaacaccaatcaggagcctatcaggcaggagctcatgaggcaacacccagatgatgctcagtttgttgcagatgtatttcaacctagacgatttggcatcaaggctgtagcttgattgcaaagaaaaagaggaaaacaattttggaataaaataactcaaatgcacacccggtgattgttttggagctgcacaggatttgaatggacatcttcaggatgttaaggtaggttggctctgaagtagtgcatcctcagatgtgtcatttgtgcagaactgctctctgattatgtagtggaaaaatgcttgtggtcaatagttggtagttgccaaaactgacaattatggtagggttgagatggacagaaagaacgcagatgtaacaagccagccttgggaaacaaagataacctttctcatattgcctcttatattaactcgacattctctaatattcatgcacgc

SEQ ID NO: 216885 - DNA, 3603 bp, Zea Mays
ggcggctcccccagcaacatccgcctccgaactccgaatcaactacgcccccgacgagcgattgagcgcgagtcaaaaaaaggaccgccaaggaagcgagcgcggaatcaggcgagatccccttcgcctacgacgccagtaggctcgagaatcgcgtccagctcgaggccgaccgagagcgcgtgcaggcagctgctgggcctgcagttccaccacacgtccggcgacctctactacggcgacgcgtacctggggctgatgggcggcgggcgccgcgacgggctggcggaggcggtggcggtgcgccactcaacttcgtcaacagcgtggaggtcgacctggagaccggcgacgtctacttcaccgacagcaacaccacgtactagcggaggtacatacgatcccacgccacaactagagagtccaactccgcctcctactccacgtcgtgcgcggtgcgccgacgccgccactatcgctgacgccgaacgctgcatgtcctcctccccgctagcgcctctgaagccgagtccaactcatgtcgtgcgccgccgccactacggcgccgaccccagctctgcggtttctacgctatggctgcttctctgttttggtctattgatcagaacttcagaagaatattatctcttggagtaccataattgcagggcattaacagaacaaaatatatcatgtgggtgtcggtttgtttactgaaatggttgcttcaggcataaaactaaactctactaccctagcaagcatacttgctagctttttagagctgaggttattgaggtatgaaaaaaattcattgcttctccttaagaaatggaccggaacacagtgattttgtagtcagtgcactaggggatcagaaattttgtttttgaattcaagccgaagaatgatttggtaattttgaattcaatgatcagaggatatgctgtgaatgaggatttagagtctacattaggcctattaagggcactgctgaaagagacttagacttgatcatgtgactgttgttttagttcttcctctatgcaatcaaaactcgaggctcctccaggttaaggaactacatgattattccattaggcataacataagttcatgttgctcagttactaacgcacttataaatatctactgcaagtgtggctgcctagaaatagccagcaagatttttcttctgatgaccgagagaaatgtttttacatataccactctgatttgttctctaggaaagcatggccatgcagaacatgcattcgttctttttgtcctaatgaagagggatgtagtttctccagataaagtgacttcttagctctgttatcatgttgtagcaatgaagactttactagattgataatgtatgcgttccattgtcattcttgatatatgatttccctaattatgttgattacctatgctgcatagcagttctccatttatatttactatttttgaattgttgaattgtatatccgcaactaaaattctgccacttgcctctatgttcatagcacaccttatctgtttgaaaattgttgtttcttatgagtgcaacaactattgtacatttttggtccagttacttacgattagcagatttcttactagcagaggcagcatttttttgccattttctttaatttgtgacttgcgatatgtctgtagcacattgagctgttgtttgcaaaaacacaagggacaaacactatcacgctctaagttatcctgactagcactatgaatggaaacatcttccacattcattacatgctatatttatacctctaccaccaagacaaacacatcacttgtttttcacgatttttgagccatcgttacctgcatcagtgagatcttgcaatatccaaagcttctcttcactgtagatgaccgaatcatgcttcaatcttgatgcaataccaccaagaagatcaatagaaaagcaccgaacattagtgtccttagatttcaatccagcattgtgaaggagcaacacagagagaacctcaaggatagaagcagcagctggatgctccagcaagtttagtatcgttaggaaatcctgaacaagattatctattatttctttggtttccgacatatcttgagatttagcagcagtaactatagaaggagacaaagggatagtatttcacaatgcaatttttaccctatatatttgattcatatcagtttttgttaattccgtagcaacacatgggcactgtacgataatataatgcaacattttcgtgcacgaagccgtttcatgcgtcgcccgatccgtgcattcatgtgtcatccgctcgcatccgccccacacgcgacacaagatgcatgcttgttgtccaggtgcctagatggagtggactgtcgaacgcgcgagccaccatattcggcgatggttaccctttgccagatgaacaataggtttcttgtttactgtcttttgttgttagatacttcaatcaggtaggtagttagtgctccgtttatactggcatttcttgtcatatgatagtcacttcgggcttctgaatgctactatgaaactgttttttggtagtgaattttaatcatcttaaaataaatattcttactttgatttgggaagatttgtgttgacctatgaataagactttgactggaggtgcaattcactgtgcgcttccctgctatacagctgacatctgttttctgcctttcttttaccttctggcataagtcaattgttgccaaggcgcagaaataaattttattaggtatatcttgtttatgatcagatctcacggcttcggtggtgcctcaagtgtatgtcagatgtttgagagggagattggtcatcttagtgcattgttcctgaccatggaggaaggcttcctcgccctcgtgtcaagcctgtgggagtcccagtcgaacatcaccacggctgggacgtgctgcctcgtcagtgtcatgcacgacaagacccttttcatcgctaacctcggtgactctggggcccttctcggcaagaaggatgttaagaccagcgacgtcgccgaggagcaacagcagcaacagcaggcggtggatccgctggcgcggcagtcgtccatcatgtcgctgacgctggaggagctgcagaactcgttgtgcgagccgggccgcaacttcgggtccatgaacatggacgagttcatggccaacatatggaacgccgaggagttccaggccgccacggccggctggaacaaggagggcgtgtatcgggagccggtgcccgtggcgacgacgacggacacaggtgaaaacggaggaggaggaggaggagggaggggactggttctgcaggggtcgttcgcgctgtcgtcgccgctgtcccggaagacggtggaggaggtctcagccgagatcagccagggcccaacggacttccaggccagcgcggcgtcgcagcccgtgggggaggcgaggcgaggtgtgggtggcccattgactcacgcatctgcgaggtggaggcgggtgtcttgtggggccagcatgtcagttagagataggcgggggcatggccacgccagggcacccacgctccactcttaa

SEQ ID NO: 216886 - DNA, 550 bp, Zea Mays
catctctaaccattactaggccaaacacaaattccactcaagatctacattgccgaatgatcatgacattggtgtagggtttagtgtacttaccatataggggagccgatgatcctcttggccataatcgtggcgccatctttcttcgccactcccaccaagcgaggaagtagtatgcttcctggggttggggcttcttcaacggatctccgcctcctctgatcgccgctatgtgtaccggccaccgtcgccagcgatgaagtcgaggagatgggcaacagaggaggaaatctttaatccgcaactgggacgcacccaggacctgcactggatgcgcgatttcgggggcggctgcaactggcgcagcgcttcacttcgttgctgcgaatctcaagcagcgactgcggcgggaggtcgcggccgtgggcgacgtgtggcggcgcctggcggctggtcagagtttggtgctttaaactcgcgcggcgtcagtaatcctccaatgccaagcatgacgatgttgggggcacgaaactatggaaggtgatgttgg

SEQ ID NO: 216887 - DNA, 4066 bp, Zea Mays
  misc_feature (4065)..(4066): n is a, c, g, or t
tgggaatcgggttccgacttccgacacgcacacgcccccacatcgcgccgcgatggctgcttcgccctcgccgtcgaccgcgaccgcgaccgcttctccctcagcgtcagcggcggcggtcttggctgtaaacggggagcgggttgagctccgcgagggggacgtgaaccccggcaccacgctcctcgagttcctccgcacccgcacccgcttcaccgggcccaagctcggctgcggcgaaggcacgtcaccccgccctcctcctccctctccccgcgctcttccgtttcgcggatgcggcgcgtgcgtggtgctcctctccgcctacgacgcggcttcgggcgcggtgtcgcacgcggcggcgagctcctgcctcacgctggtgcacggccttcatcaccgcgccgtgaccaccaccgaggggctcgggggcggcggccgcctccacgccgtgcacgagcggctcgcggggttccacgcctcgcagtgcggcttctgcacgcccggggtgtgcatgtccctcgccgccgcgctcgcgggggccgaggccgaggccaaggccaaggcggggaggaggcccgccccacccgaggggttcgcgaggctcacggcggctgaggcggagtgggccgtggcgggaaatctctgccgttgcacggggtaccgcccgatcgccgacgcctgcaagagcttcgcggctgacgtggatttggaggacctgggcctcaactccttctggaggaagggggacgcccatgcttccaagctgccgcggtacgacgaggggagcatcggtgtgttcccggagttcctcaaggctgagatcagagcttcttctggggttgaccagtacacaccgccggcattgctgggaagtgccaccacttggcaccggcctcggagcgtggaggagtactataagctggtagattctgagttgtttgaccaaagtaaaacaaaggtggttgtggggaacacagcttcaggcgtttacagagaaacagaggtgtatgataggtacatcgacctcagatgcatcccggagctgaattcggttagtaaggaagccaatggtgttcaaattggagctgcagtaacgatttctcaggcaattgagattttaagagtagaagctggtggctgcaatgatgtaatcttctgtaagattgctgatcatatggaaaaggtggcgtctccatttgtccggaacactgcaagtttgggtggaaatttggtgatggcacagagggaccagtttgcctctgacatcgcaacgatccttcttgctgctgggtcatcgatatgcatccaggcatcatcaaaaaggttgactgtcatgatggaggacttccttcagatgccaccttgcgatcacaagacactgctattaagcatttgcattcctcgttggactcctattggtggcctattttctggtgataaaaccatggctgggacagaaagtctcttcagatggaacttcaagcagattaatattgagagagatatgtctggcttttggtgcatatgggagccaacatgccatcagggctaggaatgttgagaaactgttagtgggtaaacctattactacatcggtgctacttgaagcatgtagacgtctcaaggaaacaattgttcctaaagaaggcacaaggcatgctgcttataggtcaagcttggcagttgcctttctgtttacttttctttacccagtaactgaaggaactttgaagactgtaaaggaagttcatcttaatggctatgcaacttttggcaccaatggaaatccaaattgtggacccgatgcacatgttgatgtttcacttaaaaaggtcattgatgtgaactccggttcatgtaccaatgaacgcattcttgaatattcaaatcagattattgaaatcaataaagactatttccccgttggcataccaaccaagaaggttggagcagaactccaagcctctggtgaggctgtatttgtggatgacatccccgctcccaaggattgtgtttatggagcatttatatatagcacaaaacctttagcccatgtgaagagcatagaactcgacctttcactcaagcagcttaaaacgctgggagtagttactgttaaggatattccagaatgtggcagcaatgttggggccaacactatatttggacctgaacctctgtttggtgatccagttactcagtgtgcaggggaacctcttggtgttgtgattgcagaaacacaaagatttgccaatatagctgcaaaaaaagctgttgttaactacagtactgagaacttagatgctccaattttatccatagaggaggctgttaaaaggtgcagttatttcgaaaccccgccgtttcttcttcccctgaaaattggtgatttctcaaaaggaatggcagaagcagatcagaaaatctattctgaggttaaactcaattctcagtactacttttacatggaaacacaagctgctctggcaatacccgatgaggataactgcatggtagtgtatagctcaagccaatgccctgagacagcacagaatgtcattgcaaagtgccttggtttaccttgtcacaacgttcgtgttattaccagaagagttggtggtggatttggaggaaaggctgttagatcattacctcatttaagttgcaccgtcctgtccgtatgtatcttgaccgcaagactgacatgatagtgactggaggtcggcatcccatgaaaatatgctattcagtgggattcaaaccagatgggaaaatcactgctttgcatataggtttgttcataaatgcaggaatgacaaaagatattagcctcataatccctcataatttcattgaggcactgaagaaatataattggggtgccttttcttatgaagcaaaggtctgcagaacaaaccttgctacaaagtctgcgatgcgggggcctggagaagtacaaggttcttatgttgccgaagctataattgagcatgttgcttccacgctctccgctgatgctaatttggttagacgtaaaaatcttcacacggttgagagccttgctttgtttcacagtgagtgcactgaagatgccatgggttatacacttcactctatatgtgatcaagtgactgcatcagaaaactatcagcatcggcttgaaataatccagtctttcaacaaaaacaacaaatggaaaaagaggggcctctcttttgtgccaatagtacacaaagtattatctcgaccgacacctggaaaagtgtctattcttaatgatggatctgttgctgttgaagttggaggcattgagttaggccaggggctttggacaaaagtgaagcagatgacagcttttggtcttggacaactctgtcctaatcgaagtcaagagctgttggagagaataagagttattcaagcggatacattaagtaacgtacagggagggtggaccactgggagtaccacatcagaatctagttgtgaagcagttcgtctcgcatgcaatgtcttggtcaacaggctgaagccagtcaaggagcaatctcaagaaaagcaagacaatgtttcatgggatgaacttatttccaagggaattacgtgttgactctataggatctttagcttgtaacgctagccacaagagcgggaaaaactagggctataccattgggattggaggaccccatagggacgaggaggtatcagcgaatgttggttcgcatgccagccttttccccttctattgtacgcaatgtgaaagggtcgcaaccagaaggttgtttccccctcgatcagggcgtgaggtggagtcgggctcagtcctctgaccaagttcgacatgagataaacctaacattctccccctgttctcatacttactcgcttatgtttagaacttgttagactatgtgtgtgtgagtgtgtgtgggccggcaccactgttgggctgccagcccattagggttagggtttcctgtctctatatattgtaaccccatctattatcaatacaacacttaatcttccaacagaacttactctctccatcccataaann

SEQ ID NO: 216888 - DNA, 4184 bp, Zea Mays
  misc_feature (4183)..(4184): n is a, c, g, or t
ccctgcttgcgatttgcgaagctgcgagagtggcggtgctagtagtctagtagagtactcccagtagataagcaagctgcgggcgccgcccagatgggaatcgggttccgacttccgacacgcacacgcccccacatcgcgccgcgatggctgcttcgccctcgccgtcgaccgcgaccgcgaccgcttctccctcagcgtcagcggcggcggtcttggctgtaaacggggagcgggttgagctccgcgagggggacgtgaaccccggcaccacgctcctcgagttcctccgcacccgcacccgcttcaccgggcccaagctcggctgcggcgaaggcacgtcaccccgccctcctcctccctctccccgcgctcttccgtttcgcggatgcggcgcgtgcgtggtgctcctctccgcctacgacgcggcttcgggcgcggtgtcgcacgcggcggcgagctcctgcctcacgctggtgcacggccttcatcaccgcgccgtgaccaccaccgaggggctcgggggcggcggccgcctccacgccgtgcacgagcggctcgcggggttccacgcctcgcagtgcggcttctgcacgcccggggtgtgcatgtccctcgccgccgcgctcgcgggggccgaggccgaggccaaggccaaggcggggaggaggcccgccccacccgaggggttcgcgaggctcacggcggctgaggcggagtgggccgtggcgggaaatctctgccgttgcacggggtaccgcccgatcgccgacgcctgcaagagcttcgcggctgacgtggatttggaggacctgggcctcaactccttctggaggaagggggacgcccatgcttccaagctgccgcggtacgacgaggggagcatcggtgtgttcccggagttcctcaaggctgagatcagagcttcttctggggttgaccagtacacaccgccggcattgctgggaagtgccaccacttggcaccggcctcggagcgtggaggagtactataagctggtagattctgagttgtttgaccaaagtaaaacaaaggtggttgtggggaacacagcttcaggcgtttacagagaaacagaggtgtatgataggtacatcgacctcagatgcatcccggagctgaattcggttagtaaggaagccaatggtgttcaaattggagctgcagtaacgatttctcaggcaattgagattttaagagtagaagctggtggctgcaatgatgtaatcttctgtaagattgctgatcatatggaaaaggtggcgtctccatttgtccggaacactgcaagtttgggtggaaatttggtgatggcacagagggaccagtttgcctctgacatcgcaacgatccttcttgctgctgggtcatcgatatgcatccaggcatcatcaaaaaggttgactgtcatgatggaggacttccttcagatgccaccttgcgatcacaagacactgctattaagcatttgcattcctcgttggactcctattggtggcctattttctggtgataaaaccatggctgggacagaaagtaagacaggaacttctgtgctgtttgagacgtaccgagctgctccacgccctcttggcaatgcagttgcatatcttaattctgctttcttggctcaggtctcttcagatggaacttcaagcagattaatattgagagagatatgtctggcttttggtgcatatgggagccaacatgccatcagggctaggaatgttgagaaactgttagtgggtaaacctattactacatcggtgctacttgaagcatgtagacgtctcaaggaaacaattgttcctaaagaaggcacaaggcatgctgcttataggtcaagcttggcagttgcctttctgtttacttttctttacccagtaactgaaggaactttgaagactgtaaaggaagttcatcttaatggctatgcaacttttggcaccaatggaaatccaaattgtggacccgatgcacatgttgatgtttcacttaaaaaggtcattgatgtgaactccggttcatgtaccaatgaacgcattcttgaatattcaaatcagattattgaaatcaataaagactatttccccgttggcataccaaccaagaaggttggagcagaactccaagcctctggtgaggctgtatttgtggatgacatccccgctcccaaggattgtgtttatggagcatttatatatagcacaaaacctttagcccatgtgaagagcatagaactcgacctttcactcaagcagcttaaaacgctgggagtagttactgttaaggatattccagaatgtggcagcaatgttggggccaacactatatttggacctgaacctctgtttggtgatccagttactcagtgtgcaggggaacctcttggtgttgtgattgcagaaacacaaagatttgccaatatagctgcaaaaaaagctgttgttaactacagtactgagaacttagatgctccaattttatccatagaggaggctgttaaaaggtgcagttatttcgaaaccccgccgtttcttcttcccctgaaaattggtgatttctcaaaaggaatggcagaagcagatcagaaaatctattctgaggttaaactcaattctcagtactacttttacatggaaacacaagctgctctggcaatacccgatgaggataactgcatggtagtgtatagctcaagccaatgccctgagacagcacagaatgtcattgcaaagtgccttggtttaccttgtcacaacgttcgtgttattaccagaagagttggtggtggatttggaggaaaggctgttagatcattacctgtggcaactgcttgtgcacttgcagcatttaagttgcaccgtcctgtccgtatgtatcttgaccgcaagactgacatgatagtgactggaggtcggcatcccatgaaaatatgctattcagtgggattcaaaccagatgggaaaatcactgctttgcatataggtttgttcataaatgcaggaatgacaaaagatattagcctcataatccctcataatttcattgaggcactgaagaaatataattggggtgccttttcttatgaagcaaaggtctgcagaacaaaccttgctacaaagtctgcgatgcgggggcctggagaagtacaaggttcttatgttgccgaagctataattgagcatgttgcttccacgctctccgctgatgctaatttggttagacgtaaaaatcttcacacggttgagagccttgctttgtttcacagtgagtgcactgaagatgccatgggttatacacttcactctatatgtgatcaagtgactgcatcagaaaactatcagcatcggcttgaaataatccagtctttcaacaaaaacaacaaatggaaaaagaggggcctctcttttgtgccaatagtacacaaagtattatctcgaccgacacctggaaaagtgtctattcttaatgatggatctgttgctgttgaagttggaggcattgagttaggccaggggctttggacaaaagtgaagcagatgacagcttttggtcttggacaactctgtcctaatcgaagtcaagagctgttggagagaataagagttattcaagcggatacattaagtaacgtacagggagggtggaccactgggagtaccacatcagaatctagttgtgaagcagttcgtctcgcatgcaatgtcttggtcaacaggctgaagccagtcaaggagcaatctcaagaaaagcaagacaatgtttcatgggatgaacttatttccaagggacgaggaggtatcagcgaatgttggttcgcatgccagccttttccccttctattgtacgcaatgtgaaagggtcgcaaccagaaggttgtttccccctcgatcagggcgtgaggtggagtcgggctcagtcctctgaccaagttcgacatgagataaacctaacattctccccctgttctcatacttactcgcttatgtttagaacttgttagactatgtgtgtgtgagtgtgtgtgggccggcaccactgttgggctgccagcccattagggttagggtttcctgtctctatatattgtaaccccatctattatcaatacaacacttaatcttccaacagaacttactctctccatcccataaann

SEQ ID NO: 216889 - DNA, 1294 bp, Zea Mays
gtcaattgtaggcaaagcctatatggctttaagaaatggcgactggacttcgctcgcatactctctccatccttgtgaatgactgtcctggtgtcctcaacattgtaacaggagtctttgctcgcaggggctacaatatacagagccttgctgttggcccagctgagaaggaaggcatttcgcggattacaacagttgttcctggtactgttgaatccattgagaagttagttcagcagctttacaagcttattgatgtgcacgaagttcatgacattacccactcaccttttgctgaaagggaacttatgcttattaaggtttctgtcaacactgctgctcggaaggaaatcctagatattgctgaaatcttccgagcaaaacctgttgatgtttctgaccacacagtaacgcttcagtacccgtttgtggtaacagtaacaacatcatacccatgaagaaacactgaatgtttgatgccggtaccattttctcatgctgttttatctaactgctccaagctattagctgttgcaaaactcttgcataatggagggatcattgatgattgcagcttactggagatcttgacaagatggttgcactacaaaggttattggagccatatggcatctgtgaggtcgccagaactggacgagtagcactggtccgcgaatcgaaggtggactccaagtacctccgcggctactctcttccactgtagccttgcagtcgtgatgatgatggcaccatgaagagctcggctggttgtttatagagcagaccatctcgcgctgggttgtgttgtgcgattacaggacttgtttctttcatgtcgtgaactcccccggcctgcgtgtccaataacgcgtgttgaggctgcatgtgtattccaacgactgtcagaataagatgcatatcgtatctgtttacttcagtgaagagatgcatggatcgttcgaaatcaggttgcccacgtttcgtagtggaacatgtggagccgtggagaagaggaacacagattgcatataggatattagctgcctctatttcagcctctggttaaatgggacatatcagctgcgcatattaaatcgtatccatttattttatatctaaagcctgttctgtatatttttgcaaagaacaacttggagcaggatgaaagtggtacaggataatgatggaggggattctttgcaaaatatatagcaacagatgttagatccaagatgattgggcatgatttaatatatgcatcaaagtgttatgtgcatctgatatgatacatttt

SEQ ID NO: 216890 - DNA, 1680 bp, Zea Mays
tttagatggttctaactgctatggtggaagatctatctaaagaacctcaggttgaaagagagctgatgcttataaaactaaatgttgaacctgatcagcgtcctgaggtcatggttttagttgatattttcagagcaaaagttgttgatatatctgagaaaacacttaccatggaggtagctggagatcctggcaaaattgctgcagtgcagaggaatctatggaaatttggaatcaaagaaatttgcaggacaggaaaagtaatttctaatgttctttccttgcatggacacatatttttttccgtagtgctaatttaatgccctatcttcttagattgctttgagacgtgaaaggattggtgcaacagcccgtttctggcgattttctgctgcttcttacccagacctgatagatgcgttgccgaaaaatccacttacatctgtaaataggacagttaatggcagttttggtcaaccatccaatgctgggggtgatgtttatcctgtggaatcttacgagagcttatcagtgaaccatgtacttgatgctcattggggtgttctggatgatgatgatgcgactggacttcgctcgcatactctctccatccttgtgaatgactgtcctggtgtcctcaacattgtaacaggagtctttgctcgcaggggctacaatatacagagccttgctgttggcccagctgagaaggaaggcatttcgcggattacaacagttgttcctggtactgttgaatccattgagaagttagttcagcagctttacaagcttattgatgtgcacgaagttcatgacattacccactcaccttttgctgaaagggaacttatgcttattaaggtttctgtcaacactgctgctcggaaggaaatcctagatattgctgaaatcttccgagcaaaacctgttgatgtttctgaccacacagtaacgcttcagcttactggagatcttgacaagatggttgcactacaaaggttattggagccatatggcatctgtgaggtcgccagaactggacgagtagcactggtccgcgaatcgaaggtggactccaagtacctccgcggctactctcttccactgtagccttgcagtcgtgatgatgatggcaccatgaagagctcggctggttgtttatagagcagaccatctcgcgctgggttgtgttgtgcgattacaggacttgtttctttcatgtcgtgaactcccccggcctgcgtgtccaataacgcgtgttgaggctgcatgtgtattccaacgactgtcagaataagatgcatatcgtatctgtttacttcagtgaagagatgcatggatcgttcgaaatcaggttgcccacgtttcgtagtggaacatgtggagccgtggagaagaggaacacagattgcatataggatattagctgcctctatttcagcctctggttaaatgggacatatcagctgcgcatattaaatcgtatccatttattttatatctaaagcctgttctgtatatttttgcaaagaacaacttggagcaggatgaaagtggtacaggataatgatggaggggattctttgcaaaatatatagcaacagatgttagatccaagatgattgggcatgatttaatatatgcatcaaagtgttatgtgcatctgatatgatacatttt

SEQ ID NO: 216891 - DNA, 1070 bp, Zea Mays
atggggagttccgccccggtttctggacgttttccatggggggagcaggatgtcgctgtctgcagcgccagtcgctctcaccccgcgcaaccagctgctgagcggagcagtgtgacgctgccgctgagcaccacctctgtcaatctgacacagagacaggaggcccgaggccagccagccagccagccaagttggactacgggaggacgggacgagtggagaggcctgtgggcggcgctgctgcctgcattattgctgttaattaattattgttttttttttacatggtgtgcgttgtggcgaggaatccaatcatattcaaggacaagggtgtggtgtggagtggagactggagagcatcgtgcgtgcctggctctggctccgtcatggatctccgcctccgtctttgacccgctgtgcttgtcagctttggaggggagtcggggagacaattaatatcactacatcagtgaggaggatcagaggatggatcgatcttctttcttcttttgacggggatggatggattcagatttggcgaaagcgacggcgacgccctcccggtcccggatctaggccagcgagcgagggctggccggccggctgcctggctggtggctgctgctactcgagatgttgaggcccggctgccgtgggccgtcccgtatgctgaatcagatgccagcgtatagcctagcctagcctaggtagccccgagtgcgaatgtgcgatactgctactatcatatcatgctgctggtatctcgtcttcgaagctcaacctaaacttcatttctcttgcctgtgctacagagatatcttgttgttcccaaagacagaaaaaaaaagagggaactcatatgtagcaacggtgtttcagtcaccccaaggatcctctccagaataaagtgatttttttttttgcattttttttctagtcgaaatccttcttcctcatatatatagatacataggtttggctttaaggagatctgtccaaacaggtgacacatcatgcttctttgtaataattaatcttatggattggcctctagttcatttggcttttat

SEQ ID NO: 216892 - DNA, 1731 bp, Zea Mays
cccatctacaaagacacgtctaatctgccagagttatttcttgggctgttggtgaaagcgatgaagaatgatgtaatgttgaagagagttgctgctttctcaaagcggctgctgcaggtggctcttcaacggcctcctcaatatgcttgcggatgccttttcattctgtcagaagtccttaaggcaaagccaccattatgggggattgtgctccagaatgaatctgttgatgatggtgatgaacactttgaagacattttagagattcccgaggactcttctgttgcctcagcagtgctacataaacataatgaaaaagtagctgcacatgagaaacacaaccttgatgctgctgatggaattgatagtgtaaaacaagtaaatttggtagatgagaacaatgcatcaactgactcgtccagacaacatgcattctatgatccacgacacagagagccttcttactgcaatgcagatcgtgtcagttggtgggagttaacagtattggcttcacatgtgcacccttcagtttctactatggctagaacattgctatctggcaacaatattgtttacagtggtgatccgctgacagacctatcacttcctgctttccttgacaaattcatggaaaagaaaccaaaagggaaccgcatagctgaaggaagatggcatggtggatcacaaattgctccggctaaaaagcttaatctgaatcatcatctcatcggagaggagcttctagaattggcagaaaatgaagtgcctcctgaagatattgttttccaccgtttctatttgaacaagaccggcactgttaagcgtaagacaaagcagaaggactcagttcttgatgaagatgcgggggaactcttagctgataatgacgctgatgaggctagtgacgagagtggagatgagatactggatctgggagatgggttggcagatgatggagaatatgactatgacgaccttgactcaaatgcatttgaagaggaaaaagatttacttagagatgacagtgatgtggaatttgatgacgtttcagatgatactgcatctggggatgaagggtcagaaaatgacgatgacattcctattctcgcgggcgattcagatggcaacttaagtgatgacgagatggttgatgctggtaagggcggtgtctcttacacaaagaaaaggagggcagggaagaagagtgggttgtctccatttgcaagcctggatgattatgagcacctaatggttggggatgctgatgcaacaacagcaaagcggaagcacatggcaacagggagagctggtggtgagaagaaaccaaagttgagaccacgaaagaaaaggtcgcggagttcagaatgagaaacatgccttttacccttaactcttttaaaatgttcaccacaatggtgttcattacatttttgtacttctggaaggcacaggattgggtaacgctattgttgagccgagaatgtattgagattagattatacaggtgctctcatatagtagtccttatcccacacaacgcatttatacgggctaagtttaagaccaactcaaagagttgtttttcttattgagtcaaattttagattttctgagtaagaaattattctccaacaggtattctatctagagttgtagattagctagcaaaggcatatcgtcctttccacttgctaagccagtcctaattttcctgtctcagctcacccttcc

SEQ ID NO: 216893 - DNA, 3669 bp, Zea Mays
gttcgctcgctgttcgccccccagccgccaccgccagttcttccattcctccgcgctctttgagccttcgtctcccagtctcctcaactcaggtacgttgtccgcccgccgcacaccctcgccactgttcatcgttgcacgctggtgcttccctcatctccacagaacatctgattcggccagttgagttcctctcggacgctggttgtctccttcgacctccgtttccttgtcatttctgtgcctgacagcaacccgcgctcccgccgcatctattcatggcggagccgacccccaagtcgaagcgcaccaagaaagcgaagaagccctcggcccgggaaggtgatggagaggacatggatacgctcaagtctgacgtcgccacattcgcctcctccctcggcctcctccctggcgctggcgactccaacggcggcttcgatgactccgacttccgcaagtccggccccatgtataaatcctcaaaatttccttccaaacaaccccatcaaaaacctgataacacggcaaacccccatctaaaccctagacctaccaagaagccacaccctctcgagctacgtgactcctatgctgccaccaaacctggtgctgtcaacactaattaccccctgatgaaggcggcagcactctcagggcagtggtacactgatgctgatgagctggaggcgagggtcctaggcggtcgtaagcaggtgcctccagctgtggggcttcaggagatgcagggaatagtggagagaaaacgagagctggcagagaagctcatgttgcagtatgcgagggaatacgatgccgtgaggcgagggcatggtgacctgaagctcctggacatatcagcaaagtctggtacatcagctgacaaggtgtcagcatttacatgtcttgtcgaggacaatccaattgcaaacatgaaggcactcgattccctccttggtatgataacatcaaaagttggtaagaggtatgcgttcacaggattcgatgcaattaaggagttatttctcatgaggttattgcctgaccgtaagctgaaaagtcttatccaacgcccgctagacattttacctgaaacaaaagatgggtactcacttctgctcttctggcattgggaggactgcttaaaacagagatacgaaaggtttgttatggcattggaggatgcggtaaaagatatgctgccaaatcttaaggacaaagcaatgaaggttagctccaacagttttcatgcttttgaaaagtaagtcagaacaggaacgtcgtttgctcacagctcttgttaacaaacttggtgatcctgaaaggagagcagcatcaagtgctgcatatctgttaacatgtctcttggctgctcaccctaatatgaagatggtggtgatagatgaggtggattcttttctcttcagaccacatgttggacttagggccaagtaccaggctgtcaatttcttgagccagattcttcttacaaacaagggagatgggcctaaaattgcaaaacggttggtggatgtctacattgcacttttcaaggtactaatgagctctggtgataccaaaggagatacatatagcaaggacagcaagaaaaaggtaggaaaaatagagggaggaaataacaagatggactccagatccaagggaaacaatgaagtgggttcaacagcaggatcagatttggagctggactccagaatcctttctgcgcttttaactggtgtaaatagggcattaccatatgttgcaagctcagaagttgacgatattgtggaagtgcagacacctattcttttcagattggttcacgctgaaaatttcaatgttggtgttcaggcattgatgcttttgttccaaatatctataaagaataatatagcaagtgatcgtttgtaccgtgcattatactcaaaactcttgagtccttctgctgttacttcctcaaagccagagttatttcttgggctgttggtgaaagcgatgaagaatgatgtaatgttgaagagagttgctgctttctcaaagcggctgctgcaggtggctcttcaacggcctcctcaatatgcttgcggatgccttttcattctgtcagaagtccttaaggcaaagccaccattatgggggattgtgctccagaatgaatctgttgatgatggtgatgaacactttgaagacattttagagattcccgaggactcttctgttgcctcagcagtgctacataaacataatgaaaaagtagctgcacatgagaaacacaaccttgatgctgctgatggaattgatagtgtaaaacaagtaaatttggtagatgagaacaatgcatcaactgactcgtccagacaacatgcattctatgatccacgacacagagagccttcttactgcaatgcagatcgtgtcagttggtgggagttaacagtattggcttcacatgtgcacccttcagtttctactatggctagaacattgctatctggcaacaatattgtttacagtggtgatccgctgacagacctatcacttcctgctttccttgacaaattcatggaaaagaaaccaaaagggaaccgcatagctgaaggaagatggcatggtggatcacaaattgctccggctaaaaagcttaatctgaatcatcatctcatcggagaggagcttctagaattggcagaaaatgaagtgcctcctgaagatattgttttccaccgtttctatttgaacaagaccggcactgttaagcgtaagacaaagcagaaggactcagttcttgatgaagatgcgggggaactcttagctgataatgacgctgatgaggctagtgacgagagtggagatgagatactggatctgggagatgggttggcagatgatggagaatatgactatgacgaccttgactcaaatgcatttgaagaggaaaaagatttacttagagatgacagtgatgtggaatttgatgacgtttcagatgatactgcatctggggatgaagggtcagaaaatgacgatgacattcctattctcgcgggcgattcagatggcaacttaagtgatgacgagatggttgatgctggtaagggcggtgtctcttacacaaagaaaaggagggcagggaagaagagtgggttgtctccatttgcaagcctggatgattatgagcacctaatggttggggatgctgatgcaacaacagcaaagcggaagcacatggcaacagggagagctggtggtgagaagaaaccaaagttgagaccacgaaagaaaaggtcgcggagttcagaatgagaaacatgccttttacccttaactcttttaaaatgttcaccacaatggtgttcattacatttttgtacttctggaaggcacaggattgggtaacgctattgttgagccgagaatgtattgagattagattatacaggtgctctcatatagtagtccttatcccacacaacgcatttatacgggctaagtttaagaccaactcaaagagttgtttttcttattgagtcaaattttagattttctgagtaagaaattattctccaacaggtattctatctagagttgtagattagctagcaaaggcatatcgtcctttccacttgctaagccagtcctaattttcctgtctcagctcacccttcc

SEQ ID NO: 216894 - DNA, 3538 bp, Zea Mays
ccttgctgttcgctcgctgttcgccccccagccgccaccgccagttcttccattcctccgcgctctttgagccttcgtctcccagtctcctcaactcaggtacgttgtccgcccgccgcacaccctcgccactgttcatcgttgcacgctggtgcttccctcatctccacagaacatctgattcggccagttgagttcctctcggacgctggttgtctccttcgacctccgtttccttgtcatttctgtgcctgacagcaacccgcgctcccgccgcatctattcatggcggagccgacccccaagtcgaagcgcaccaagaaagcgaagaagccctcggcccgggaaggtgatggagaggacatggatacgctcaagtctgacgtcgccacattcgcctcctccctcggcctcctccctggcgctggcgactccaacggcggcttcgatgactccgacttccgcaagtccggccccatgtataaatcctcaaaatttccttccaaacaaccccatcaaaaacctgataacacggcaaacccccatctaaaccctagacctaccaagaagccacaccctctcgagctacgtgactcctatgctgccaccaaacctggtgctgtcaacactaattaccccctgatgaaggcggcagcactctcagggcagtggtacactgatgctgatgagctggaggcgagggtcctaggcggtcgtaagcaggtgcctccagctgtggggcttcaggagatgcagggaatagtggagagaaaacgagagctggcagagaagctcatgttgcagtatgcgagggaatacgatgccgtgaggcgagggcatggtgacctgaagctcctggacatatcagcaaagtctggtacatcagctgacaaggtgtcagcatttacatgtcttgtcgaggacaatccaattgcaaacatgaaggcactcgattccctccttggtatgataacatcaaaagttggtaagaggtatgcgttcacaggattcgatgcaattaaggagttatttctcatgaggttattgcctgaccgtaagctgaaaagtcttatccaacgcccgctagacattttacctgaaacaaaagatgggtactcacttctgctcttctggcattgggaggactgcttaaaacagagatacgaaaggtttgttatggcattggaggatgcggtaaaagatatgctgccaaatcttaaggacaaagcaatgaagacagttttcatgcttttgaaaagtaagtcagaacaggaacgtcgtttgctcacagctcttgttaacaaacttggtgatcctgaaaggagagcagcatcaagtgctgcatatctgttaacatgtctcttggctgctcaccctaatatgaagatggtggtgatagatgaggtggattcttttctcttcagaccacatgttggacttagggccaagtaccaggctgtcaatttcttgagccagattcttcttacaaacaagggagatgggcctaaaattgcaaaacggttggtggatgtctacattgcacttttcaaggtactaatgagctctggtgataccaaaggagatacatatagcaaggacagcaagaaaaaggtaggaaaaatagagggaggaaataacaagatggactccagatccaagggaaacaatgaagtgggttcaacagcaggatcagatttggagctggactccagaatcctttctgcgcttttaactggtgtaaatagggcattaccatatgttgcaagctcagaagttgacgatattgtggaagtgcagacacctattcttttcagattggttcacgctgaaaatttcaatgttggtgttcaggcattgatgcttttgttccaaatatctataaagaataatatagcaagtgatcgtttgtaccgtgcattatactcaaaactcttgagtccttctgctgttacttcctcaaagccagagttatttcttgggctgttggtgaaagcgatgaagaatgatgtaatgttgaagagagttgctgctttctcaaagcggctgctgcaggtggctcttcaacggcctcctcaatatgcttgcggatgccttttcattctgtcagaagtccttaaggcaaagccaccattatgggggattgtgctccagaatgaatctgttgatgatggtgatgaacactttgaagacattttagagattcccgaggactcttctgttgcctcagcagtgctacataaacataatgaaaaagtagctgcacatgagaaacacaaccttgatgctgctgatggaattgatagtgtaaaacaagtaaatttggtagatgagaacaatgcatcaactgactcgtccagacaacatgcattctatgatccacgacacagagagccttcttactgacctatcacttcctgctttccttgacaaattcatggaaaagaaaccaaaagggaaccgcatagctgaaggaagatggcatggtggatcacaaattgctccggctaaaaagcttaatctgaatcatcatctcatcggagaggagcttctagaattggcagaaaatgaagtgcctcctgaagatattgttttccaccgtttctatttgaacaagaccggcactgttaagcgtaagacaaagcagaaggactcagttcttgatgaagatgcgggggaactcttagctgataatgacgctgatgaggctagtgacgagagtggagatgagatactggatctgggagatgggttggcagatgatggagaatatgactatgacgaccttgactcaaatgcatttgaagaggaaaaagatttacttagagatgacagtgatgtggaatttgatgacgtttcagatgatactgcatctggggatgaagggtcagaaaatgacgatgacattcctattctcgcgggcgattcagatggcaacttaagtgatgacgagatggttgatgctggtaagggcggtgtctcttacacaaagaaaaggagggcagggaagaagagtgggttgtctccatttgcaagcctggatgattatgagcacctaatggttggggatgctgatgcaacaacagcaaagcggaagcacatggcaacagggagagctggtggtgagaagaaaccaaagttgagaccacgaaagaaaaggtcgcggagttcagaatgagaaacatgccttttacccttaactcttttaaaatgttcaccacaatggtgttcattacatttttgtacttctggaaggcacaggattgggtaacgctattgttgagccgagaatgtattgagattagattatacaggtgctctcatatagtagtccttatcccacacaacgcatttatacgggctaagtttaagaccaactcaaagagttgtttttcttattgagtcaaattttagattttctgagtaagaaattattctccaacaggtattctatctagagttgtagattagctagcaaaggcatatcgtcctttccacttgctaagccagtcctaattttcctgtctcagctcacccttcc

SEQ ID NO: 216895 - DNA, 2944 bp, Zea Mays
taacccttgctgttcgctcgctgttcgccccccagccgccaccgccagttcttccattcctccgcgctctttgagccttcgtctcccagtctcctcaactcaggtacgttgtccgcccgccgcacaccctcgccactgttcatcgttgcacgctggtgcttccctcatctccacagaacatctgattcggccagttgagttcctctcggacgctggttgtctccttcgacctccgtttccttgtcatttctgtgcctgacagcaacccgcgctcccgccgcatctattcatggcggagccgacccccaagtcgaagcgcaccaagaaagcgaagaagccctcggcccgggaaggtgatggagaggacatggatacgctcaagtctgacgtcgccacattcgcctcctccctcggcctcctccctggcgctggcgactccaacggcggcttcgatgactccgacttccgcaagtccggccccatgtataaatcctcaaaatttccttccaaacaaccccatcaaaaacctgataacacggcaaacccccatctaaaccctagacctaccaagaagccacaccctctcgagctacgtgactcctatgctgccaccaaacctggtgctgtcaacactaattaccccctgatgaaggcggcagcactctcagggcagtggtacactgatgctgatgagctggaggcgagggtcctaggcggtcgtaagcaggtgcctccagctgtggggcttcaggagatgcagggaatagtggagagaaaacgagagctggcagagaagctcatgttgcagtatgcgagggaatacgatgccgtgaggcgagggcatggtgacctgaagctcctggacatatcagcaaagtctggtacatcagctgacaaggtgtcagcatttacatgtcttgtcgaggacaatccaattgcaaacatgaaggcactcgattccctccttggtatgataacatcaaaagttggtaagaggtatgcgttcacaggattcgatgcaattaaggagttatttctcatgaggttattgcctgaccgtaagctgaaaagtcttatccaacgcccgctagacattttacctgaaacaaaagatgggtactcacttctgctcttctggcattgggaggactgcttaaaacagagatacgaaaggtttgttatggcattggaggatgcggtaaaagatatgctgccaaatcttaaggacaaagcaatgaagccagagttatttcttgggctgttggtgaaagcgatgaagaatgatgtaatgttgaagagagttgctgctttctcaaagcggctgctgcaggtggctcttcaacggcctcctcaatatgcttgcggatgccttttcattctgtcagaagtccttaaggcaaagccaccattatgggggattgtgctccagaatgaatctgttgatgatggtgatgaacactttgaagacattttagagattcccgaggactcttctgttgcctcagcagtgctacataaacataatgaaaaagtagctgcacatgagaaacacaaccttgatgctgctgatggaattgatagtgtaaaacaagtaaatttggtagatgagaacaatgcatcaactgactcgtccagacaacatgcattctatgatccacgacacagagagccttcttactgcaatgcagatcgtgtcagttggtgggagttaacagtattggcttcacatgtgcacccttcagtttctactatggctagaacattgctatctggcaacaatattgtttacagtggtgatccgctgacagacctatcacttcctgctttccttgacaaattcatggaaaagaaaccaaaagggaaccgcatagctgaaggaagatggcatggtggatcacaaattgctccggctaaaaagcttaatctgaatcatcatctcatcggagaggagcttctagaattggcagaaaatgaagtgcctcctgaagatattgttttccaccgtttctatttgaacaagaccggcactgttaagcgtaagacaaagcagaaggactcagttcttgatgaagatgcgggggaactcttagctgataatgacgctgatgaggctagtgacgagagtggagatgagatactggatctgggagatgggttggcagatgatggagaatatgactatgacgaccttgactcaaatgcatttgaagaggaaaaagatttacttagagatgacagtgatgtggaatttgatgacgtttcagatgatactgcatctggggatgaagggtcagaaaatgacgatgacattcctattctcgcgggcgattcagatggcaacttaagtgatgacgagatggttgatgctggtaagggcggtgtctcttacacaaagaaaaggagggcagggaagaagagtgggttgtctccatttgcaagcctggatgattatgagcacctaatggttggggatgctgatgcaacaacagcaaagcggaagcacatggcaacagggagagctggtggtgagaagaaaccaaagttgagaccacgaaagaaaaggtcgcggagttcagaatgagaaacatgccttttacccttaactcttttaaaatgttcaccacaatggtgttcattacatttttgtacttctggaaggcacaggattgggtaacgctattgttgagccgagaatgtattgagattagattatacaggtgctctcatatagtagtccttatcccacacaacgcatttatacgggctaagtttaagaccaactcaaagagttgtttttcttattgagtcaaattttagattttctgagtaagaaattattctccaacaggtattctatctagagttgtagattagctagcaaaggcatatcgtcctttccacttgctaagccagtcctaattttcctgtctcagctcacccttcc

SEQ ID NO: 216896 - DNA, 3580 bp, Zea Mays
ctaacccttgctgttcgctcgctgttcgccccccagccgccaccgccagttcttccattcctccgcgctctttgagccttcgtctcccagtctcctcaactcagttgagttcctctcggacgctggttgtctccttcgacctccgtttccttgtcatttctgtgcctgacagcaacccgcgctcccgccgcatctattcatggcggagccgacccccaagtcgaagcgcaccaagaaagcgaagaagccctcggcccgggaaggtgatggagaggacatggatacgctcaagtctgacgtcgccacattcgcctcctccctcggcctcctccctggcgctggcgactccaacggcggcttcgatgactccgacttccgcaagtccggccccatgtataaatcctcaaaatttccttccaaacaaccccatcaaaaacctgataacacggcaaacccccatctaaaccctagacctaccaagaagccacaccctctcgagctacgtgactcctatgctgccaccaaacctggtgctgtcaacactaattaccccctgatgaaggcggcagcactctcagggcagtggtacactgatgctgatgagctggaggcgagggtcctaggcggtcgtaagcaggtgcctccagctgtggggcttcaggagatgcagggaatagtggagagaaaacgagagctggcagagaagctcatgttgcagtatgcgagggaatacgatgccgtgaggcgagggcatggtgacctgaagctcctggacatatcagcaaagtctggtacatcagctgacaaggtgtcagcatttacatgtcttgtcgaggacaatccaattgcaaacatgaaggcactcgattccctccttggtatgataacatcaaaagttggtaagaggtatgcgttcacaggattcgatgcaattaaggagttatttctcatgaggttattgcctgaccgtaagctgaaaagtcttatccaacgcccgctagacattttacctgaaacaaaagatgggtactcacttctgctcttctggcattgggaggactgcttaaaacagagatacgaaaggtttgttatggcattggaggatgcggtaaaagatatgctgccaaatcttaaggacaaagcaatgaagacagttttcatgcttttgaaaagtaagtcagaacaggaacgtcgtttgctcacagctcttgttaacaaacttggtgatcctgaaaggagagcagcatcaagtgctgcatatctgttaacatgtctcttggctgctcaccctaatatgaagatggtggtgatagatgaggtggattcttttctcttcagaccacatgttggacttagggccaagtaccaggctgtcaatttcttgagccagattcttcttacaaacaagggagatgggcctaaaattgcaaaacggttggtggatgtctacattgcacttttcaaggtactaatgagctctggtgataccaaaggagatacatatagcaaggacagcaagaaaaaggtaggaaaaatagagggaggaaataacaagatggactccagatccaagggaaacaatgaagtgggttcaacagcaggatcagatttggagctggactccagaatcctttctgcgcttttaactggtgtaaatagggcattaccatatgttgcaagctcagaagttgacgatattgtggaagtgcagacacctattcttttcagattggttcacgctgaaaatttcaatgttggtgttcaggcattgatgcttttgttccaaatatctataaagaataatatagcaagtgatcgtttgtaccgtgcattatactcaaaactcttgagtccttctgctgttacttcctcaaagccagagttatttcttgggctgttggtgaaagcgatgaagaatgatgtaatgttgaagagagttgctgctttctcaaagcggctgctgcaggtggctcttcaacggcctcctcaatatgcttgcggatgccttttcattctgtcagaagtccttaaggcaaagccaccattatgggggattgtgctccagaatgaatctgttgatgatggtgatgaacactttgaagacattttagagattcccgaggactcttctgttgcctcagcagtgctacataaacataatgaaaaagtagctgcacatgagaaacacaaccttgatgctgctgatggaattgatagtgtaaaacaagtaaatttggtagatgagaacaatgcatcaactgactcgtccagacaacatgcattctatgatccacgacacagagagccttcttactgcaatgcagatcgtgtcagttggtgggagttaacagtattggcttcacatgtgcacccttcagtttctactatggctagaacattgctatctggcaacaatattgtttacagtggtgatccgctgacagacctatcacttcctgctttccttgacaaattcatggaaaagaaaccaaaagggaaccgcatagctgaaggaagatggcatggtggatcacaaattgctccggctaaaaagcttaatctgaatcatcatctcatcggagaggagcttctagaattggcagaaaatgaagtgcctcctgaagatattgttttccaccgtttctatttgaacaagaccggcactgttaagcgtaagacaaagcagaaggactcagttcttgatgaagatgcgggggaactcttagctgataatgacgctgatgaggctagtgacgagagtggagatgagatactggatctgggagatgggttggcagatgatggagaatatgactatgacgaccttgactcaaatgcatttgaagaggaaaaagatttacttagagatgacagtgatgtggaatttgatgacgtttcagatgatactgcatctggggatgaagggtcagaaaatgacgatgacattcctattctcgcgggcgattcagatggcaacttaagtgatgacgagatggttgatgctggtaagggcggtgtctcttacacaaagaaaaggagggcagggaagaagagtgggttgtctccatttgcaagcctggatgattatgagcacctaatggttggggatgctgatgcaacaacagcaaagcggaagcacatggcaacagggagagctggtggtgagaagaaaccaaagttgagaccacgaaagaaaaggtcgcggagttcagaatgagaaacatgccttttacccttaactcttttaaaatgttcaccacaatggtgttcattacatttttgtacttctggaaggcacaggattgggtaacgctattgttgagccgagaatgtattgagattagattatacaggtgctctcatatagtagtccttatcccacacaacgcatttatacgggctaagtttaagaccaactcaaagagttgtttttcttattgagtcaaattttagattttctgagtaagaaattattctccaacaggtattctatctagagttgtagattagctagcaaaggcatatcgtcctttccacttgctaagccagtcctaattttcctgtctcagctcacccttcc

SEQ ID NO: 216897 - DNA, 3693 bp, Zea Mays
ctaacccttgctgttcgctcgctgttcgccccccagccgccaccgccagttcttccattcctccgcgctctttgagccttcgtctcccagtctcctcaactcagcaacccgcgctcccgccgcatctattcatggcggagccgacccccaagtcgaagcgcaccaagaaagcgaagaagccctcggcccgggaaggtgatggagaggacatggatacgctcaagtctgacgtcgccacattcgcctcctccctcggcctcctccctggcgctggcgactccaacggcggcttcgatgactccgacttccgcaagtccggccccatgtataaatcctcaaaatttccttccaaacaaccccatcaaaaacctgataacacggcaaacccccatctaaaccctagacctaccaagaagccacaccctctcgagctacgtgactcctatgctgccaccaaacctggtgctgtcaacactaattaccccctgatgaaggcggcagcactctcagggcagtggtacactgatgctgatgagctggaggcgagggtcctaggcggtcgtaagcaggtgcctccagctgtggggcttcaggagatgcagggaatagtggagagaaaacgagagctggcagagaagctcatgttgcagtatgcgagggaatacgatgccgtgaggcgagggcatggtgacctgaagctcctggacatatcagcaaagtctggtacatcagctgacaaggtgtcagcatttacatgtcttgtcgaggacaatccaattgcaaacatgaaggcactcgattccctccttggtatgataacatcaaaagttggtaagaggtatgcgttcacaggattcgatgcaattaaggagttatttctcatgaggttattgcctgaccgtaagctgaaaagtcttatccaacgcccgctagacattttacctgaaacaaaagatgggtactcacttctgctcttctggcattgggaggactgcttaaaacagagatacgaaaggtttgttatggcattggaggatgcggtaaaagatatgctgccaaatcttaaggacaaagcaatgaagtatgacagatgatgacatcaggaagatacatggaaaccacaaacaagaggagagaaaggaaggaaagcaaattgtttatttaattagagtcggacatggcaatatgtgcaacttacaagagcaagacaagtctacggacgaagtctgttttgggctatgacgatcagcatgagagggaccgacagttttcatgcttttgaaaagtaagtcagaacaggaacgtcgtttgctcacagctcttgttaacaaacttggtgatcctgaaaggagagcagcatcaagtgctgcatatctgttaacatgtctcttggctgctcaccctaatatgaagatggtggtgatagatgaggtggattcttttctcttcagaccacatgttggacttagggccaagtaccaggctgtcaatttcttgagccagattcttcttacaaacaagggagatgggcctaaaattgcaaaacggttggtggatgtctacattgcacttttcaaggtactaatgagctctggtgataccaaaggagatacatatagcaaggacagcaagaaaaaggtaggaaaaatagagggaggaaataacaagatggactccagatccaagggaaacaatgaagtgggttcaacagcaggatcagatttggagctggactccagaatcctttctgcgcttttaactggtgtaaatagggcattaccatatgttgcaagctcagaagttgacgatattgtggaagtgcagacacctattcttttcagattggttcacgctgaaaatttcaatgttggtgttcaggcattgatgcttttgttccaaatatctataaagaataatatagcaagtgatcgtttgtaccgtgcattatactcaaaactcttgagtccttctgctgttacttcctcaaagccagagttatttcttgggctgttggtgaaagcgatgaagaatgatgtaatgttgaagagagttgctgctttctcaaagcggctgctgcaggtggctcttcaacggcctcctcaatatgcttgcggatgccttttcattctgtcagaagtccttaaggcaaagccaccattatgggggattgtgctccagaatgaatctgttgatgatggtgatgaacactttgaagacattttagagattcccgaggactcttctgttgcctcagcagtgctacataaacataatgaaaaagtagctgcacatgagaaacacaaccttgatgctgctgatggaattgatagtgtaaaacaagtaaatttggtagatgagaacaatgcatcaactgactcgtccagacaacatgcattctatgatccacgacacagagagccttcttactgcaatgcagatcgtgtcagttggtgggagttaacagtattggcttcacatgtgcacccttcagtttctactatggctagaacattgctatctggcaacaatattgtttacagtggtgatccgctgacagacctatcacttcctgctttccttgacaaattcatggaaaagaaaccaaaagggaaccgcatagctgaaggaagatggcatggtggatcacaaattgctccggctaaaaagcttaatctgaatcatcatctcatcggagaggagcttctagaattggcagaaaatgaagtgcctcctgaagatattgttttccaccgtttctatttgaacaagaccggcactgttaagcgtaagacaaagcagaaggactcagttcttgatgaagatgcgggggaactcttagctgataatgacgctgatgaggctagtgacgagagtggagatgagatactggatctgggagatgggttggcagatgatggagaatatgactatgacgaccttgactcaaatgcatttgaagaggaaaaagatttacttagagatgacagtgatgtggaatttgatgacgtttcagatgatactgcatctggggatgaagggtcagaaaatgacgatgacattcctattctcgcgggcgattcagatggcaacttaagtgatgacgagatggttgatgctggtaagggcggtgtctcttacacaaagaaaaggagggcagggaagaagagtgggttgtctccatttgcaagcctggatgattatgagcacctaatggttggggatgctgatgcaacaacagcaaagcggaagcacatggcaacagggagagctggtggtgagaagaaaccaaagttgagaccacgaaagaaaaggtcgcggagttcagaatgagaaacatgccttttacccttaactcttttaaaatgttcaccacaatggtgttcattacatttttgtacttctggaaggcacaggattgggtaacgctattgttgagccgagaatgtattgagattagattatacaggtgctctcatatagtagtccttatcccacacaacgcatttatacgggctaagtttaagaccaactcaaagagttgtttttcttattgagtcaaattttagattttctgagtaagaaattattctccaacaggtattctatctagagttgtagattagctagcaaaggcatatcgtcctttccacttgctaagccagtcctaattttcctgtctcagctcacccttcc

SEQ ID NO: 216898 - DNA, 3675 bp, Zea Mays
ctaacccttgctgttcgctcgctgttcgccccccagccgccaccgccagttcttccattcctccgcgctctttgagccttcgtctcccagtctcctcaactcaggtacgttgtccgcccgccgcacaccctcgccactgttcatcgttgcacgctggtgcttccctcatctccacagaacatctgattcggccagttgagttcctctcggacgctggttgtctccttcgacctccgtttccttgtcatttctgtgcctgacagcaacccgcgctcccgccgcatctattcatggcggagccgacccccaagtcgaagcgcaccaagaaagcgaagaagccctcggcccgggaaggtgatggagaggacatggatacgctcaagtctgacgtcgccacattcgcctcctccctcggcctcctccctggcgctggcgactccaacggcggcttcgatgactccgacttccgcaagtccggccccatgtataaatcctcaaaatttccttccaaacaaccccatcaaaaacctgataacacggcaaacccccatctaaaccctagacctaccaagaagccacaccctctcgagctacgtgactcctatgctgccaccaaacctggtgctgtcaacactaattaccccctgatgaaggcggcagcactctcagggcagtggtacactgatgctgatgagctggaggcgagggtcctaggcggtcgtaagcaggtgcctccagctgtggggcttcaggagatgcagggaatagtggagagaaaacgagagctggcagagaagctcatgttgcagtatgcgagggaatacgatgccgtgaggcgagggcatggtgacctgaagctcctggacatatcagcaaagtctggtacatcagctgacaaggtgtcagcatttacatgtcttgtcgaggacaatccaattgcaaacatgaaggcactcgattccctccttggtatgataacatcaaaagttggtaagaggtatgcgttcacaggattcgatgcaattaaggagttatttctcatgaggttattgcctgaccgtaagctgaaaagtcttatccaacgcccgctagacattttacctgaaacaaaagatgggtactcacttctgctcttctggcattgggaggactgcttaaaacagagatacgaaaggtttgttatggcattggaggatgcggtaaaagatatgctgccaaatcttaaggacaaagcaatgaagacagttttcatgcttttgaaaagtaagtcagaacaggaacgtcgtttgctcacagctcttgttaacaaacttggtgatcctgaaaggagagcagcatcaagtgctgcatatctgttaacatgtctcttggctgctcaccctaatatgaagatggtggtgatagatgaggtggattcttttctcttcagaccacatgttggacttagggccaagtaccaggctgtatgtcaatttcttgagccagattcttcttacaaacaagggagatgggcctaaaattgcaaaacggttggtggatgtctacattgcacttttcaaggtactaatgagctctggtgataccaaaggagatacatatagcaaggacagcaagaaaaaggtaggaaaaatagagggaggaaataacaagatggactccagatccaagggaaacaatgaagtgggttcaacagcaggatcagatttggagctggactccagaatcctttctgcgcttttaactggtgtaaatagggcattaccatatgttgcaagctcagaagttgacgatattgtggaagtgcagacacctattcttttcagattggttcacgctgaaaatttcaatgttggtgttcaggcattgatgcttttgttccaaatatctataaagaataatatagcaagtgatcgtttgtaccgtgcattatactcaaaactcttgagtccttctgctgttacttcctcaaagccagagttatttcttgggctgttggtgaaagcgatgaagaatgatgtaatgttgaagagagttgctgctttctcaaagcggctgctgcaggtggctcttcaacggcctcctcaatatgcttgcggatgccttttcattctgtcagaagtccttaaggcaaagccaccattatgggggattgtgctccagaatgaatctgttgatgatggtgatgaacactttgaagacattttagagattcccgaggactcttctgttgcctcagcagtgctacataaacataatgaaaaagtagctgcacatgagaaacacaaccttgatgctgctgatggaattgatagtgtaaaacaagtaaatttggtagatgagaacaatgcatcaactgactcgtccagacaacatgcattctatgatccacgacacagagagccttcttactgcaatgcagatcgtgtcagttggtgggagttaacagtattggcttcacatgtgcacccttcagtttctactatggctagaacattgctatctggcaacaatattgtttacagtggtgatccgctgacagacctatcacttcctgctttccttgacaaattcatggaaaagaaaccaaaagggaaccgcatagctgaaggaagatggcatggtggatcacaaattgctccggctaaaaagcttaatctgaatcatcatctcatcggagaggagcttctagaattggcagaaaatgaagtgcctcctgaagatattgttttccaccgtttctatttgaacaagaccggcactgttaagcgtaagacaaagcagaaggactcagttcttgatgaagatgcgggggaactcttagctgataatgacgctgatgaggctagtgacgagagtggagatgagatactggatctgggagatgggttggcagatgatggagaatatgactatgacgaccttgactcaaatgcatttgaagaggaaaaagatttacttagagatgacagtgatgtggaatttgatgacgtttcagatgatactgcatctggggatgaagggtcagaaaatgacgatgacattcctattctcgcgggcgattcagatggcaacttaagtgatgacgagatggttgatgctggtaagggcggtgtctcttacacaaagaaaaggagggcagggaagaagagtgggttgtctccatttgcaagcctggatgattatgagcacctaatggttggggatgctgatgcaacaacagcaaagcggaagcacatggcaacagggagagctggtggtgagaagaaaccaaagttgagaccacgaaagaaaaggtcgcggagttcagaatgagaaacatgccttttacccttaactcttttaaaatgttcaccacaatggtgttcattacatttttgtacttctggaaggcacaggattgggtaacgctattgttgagccgagaatgtattgagattagattatacaggtgctctcatatagtagtccttatcccacacaacgcatttatacgggctaagtttaagaccaactcaaagagttgtttttcttattgagtcaaattttagattttctgagtaagaaattattctccaacaggtattctatctagagttgtagattagctagcaaaggcatatcgtcctttccacttgctaagccagtcctaattttcctgtctcagctcacccttcc

SEQ ID NO: 216899 - DNA, 3663 bp, Zea Mays
ctaacccttgctgttcgctcgctgttcgccccccagccgccaccgccagttcttccattcctccgcgctctttgagccttcgtctcccagtctcctcaactcaggtacgttgtccgcccgccgcacaccctcgccactgttcatcgttgcacgctggtgcttccctcatctccacagaacatctgattcggccagttgagttcctctcggacgctggttgtctccttcgacctccgtttccttgtcatttctgtgcctgacagcaacccgcgctcccgccgcatctattcatggcggagccgacccccaagtcgaagcgcaccaagaaagcgaagaagccctcggcccgggaaggtgatggagaggacatggatacgctcaagtctgacgtcgccacattcgcctcctccctcggcctcctccctggcgctggcgactccaacggcggcttcgatgactccgacttccgcaagtccggccccatgtataaatcctcaaaatttccttccaaacaaccccatcaaaaacctgataacacggcaaacccccatctaaaccctagacctaccaagaagccacaccctctcgagctacgtgactcctatgctgccaccaaacctggtgctgtcaacactaattaccccctgatgaaggcggcagcactctcagggcagtggtacactgatgctgatgagctggaggcgagggtcctaggcggtcgtaagcaggtgcctccagctgtggggcttcaggagatgcagggaatagtggagagaaaacgagagctggcagagaagctcatgttgcagtatgcgagggaatacgatgccgtgaggcgagggcatggtgacctgaagctcctggacatatcagcaaagtctggtacatcagctgacaaggtgtcagcatttacatgtcttgtcgaggacaatccaattgcaaacatgaaggcactcgattccctccttggtatgataacatcaaaagttggtaagaggtatgcgttcacaggattcgatgcaattaaggagttatttctcatgaggttattgcctgaccgtaagctgaaaagtcttatccaacgcccgctagacattttacctgaaacaaaagatgggtactcacttctgctcttctggcattgggaggactgcttaaaacagagatacgaaaggtttgttatggcattggaggatgcggtaaaagatatgctgccaaatcttaaggacaaagcaatgaagacagttttcatgcttttgaaaagtaagtcagaacaggaacgtcgtttgctcacagctcttgttaacaaacttggtgatcctgaaaggagagcagcatcaagtgctgcatatctgttaacatgtctcttggctgctcaccctaatatgaagatggtggtgatagatgaggtggattcttttctcttcagaccacatgttggacttagggccaagtaccaggctgtcaatttcttgagccagattcttcttacaaacaagggagatgggcctaaaattgcaaaacggttggtggatgtctacattgcacttttcaaggtactaatgagctctggtgataccaaaggagatacatatagcaaggacagcaagaaaaaggtaggaaaaatagagggaggaaataacaagatggactccagatccaagggaaacaatgaagtgggttcaacagcaggatcagatttggagctggactccagaatcctttctgcgcttttaactggtgtaaatagggcattaccatatgttgcaagctcagaagttgacgatattgtggaagtgcagacacctattcttttcagattggttcacgctgaaaatttcaatgttggtgttcaggcattgatgcttttgttccaaatatctataaagaataatatagcaagtgatcgtttgtaccgtgcattatactcaaaactcttgagtccttctgctgttacttcctcaaagccagagttatttcttgggctgttggtgaaagcgatgaagaatgatgtaatgttgaagagagttgctgctttctcaaagcggctgctgcaggtggctcttcaacggcctcctcaatatgcttgcggatgccttttcattctgtcagaagtccttaaggcaaagccaccattatgggggattgtgctccagaatgaatctgttgatgatggtgatgaacactttgaagacattttagagattcccgaggactcttctgttgcctcagcagtgctacataaacataatgaaaaagtagctgcacatgagaaacacaaccttgatgctgctgatggaattgatagtgtaaaacaagtaaatttggtagatgagaacaatgcatcaactgactcgtccagacaacatgcattctatgatccacgacacagagagccttcttactgatcgtgtcagttggtgggagttaacagtattggcttcacatgtgcacccttcagtttctactatggctagaacattgctatctggcaacaatattgtttacagtggtgatccgctgacagacctatcacttcctgctttccttgacaaattcatggaaaagaaaccaaaagggaaccgcatagctgaaggaagatggcatggtggatcacaaattgctccggctaaaaagcttaatctgaatcatcatctcatcggagaggagcttctagaattggcagaaaatgaagtgcctcctgaagatattgttttccaccgtttctatttgaacaagaccggcactgttaagcgtaagacaaagcagaaggactcagttcttgatgaagatgcgggggaactcttagctgataatgacgctgatgaggctagtgacgagagtggagatgagatactggatctgggagatgggttggcagatgatggagaatatgactatgacgaccttgactcaaatgcatttgaagaggaaaaagatttacttagagatgacagtgatgtggaatttgatgacgtttcagatgatactgcatctggggatgaagggtcagaaaatgacgatgacattcctattctcgcgggcgattcagatggcaacttaagtgatgacgagatggttgatgctggtaagggcggtgtctcttacacaaagaaaaggagggcagggaagaagagtgggttgtctccatttgcaagcctggatgattatgagcacctaatggttggggatgctgatgcaacaacagcaaagcggaagcacatggcaacagggagagctggtggtgagaagaaaccaaagttgagaccacgaaagaaaaggtcgcggagttcagaatgagaaacatgccttttacccttaactcttttaaaatgttcaccacaatggtgttcattacatttttgtacttctggaaggcacaggattgggtaacgctattgttgagccgagaatgtattgagattagattatacaggtgctctcatatagtagtccttatcccacacaacgcatttatacgggctaagtttaagaccaactcaaagagttgtttttcttattgagtcaaattttagattttctgagtaagaaattattctccaacaggtattctatctagagttgtagattagctagcaaaggcatatcgtcctttccacttgctaagccagtcctaattttcctgtctcagctcacccttcc

SEQ ID NO: 216900 - DNA, 3639 bp, Zea Mays
tctaacccttgctgttcgctcgctgttcgccccccagccgccaccgccagttcttccattcctccgcgctctttgagccttcgtctcccagtctcctcaactcaggtacgttgtccgcccgccgcacaccctcgccactgttcatcgttgcacgctggtgcttccctcatctccacagaacatctgattcggccagttgagttcctctcggacgctggttgtctccttcgacctccgtttccttgtcatttctgtgcctgacagcaacccgcgctcccgccgcatctattcatggcggagccgacccccaagtcgaagcgcaccaagaaagcgaagaagccctcggcccgggaaggtgatggagaggacatggatacgctcaagtctgacgtcgccacattcgcctcctccctcggcctcctccctggcgctggcgactccaacggcggcttcgatgactccgacttccgcaagtccggccccatgtataaatcctcaaaatttccttccaaacaaccccatcaaaaacctgataacacggcaaacccccatctaaaccctagacctaccaagaagccacaccctctcgagctacgtgactcctatgctgccaccaaacctggtgctgtcaacactaattaccccctgatgaaggcggcagcactctcagggcagtggtacactgatgctgatgagctggaggcgagggtcctaggcggtcgtaagcaggtgcctccagctgtggggcttcaggagatgcagggaatagtggagagaaaacgagagctggcagagaagctcatgttgcagtatgcgagggaatacgatgccgtgaggcgagggcatggtgacctgaagctcctggacatatcagcaaagtctggtacatcagctgacaaggtgtcagcatttacatgtcttgtcgaggacaatccaattgcaaacatgaaggcactcgattccctccttggtatgataacatcaaaagttggtaagaggtatgcgttcacaggattcgatgcaattaaggagttatttctcatgaggttattgcctgaccgtaagctgaaaagtcttatccaacgcccgctagacattttacctgaaacaaaagatgggtactcacttctgctcttctggcattgggaggactgcttaaaacagagatacgaaaggtttgttatggcattggaggatgcggtaaaagatatgctgccaaatcttaaggacaaagcaatgaagacagttttcatgcttttgaaaagtaagtcagaacaggaacgtcgtttgctcacagctcttgttaacaaacttggtgatcctgaaaggagagcagcatcaagtgctgcatatctgttaacatgtctcttggctgctcaccctaatatgaagatggtggtgatagatgaggtggattcttttctcttcagaccacatgttggacttagggccaagtaccaggctgtcaatttcttgagccagattcttcttacaaacaagggagatgggcctaaaattgcaaaacggttggtggatgtctacattgcacttttcaaggtactaatgagctctggtgataccaaaggagatacatatagcaaggacagcaagaaaaaggtaggaaaaatagagggaggaaataacaagatggactccagatccaagggaaacaatgaagtgggttcaacagcaggatcagatttggagctggactccagaatcctttctgcgcttttaactggtgtaaatagggcattaccatatgttgcaagctcagaagttgacgatattgtggaagtgcagacacctattcttttcagattggcattgatgcttttgttccaaatatctataaagaataatatagcaagtgatcgtttgtaccgtgcattatactcaaaactcttgagtccttctgctgttacttcctcaaagccagagttatttcttgggctgttggtgaaagcgatgaagaatgatgtaatgttgaagagagttgctgctttctcaaagcggctgctgcaggtggctcttcaacggcctcctcaatatgcttgcggatgccttttcattctgtcagaagtccttaaggcaaagccaccattatgggggattgtgctccagaatgaatctgttgatgatggtgatgaacactttgaagacattttagagattcccgaggactcttctgttgcctcagcagtgctacataaacataatgaaaaagtagctgcacatgagaaacacaaccttgatgctgctgatggaattgatagtgtaaaacaagtaaatttggtagatgagaacaatgcatcaactgactcgtccagacaacatgcattctatgatccacgacacagagagccttcttactgcaatgcagatcgtgtcagttggtgggagttaacagtattggcttcacatgtgcacccttcagtttctactatggctagaacattgctatctggcaacaatattgtttacagtggtgatccgctgacagacctatcacttcctgctttccttgacaaattcatggaaaagaaaccaaaagggaaccgcatagctgaaggaagatggcatggtggatcacaaattgctccggctaaaaagcttaatctgaatcatcatctcatcggagaggagcttctagaattggcagaaaatgaagtgcctcctgaagatattgttttccaccgtttctatttgaacaagaccggcactgttaagcgtaagacaaagcagaaggactcagttcttgatgaagatgcgggggaactcttagctgataatgacgctgatgaggctagtgacgagagtggagatgagatactggatctgggagatgggttggcagatgatggagaatatgactatgacgaccttgactcaaatgcatttgaagaggaaaaagatttacttagagatgacagtgatgtggaatttgatgacgtttcagatgatactgcatctggggatgaagggtcagaaaatgacgatgacattcctattctcgcgggcgattcagatggcaacttaagtgatgacgagatggttgatgctggtaagggcggtgtctcttacacaaagaaaaggagggcagggaagaagagtgggttgtctccatttgcaagcctggatgattatgagcacctaatggttggggatgctgatgcaacaacagcaaagcggaagcacatggcaacagggagagctggtggtgagaagaaaccaaagttgagaccacgaaagaaaaggtcgcggagttcagaatgagaaacatgccttttacccttaactcttttaaaatgttcaccacaatggtgttcattacatttttgtacttctggaaggcacaggattgggtaacgctattgttgagccgagaatgtattgagattagattatacaggtgctctcatatagtagtccttatcccacacaacgcatttatacgggctaagtttaagaccaactcaaagagttgtttttcttattgagtcaaattttagattttctgagtaagaaattattctccaacaggtattctatctagagttgtagattagctagcaaaggcatatcgtcctttccacttgctaagccagtcctaattttcctgtctcagctcacccttcc

SEQ ID NO: 216901 - DNA, 3669 bp, Zea Mays
ctctaacccttgctgttcgctcgctgttcgccccccagccgccaccgccagttcttccattcctccgcgctctttgagccttcgtctcccagtctcctcaactcaggtacgttgtccgcccgccgcacaccctcgccactgttcatcgttgcacgctggtgcttccctcatctccacagaacatctgattcggccagttgagttcctctcggacgctggttgtctccttcgacctccgtttccttgtcatttctgtgcctgacagcaacccgcgctcccgccgcatctattcatggcggagccgacccccaagtcgaagcgcaccaagaaagcgaagaagccctcggcccgggaaggtgatggagaggacatggatacgctcaagtctgacgtcgccacattcgcctcctccctcggcctcctccctggcgctggcgactccaacggcggcttcgatgactccgacttccgcaagtccggccccatgtataaatcctcaaaatttccttccaaacaaccccatcaaaaacctgataacacggcaaacccccatctaaaccctagacctaccaagaagccacaccctctcgagctacgtgactcctatgctgccaccaaacctggtgctgtcaacactaattaccccctgatgaaggcggcagcactctcagggcagtggtacactgatgctgatgagctggaggcgagggtcctaggcggtcgtaagcaggtgcctccagctgtggggcttcaggagatgcagggaatagtggagagaaaacgagagctggcagagaagctcatgttgcagtatgcgagggaatacgatgccgtgaggcgagggcatggtgacctgaagctcctggacatatcagcaaagtctggtacatcagctgacaaggtgtcagcatttacatgtcttgtcgaggacaatccaattgcaaacatgaaggcactcgattccctccttggtatgataacatcaaaagttggtaagaggtatgcgttcacaggattcgatgcaattaaggagttatttctcatgaggttattgcctgaccgtaagctgaaaagtcttatccaacgcccgctagacattttacctgaaacaaaagatgggtactcacttctgctcttctggcattgggaggactgcttaaaacagagatacgaaaggtttgttatggcattggaggatgcggtaaaagatatgctgccaaatcttaaggacaaagcaatgaagttttcatgcttttgaaaagtaagtcagaacaggaacgtcgtttgctcacagctcttgttaacaaacttggtgatcctgaaaggagagcagcatcaagtgctgcatatctgttaacatgtctcttggctgctcaccctaatatgaagatggtggtgatagatgaggtggattcttttctcttcagaccacatgttggacttagggccaagtaccaggctgtcaatttcttgagccagattcttcttacaaacaagggagatgggcctaaaattgcaaaacggttggtggatgtctacattgcacttttcaaggtactaatgagctctggtgataccaaaggagatacatatagcaaggacagcaagaaaaaggtaggaaaaatagagggaggaaataacaagatggactccagatccaagggaaacaatgaagtgggttcaacagcaggatcagatttggagctggactccagaatcctttctgcgcttttaactggtgtaaatagggcattaccatatgttgcaagctcagaagttgacgatattgtggaagtgcagacacctattcttttcagattggttcacgctgaaaatttcaatgttggtgttcaggcattgatgcttttgttccaaatatctataaagaataatatagcaagtgatcgtttgtaccgtgcattatactcaaaactcttgagtccttctgctgttacttcctcaaagccagagttatttcttgggctgttggtgaaagcgatgaagaatgatgtaatgttgaagagagttgctgctttctcaaagcggctgctgcaggtggctcttcaacggcctcctcaatatgcttgcggatgccttttcattctgtcagaagtccttaaggcaaagccaccattatgggggattgtgctccagaatgaatctgttgatgatggtgatgaacactttgaagacattttagagattcccgaggactcttctgttgcctcagcagtgctacataaacataatgaaaaagtagctgcacatgagaaacacaaccttgatgctgctgatggaattgatagtgtaaaacaagtaaatttggtagatgagaacaatgcatcaactgactcgtccagacaacatgcattctatgatccacgacacagagagccttcttactgcaatgcagatcgtgtcagttggtgggagttaacagtattggcttcacatgtgcacccttcagtttctactatggctagaacattgctatctggcaacaatattgtttacagtggtgatccgctgacagacctatcacttcctgctttccttgacaaattcatggaaaagaaaccaaaagggaaccgcatagctgaaggaagatggcatggtggatcacaaattgctccggctaaaaagcttaatctgaatcatcatctcatcggagaggagcttctagaattggcagaaaatgaagtgcctcctgaagatattgttttccaccgtttctatttgaacaagaccggcactgttaagcgtaagacaaagcagaaggactcagttcttgatgaagatgcgggggaactcttagctgataatgacgctgatgaggctagtgacgagagtggagatgagatactggatctgggagatgggttggcagatgatggagaatatgactatgacgaccttgactcaaatgcatttgaagaggaaaaagatttacttagagatgacagtgatgtggaatttgatgacgtttcagatgatactgcatctggggatgaagggtcagaaaatgacgatgacattcctattctcgcgggcgattcagatggcaacttaagtgatgacgagatggttgatgctggtaagggcggtgtctcttacacaaagaaaaggagggcagggaagaagagtgggttgtctccatttgcaagcctggatgattatgagcacctaatggttggggatgctgatgcaacaacagcaaagcggaagcacatggcaacagggagagctggtggtgagaagaaaccaaagttgagaccacgaaagaaaaggtcgcggagttcagaatgagaaacatgccttttacccttaactcttttaaaatgttcaccacaatggtgttcattacatttttgtacttctggaaggcacaggattgggtaacgctattgttgagccgagaatgtattgagattagattatacaggtgctctcatatagtagtccttatcccacacaacgcatttatacgggctaagtttaagaccaactcaaagagttgtttttcttattgagtcaaattttagattttctgagtaagaaattattctccaacaggtattctatctagagttgtagattagctagcaaaggcatatcgtcctttccacttgctaagccagtcctaattttcctgtctcagctcacccttcc

SEQ ID NO: 216902 - DNA, 3517 bp, Zea Mays
agcctctaacccttgctgttcgctcgctgttcgccccccagccgccaccgccagttcttccattcctccgcgctctttgagccttcgtctcccagtctcctcaactcagcaacccgcgctcccgccgcatctattcatggcggagccgacccccaagtcgaagcgcaccaagaaagcgaagaagccctcggcccgggaaggtgatggagaggacatggatacgctcaagtctgacgtcgccacattcgcctcctccctcggcctcctccctggcgctggcgactccaacggcggcttcgatgactccgacttccgcaagtccggccccatgtataaatcctcaaaatttccttccaaacaaccccatcaaaaacctgataacacggcaaacccccatctaaaccctagacctaccaagaagccacaccctctcgagctacgtgactcctatgctgccaccaaacctggtgctgtcaacactaattaccccctgatgaaggcggcagcactctcagggcagtggtacactgatgctgatgagctggaggcgagggtcctaggcggtcgtaagcaggtgcctccagctgtggggcttcaggagatgcagggaatagtggagagaaaacgagagctggcagagaagctcatgttgcagtatgcgagggaatacgatgccgtgaggcgagggcatggtgacctgaagctcctggacatatcagcaaagtctggtacatcagctgacaaggtgtcagcatttacatgtcttgtcgaggacaatccaattgcaaacatgaaggcactcgattccctccttggtatgataacatcaaaagttggtaagaggtatgcgttcacaggattcgatgcaattaaggagttatttctcatgaggttattgcctgaccgtaagctgaaaagtcttatccaacgcccgctagacattttacctgaaacaaaagatgggtactcacttctgctcttctggcattgggaggactgcttaaaacagagatacgaaaggtttgttatggcattggaggatgcggtaaaagatatgctgccaaatcttaaggacaaagcaatgaagacagttttcatgcttttgaaaagtaagtcagaacaggaacgtcgtttgctcacagctcttgttaacaaacttggtgatcctgaaaggagagcagcatcaagtgctgcatatctgttaacatgtctcttggctgctcaccctaatatgaagatggtggtgatagatgaggtggattcttttctcttcagaccacatgttggacttagggccaagtaccaggctgtcaatttcttgagccagattcttcttacaaacaagggagatgggcctaaaattgcaaaacggttggtggatgtctacattgcacttttcaaggtactaatgagctctggtgataccaaaggagatacatatagcaaggacagcaagaaaaaggtaggaaaaatagagggaggaaataacaagatggactccagatccaagggaaacaatgaagtgggttcaacagcaggatcagatttggagctggactccagaatcctttctgcgcttttaactggtgtaaatagggcattaccatatgttgcaagctcagaagttgacgatattgtggaagtgcagacacctattcttttcagattggttcacgctgaaaatttcaatgttggtgttcaggcattgatgcttttgttccaaatatctataaagaataatatagcaagtgatcgtttgtaccgtgcattatactcaaaactcttgagtccttctgctgttacttcctcaaagccagagttatttcttgggctgttggtgaaagcgatgaagaatgatgtaatgttgaagagagttgctgctttctcaaagcggctgctgcaggtggctcttcaacggcctcctcaatatgcttgcggatgccttttcattctgtcagaagtccttaaggcaaagccaccattatgggggattgtgctccagaatgaatctgttgatgatggtgatgaacactttgaagacattttagagattcccgaggactcttctgttgcctcagcagtgctacataaacataatgaaaaagtagctgcacatgagaaacacaaccttgatgctgctgatggaattgatagtgtaaaacaagtaaatttggtagatgagaacaatgcatcaactgactcgtccagacaacatgcattctatgatccacgacacagagagccttcttactgcaatgcagatcgtgtcagttggtgggagttaacagtattggcttcacatgtgcacccttcagtttctactatggctagaacattgctatctggcaacaatattgtttacagtggtgatccgctgacagacctatcacttcctgctttccttgacaaattcatggaaaagaaaccaaaagggaaccgcatagctgaaggaagatggcatggtggatcacaaattgctccggctaaaaagcttaatctgaatcatcatctcatcggagaggagcttctagaattggcagaaaatgaagtgcctcctgaagatattgttttccaccgtttctatttgaacaagaccggcactgttaagcgtaagacaaagcagaaggactcagttcttgatgaagatgcgggggaactcttagctgataatgacgctgatgaggctagtgacgagagtggagatgagatactggatctgggagatgggttggcagatgatggagaatatgactatgacgaccttgactcaaatgcatttgaagaggaaaaagatttacttagagatgacagtgatgtggaatttgatgacgtttcagatgatactgcatctggggatgaagggtcagaaaatgacgatgacattcctattctcgcgggcgattcagatggcaacttaagtgatgacgagatggttgatgctggtaagggcggtgtctcttacacaaagaaaaggagggcagggaagaagagtgggttgtctccatttgcaagcctggatgattatgagcacctaatggttggggatgctgatgcaacaacagcaaagcggaagcacatggcaacagggagagctggtggtgagaagaaaccaaagttgagaccacgaaagaaaaggtcgcggagttcagaatgagaaacatgccttttacccttaactcttttaaaatgttcaccacaatggtgttcattacatttttgtacttctggaaggcacaggattgggtaacgctattgttgagccgagaatgtattgagattagattatacaggtgctctcatatagtagtccttatcccacacaacgcatttatacgggctaagtttaagaccaactcaaagagttgtttttcttattgagtcaaattttagattttctgagtaagaaattattctccaacaggtattctatctagagttgtagattagctagcaaaggcatatcgtcctttccacttgctaagccagtcctaattttcctgtctcagctcacccttcc

SEQ ID NO: 216903 - DNA, 3501 bp, Zea Mays
agcctctaacccttgctgttcgctcgctgttcgccccccagccgccaccgccagttcttccattcctccgcgctctttgagccttcgtctcccagtctcctcaactcagcaacccgcgctcccgccgcatctattcatggcggagccgacccccaagtcgaagcgcaccaagaaagcgaagaagccctcggcccgggaaggtgatggagaggacatggatacgctcaagtctgacgtcgccacattcgcctcctccctcggcctcctccctggcgctggcgactccaacggcggcttcgatgactccgacttccgcaagtccggccccatgtataaatcctcaaaatttccttccaaacaaccccatcaaaaacctgataacacggcaaacccccatctaaaccctagacctaccaagaagccacaccctctcgagctacgtgactcctatgctgccaccaaacctggtgctgtcaacactaattaccccctgatgaaggcggcagcactctcagggcagtggtacactgatgctgatgagctggaggcgagggtcctaggcggtcgtaagcaggtgcctccagctgtggggcttcaggagatgcagggaatagtggagagaaaacgagagctggcagagaagctcatgttgcagtatgcgagggaatacgatgccgtgaggcgagggcatggtgacctgaagctcctggacatatcagcaaagtctggtacatcagctgacaaggtgtcagcatttacatgtcttgtcgaggacaatccaattgcaaacatgaaggcactcgattccctccttggtatgataacatcaaaagttggtaagaggtatgcgttcacaggattcgatgcaattaaggagttatttctcatgaggttattgcctgaccgtaagctgaaaagtcttatccaacgcccgctagacattttacctgaaacaaaagatgggtactcacttctgctcttctggcattgggaggactgcttaaaacagagatacgaaaggtttgttatggcattggaggatgcggtaaaagatatgctgccaaatcttaaggacaaagcaatgaagacagttttcatgcttttgaaaagtaagtcagaacaggaacgtcgtttgctcacagctcttgttaacaaacttggtgatcctgaaaggagagcagcatcaagtgctgcatatctgttaacatgtctcttggctgctcaccctaatatgaagatggtggtgatagatgaggtggattcttttctcttcagaccacatgttggacttagggccaagtaccaggctgtcaatttcttgagccagattcttcttacaaacaagggagatgggcctaaaattgcaaaacggttggtggatgtctacattgcacttttcaaggtactaatgagctctggtgataccaaaggagatacatatagcaaggacagcaagaaaaaggtaggaaaaatagagggaggaaataacaagatggactccagatccaagggaaacaatgaagtgggttcaacagcaggatcagatttggagctggactccagaatcctttctgcgcttttaactggtgtaaatagggcattaccatatgttgcaagctcagaagttgacgatattgtggaagtgcagacacctattcttttcagattggttcacgctgaaaatttcaatgttggtgttcaggcattgatgcttttgttccaaatatctataaagaataatatagcaagtgatcgtttgtaccgtgcattatactcaaaactcttgagtccttctgctgttacttcctcaaagccagagttatttcttgggctgttggtgaaagcgatgaagaatgatgtaatgttgaagagagttgctgctttctcaaagcggctgctgcaggtggctcttcaacggcctcctcaatatgcttgcggatgccttttcattctgtcagaagtccttaaggcaaagccaccattatgaatgaatctgttgatgatggtgatgaacactttgaagacattttagagattcccgaggactcttctgttgcctcagcagtgctacataaacataatgaaaaagtagctgcacatgagaaacacaaccttgatgctgctgatggaattgatagtgtaaaacaagtaaatttggtagatgagaacaatgcatcaactgactcgtccagacaacatgcattctatgatccacgacacagagagccttcttactgcaatgcagatcgtgtcagttggtgggagttaacagtattggcttcacatgtgcacccttcagtttctactatggctagaacattgctatctggcaacaatattgtttacagtggtgatccgctgacagacctatcacttcctgctttccttgacaaattcatggaaaagaaaccaaaagggaaccgcatagctgaaggaagatggcatggtggatcacaaattgctccggctaaaaagcttaatctgaatcatcatctcatcggagaggagcttctagaattggcagaaaatgaagtgcctcctgaagatattgttttccaccgtttctatttgaacaagaccggcactgttaagcgtaagacaaagcagaaggactcagttcttgatgaagatgcgggggaactcttagctgataatgacgctgatgaggctagtgacgagagtggagatgagatactggatctgggagatgggttggcagatgatggagaatatgactatgacgaccttgactcaaatgcatttgaagaggaaaaagatttacttagagatgacagtgatgtggaatttgatgacgtttcagatgatactgcatctggggatgaagggtcagaaaatgacgatgacattcctattctcgcgggcgattcagatggcaacttaagtgatgacgagatggttgatgctggtaagggcggtgtctcttacacaaagaaaaggagggcagggaagaagagtgggttgtctccatttgcaagcctggatgattatgagcacctaatggttggggatgctgatgcaacaacagcaaagcggaagcacatggcaacagggagagctggtggtgagaagaaaccaaagttgagaccacgaaagaaaaggtcgcggagttcagaatgagaaacatgccttttacccttaactcttttaaaatgttcaccacaatggtgttcattacatttttgtacttctggaaggcacaggattgggtaacgctattgttgagccgagaatgtattgagattagattatacaggtgctctcatatagtagtccttatcccacacaacgcatttatacgggctaagtttaagaccaactcaaagagttgtttttcttattgagtcaaattttagattttctgagtaagaaattattctccaacaggtattctatctagagttgtagattagctagcaaaggcatatcgtcctttccacttgctaagccagtcctaattttcctgtctcagctcacccttcc

SEQ ID NO: 216904 - DNA, 1622 bp, Zea Mays
catcgggccattggggtcgggggctcggggcacatatcacccgcttccctctgttgaatcctccttccgcgccgccgccatctcctcctcctctgactccggcggcctcacgccctcctcacgctccgcaacgccgtacctggatgttggtttctacttcgactctccgagggatagagaagagacccagtgccacaaggttcccgtagtctgtaatcggggagctgagaatctaggccataggcttcttgaagccgttgggagacaaaggaggccggacgagcgagcgaacaaccagatggaggcggtggtgcggaaggtgcagcagcgggtgaggaaggcgcgggaggagatggatcagtgggatgacctcaacactcggctcctctcccaattctccaatgctgccgcggtcatctctcgccttcaggcccttggagaggacaagaattatggccccttgcgtgctgtacccaacatcagagtggacctcattgggaaccagatggaggttctggagctcattttcgttaaaattagggagacactggagaagttcaatgacgtcgtgaaagctttaaataaggctctgcgtgataccaagcagatggtgagaggcgggtcggcactcacggcgaaacagatgcagttacaagttggaattttgccatcgattgcagaatgcttggatggatttcaaacattatgtgaaatgcaccatgatgagtttacgctaaaatcatcagctatctccttgctgacttggaagacatgttccagtgacattgctgtactacgccaactcttagtagaccagccaaacattccaaaagatgaaggtgagaccgagtcagtgtggaaactttatgttaacccaattgttgaggcattgtggacgaggcaagtcttcatctctgtcagcaatcggtgattgaagacccagaggccggacctgaccattgtgtgccggtcaccggagtgtgagtggtctgaacttgggatggtaatggctttgcctgtccatcctgcggggtgtggacagtgatagaacttgaacaggcttgacccctcctagcaagggattgtgaattgtgatcaccaatccatggttcagacttgcaccaatcatgtggcttgcgttttttagaaataggtgcaccattgcctcttccaggtggtgcccagaaggtttcgaccaaggtctgtgaaagaagcactttgcaatcagcggtgggttcagatatatcacatgaacgagcagacaaggaaacattctaacttggaaaaagtttctattgggttctattcggcaatggaaaaacggtgtatcatgtaaattaaactatactagttcactttggttttgtaagttaaacttctttaacgctgatcaagacaataccctaaaaaagtggtacatgtatgcactgcacttgtccaatacattatgcaactcaacgcaccaatcacacagaggcctaggactaggaggcctgtgggcaccagagactccagaagctgagaaacgttgacatcactgcatcagcatcacgaggaccaacagcggacggaaaaaaaacaaaaagaaatcacaacggacgggttaatttttgtaatctgtt

SEQ ID NO: 216905 - DNA, 476 bp, Zea Mays
gttcctcgacctcctgttgagatcaggtcaaggggaggtgctcctcccgttgatggaggggccaagggtcacatcaacagtgacaccatctagaggagagggagaggagaagagaagagatcgaagagaagagaagaagctcaccgatggtgcttggacttggacattatctgcagcttagttaccatgtttgaaagaactgaagctgtaaatcgcagtcgtcgttgcttgtgtgtgtgtgtttatagttcctccatggtttaccatcgttttcagcttttctagtatatctggtgcttgctatgtttcataatttcgggctatgttgtttcagtgtacggtatttctgttcattttcttccactattatataatctagcttatggattatataagcaattattgacctgcttatggattactataatctaggtgtctagattatataatccatctaataatctgttttatttatt

SEQ ID NO: 216906 - DNA, 536 bp, Zea Mays
ctcagtacgcagccgctcccactactagattcagctggtgcgacagaggccaagtcatcagtgggatcccagcctgttgagatcaggtcaaggggaggtgctcctcccgttgatggaggggccaagggtcacatcaacagtgacaccatctagaggagagggagaggagaagagaagagatcgaagagaagagaagaagctcaccgatggtgcttggacttggacattatctgcagcttagttaccatgtttgaaagaactgaagctgtaaatcgcagtcgtcgttgcttgtgtgtgtgtgtttatagttcctccatggtttaccatcgttttcagcttttctagtatatctggtgcttgctatgtttcataatttcgggctatgttgtttcagtgtacggtatttctgttcattttcttccactattatataatctagcttatggattatataagcaattattgacctgcttatggattactataatctaggtgtctagattatataatccatctaataatctgttttatttatt

SEQ ID NO: 216907 - DNA, 2211 bp, Zea Mays
atgatgcgctcttatttgctgccgccccctcaatcgtcccaatccatcagtcgtcctctcgcgagccagagccatggagaagagccgagtgctggtggtgggcggcactgggtacatcgggcggcggctcgtgcgggcgagcctggcgcaagggcacccgacgctggtcctgctgcgggcggagatcgacctagacatcgacaagttccagatgttgctctccttcaaggcctagggcgcgtggctggtggaggcgtcactggaggaccacgcgggcctcctcgccgccgtggcacatgccaacgtggtggtctcggccatgtctggggcgcacatccgcagccacaactcaccaaaaggcgacacgggcagggtcagaactttgggtggcgcgtggggttcgacgcaattaagagggcagcaaggcggatggggcagatcaacgacgccgaggaacttgcagatgccctcgcaagggtggccttccaggagcgagtcggtgtaaaaggtgacgttcgccaggtggatttccagaaggacatagttagagcagctgaaggtttggtatctattggaaacaaacatattgaagtggtgtgtgctgctacacctgactgctatagatatggaagcgaaaataatgcaagcgacgaagcccttagaaaagcagcatcactatacggaggtgctttgagaaatattgagaaagagtatgaagatttcaacataattttatcttctcagactatagacccattgagagcaatggctataggtggtcccctggaagatgctcgtggtcttgcacagcgctatagcaggatgagacatgaagctgagatcctctatactgaaattgctagaagaaaggcacgggtaagagaagctccaattgctgagcacactacaaagcttcagcaatcagaagctagaatgatagagcacaaagcaagcatggccgtgttaggaaaggaagcagcagctgcgcttgcagctgtcgagtctcaacaacaacgggtgacccttcagcggctggttggcgcggcggaagcagaaaagttattccatctgagattagctgctatacttgatgacgttgaggcagagatgtcctctgaaaagcaaaggagagaatctgcaccacctatcatatcttcacataagcgtgctgagaaagcccagtacttccttgctgaggtaatgcataatttcaatggaaccacggagaaggaactgagcttaattgttggcgattatgttgttgttcgtcaggtcagtgtgctcttaacactatcagctgtggaagtaatgcagccaagtgcacggggctccccgggtgccggagctcctgataacacaacaccaatggcgggtttcgctggtgacgacacaccgagagctgtatttcctagcatttattcgaataactgtgtagtgagtgacaggaatctttctgcgggtattgtgctcgactctggtgatggtgtgagccacaccgtccctatctacgaagggtacacgcttcctcatgctattcttcgattggcccttgctggtcatgaccttaccgacaacctgatgaagatccttactgagaggggttactccttcactacgactgtcgagcgagaaattgtcagggacatcaaggaaaaacttgcctgtgttgcccttgattacgaacaggagctggagactgccaggaccagctccagtgttgagaagagctacgagctgcccgatggtcaggttatcacaatcagtgcagaaaggtttaggtgccctgaggttctattccagccatccttcattggcatggaatctgatggcatccatgaagccacggacaactccatcatgaagtgtgacgtcgatatcagaaaggatctgtacggtaatgttgtcctcagtggtggttccactatgttctctggtattggtgaccgcatgagcaaggagattactgcacatgcccctagcagcatgaaggtgaaggtggttgctccgccggagaggaagtacagtgtttggattggtggttccattctggcctccctcagtacctttcagcagatgtggatctccaaggaagagtatgacgaatctggtccgggcatcgtccacatgaagtgcttctgaatttcaggagcagtatatttgttgcttgtattttcagttagttgggatgcaagtttgtcccgtggaggggta

SEQ ID NO: 216908 - DNA, 1120 bp, Zea Mays
cgacaaacgagcgtgtggtggggaaaatgaatagagagtgagatagagagggtcggaggggtgggcagtgcgtcacgggatgggcgcaggggcgaggctacgcacgatggcacgagcgagggtgatgttgagcgtgatggcaggagcgagttgcgcgcgagagcgaattggcggagcaggcgaggacgcaagggcgaggacgcgcctacgacctacgcaagagcgagctgtggacagtgctcgtgggctgtccagcgggcggtgcgcgggtgttgtgcagcgagcggtgcacagtggttgtgcgacgacgatagcgaagtctggttggggcactcgagcactcgcggtgccttatttctatttgattttgcgcaggttaccaggtcttcctctatgatcagcgtcttgagaatgtcagcacttccatatcttggacatccctcttagtgtttgttgaaatgtctcttagaaaatgcttctccgaatattgcattacattggcatcattcaaatttcaaaggctttgaaaataaagaagtattggtctgtagactttgatttagtgtaatttcattcgtgggattctcttcgaacaaatatataggaaaatacatctctcaaacattctacaattgttttgtttgtatgtttagagtggaatgctaggataaaaatgtagatcatctgctactgatatgtgcattcgtttgctgaaatgaatgaatgaaaaaacttgttgtgattctccctctcataaataatttttttgtctctactctccgcatgcagtttatatgctccagaaccaggaggctcatgctgcagagggtcccactgaaataacaaatggatactcagatctgcaactttcctatgcggccttcactcgataatgtgatcatttcatgccaatgcaatgcagcaggcagtggcgctgagaggctccgggatctaccaccgccccgggatctaccaccgccctgagcagtcatcacattcttgtcaagatctggcttggcctttctctttgcttctgcaattacgccatccttgggaacaacagacaaaagcgttgggtttattaccttcgagaaaggtaacatggcatttaaccctacag

SEQ ID NO: 216909 - DNA, 125 bp, Zea Mays
aacgtcctgatctaagcatgcgtcagtaggtgtacattcctggaaccaagatggttttccctgggctgaagaagccgcaggagcgtgctgatctcatcgcgtacctgaaggaagcaactgcatag

SEQ ID NO: 216910 - DNA, 1530 bp, Zea Mays
cgtgacctcactagtcagcccacgcctcgtggatcttactcttgcgtcgaccgaccccgagaaccttgccgccagtgagatcccagctggccaaacacagccaacctcctaaccgacctctggcagccataaaaggttgcgccgaagccctgccttcccttttccttcgccgcacaccaatagccattgcccaaatctgcgagggagagattgaagacgccgccgtgtgagagcaaggcgtctaagcgagtctcccgggttcaccgacaaattcatttcgttgaagcatcgcagtgtgccctgtggatccgtaaaagccagctcggggaccttctgaggccggtgtcaccccgctcgcggcatattgctcatcagagcaaatctacgctgtgaacctgccgcaccgagattcagctcggccttatcacaacctcaactctgacgagcaagtgaccgaggagcccggagcacagcaggttgaagatactaaacaggagctcgctgaaggtgaagagcaggtgccaccggaggaggactactacgacaagttcgatgaggtctaggtgtcgtctcccagtcagcatgatggcgccaagggatgataatattattattttgctttatttattatcagttattttttaagacatttttgttatgtaataaagttggtgacatttgtctctatacactgagtcattatatgtgttgatcttaaatctgggtttgccccttaaatctgggtgtgacagtgcgcgatggcggtggaccccgggatgcgtgcgacggcggcaccatgcgtggcggcgacgacaattccttgatccagaggcacgacggtggtagctctccgatccgaaggcatggcgataccggctctccgatctggtggtgcagcgactgtggctcgcagatccggtggcgcgatgtcggttcctcgacccggaggcacaacgacagcggctccctaatccgaaggcacgacaccggtggcttcccggaggtggctccccagaggcgtgtgcggggttcaccatccgcaccacgggccccgtgacatcctccaatcctgcgcatttcgagtatcctccggcgacagtctcctccaacccgacgactttggggtatcctccagcgatggagctcatcagatccatgtttatgcctccatggttgctttttatgccaaccactgcagtactttagatattccattagatgattttatgatgatgaatatggcgtctctaacttgtatttttatgttaatagcatttacactatatttgccattattttacgctcaaacttgatgattttttcgatcataaattcaacacatttgagttattaactgctctcacgttggttcgatatttacaataaaaatgaggattttacactaaaagttataggattttatgcaaatctggggtgcgccaccaatgtcccgcatgcatatcttctgtgtgcgcagtgaaaaggaaactccttaatttatggtgtatgtacctaccataaaaaatcaaa

SEQ ID NO: 216911 - DNA, 1986 bp, Zea Mays
tcgcgctgcgcgcacaagtggactgactactgagcaagcaaccaagttccaaccatacatcgcgcgcgcgcgcggccgaatgcagtcgacggcggccatgcggagcggcggcggcggcaataagcgcagcctgctgctgctgctgtcggcgtggtggctactcctcggcagcctcgtcgcccagctcccggcggcccgcggcggcagcggccacgtcgtcacgcgcatgcccgggttcgacgggcccctcccgttccacctcgagacagggtacgtggaggtggacgagcagctcggcgtgcagctcttctactacttcgtgcggtcggagaaggacgaccccggcgaggacccgctgctgctgtggctgtccggcggccctggctgctccggcctctccggcctcgcctacgagatagggcccttccattttgatgctcgagggtacaggggcgggtttcctacccttctctaccgacccgagacgtggaccaaggtgagcaacatcatatttatggattctccggtggggactgggttctcgtacgccacgtcggatgaggggctcaagtccagtgacactcaggctgtcaggcagctagccatttttctcagaaagtggcttgaagagcatcccgagttcctgccgaacccgctctacatcggtggagattcatacggcggcatgattgttcctgctcttgcactacaaatacacacaagtacagaactcggtgaaaacccatccttcaacctcaagggctacgttactggcaacccggtgacggatagccagttcgacacggacggcgtggttccgttccttcacggcatgggactgataccatacgagttttatgagaacgctcgcgagatgtgtggtggaaagtacagtgatgcagccagtgttgcgtgcgcggaggtcacccgagctatagccaacatcacgtcggctgtcaaccgggaacacgtcctggagcctgcttgcccggacgacgacgacgacgagctgttcggccccaaaactaccatggcggagacagatggcggcacgagtcgtaggctgatgctgcagtcggcagactatttcctgccagctgggttcaaatgtagaagagcttcgtacgtcctatcccgcgtctgggcaaacgacgaaacggttcaggagagcctcggtgtccgcaaggggacaatcggagcgtggaaacgatgcaaccaggacatactttacaaccagaacgtccaaagtgtagtgccgtaccattcgaggctagccgcgaaagggtacagggcgctgatatacagcggcgatcacgatcgtatcgtacccttcgttggcacacaagcatggattaggtatctcaacttgaccgttgtagatgactggcgaccatggtatgttggtggccaagttgccggattcacaaggaactcaggcaacctaatatatgcaactgtgaagggcgctgggcatactgcaccggagtacaagcccacggagtgccaaacgatgtttaggaaatgggtttcacgggatcctctctgatattacgtcgtctgagagaattacgtacgtgtcgctcctatgagtgtaggccggacgtacgtggtatgccctactgcaggccggagatcaaaataaaggagattttccattttcatgtagaaaaaatgagtgtccatggtgtctacttgttccctgtattaaaaataaatgcaatttttatactgcatgtagccactctgtcggagaagaaatctccccggccaggtggcggattgcacccgccctagatcctaaaaagaggaggggtctaaacgttttgtttgttacgagactggtggatcagcacacgggagcatgcaagggtttagagtggttcgagccgccggagcgtaataccctactccactgtgtgatgtattgctttgggagcttgtatgaacttgtgagtgtgtgcctaagattgtctgtcttataacgcc

SEQ ID NO: 216912 - DNA, 2165 bp, Zea Mays
ggcggccatgcggagcggcggcggcggcaataagcgcagcctgctgctgctgctgtcggcgtggtggctactcctcggcagcctcgtcgcccagctcccggcggcccgcggcggcagcggccacgtcgtcacgcgcatgcccgggttcgacgggcccctcccgttccacctcgagacagggtacgtggaggtggacgagcagctcggcgtgcagctcttctactacttcgtgcggtcggagaaggacgaccccggcgaggacccgctgctgctgtggctgtccggcggccctggctgctccggcctctccggcctcgcctacgagatagggcccttccattttgatgctcgagggtacaggggcgggtttcctacccttctctaccgacccgagacgtggaccaaggtgagcaacatcatatttatggattctccggtggggactgggttctcgtacgccacgtcggatgaggggctcaagtccagtgacactcaggctgtcaggcagctagccatttttctcagaaagtggcttgaagagcatcccgagttcctgccgaacccgctctacatcggtggagattcatacggcggcatgattgttcctgctcttgcactacaaatacacacaagtacagaactcggtgaaaacccatccttcaacctcaagggctacgttactggcaacccggtgacggatagccagttcgacacggacggcgtggttccgttccttcacggcatgggactgataccatacgagttttatgagaacgctcgcgagatgtgtggtggaaagtacagtgatgcagccagtgttgcgtgcgcggaggtcacccgagctatagccaacatcacgtcggctgtcaaccgggaacacgtcctggagcctgcttgcccggacgacgacgacgacgagctgttcggccccaaaactaccatggcggagacagatggcggcacgagtcgtaggctgatgctgcagtcggcagactatttcctgccagctgggttcaaatgtagaagagcttcgtacgtcctatcccgcgtctgggcaaacgacgaaacggttcaggagagcctcggtgtccgcaaggtatagcagtcctacgtgctcgatcgtgcatgcacgcacagttttttttttctctctctctttttcttgaggaaacaaaagccaagattttcagtaaatttggtatcgaacacacactgaacatccctgcaacttttgttgttaagaggttgtttgtttaggactataatctgtctagattatataatccaacaaataatgtgttatttgctggattatataatctggacagattatattctcaaacaaacacccgctaattcttccaggggacaatcggagcgtggaaacgatgcaaccaggacatactttacaaccagaacgtccaaagtgtagtgccgtaccattcgaggctagccgcgaaagggtacagggcgctgatatacagcggcgatcacgatcgtatcgtacccttcgttggcacacaagcatggattaggtatctcaacttgaccgttgtagatgactggcgaccatggtatgttggtggccaagttgccggattcacaaggaactcaggcaacctaatatatgcaactgtgaagggcgctgggcatactgcaccggagtacaagcccacggagtgccaaacgatgtttaggaaatgggtttcacgggatcctctctgatattacgtcgtctgagagaattacgtacgtgtcgctcctatgagtgtaggccggacgtacgtggtatgccctactgcaggccggagatcaaaataaaggagattttccattttcatgtagaaaaaatgagtgtccatggtgtctacttgttccctgtattaaaaataaatgcaatttttatactgcatgtagccactctgtcggagaagaaatctccccggccaggtggcggattgcacccgccctagatcctaaaaagaggaggggtctaaacgttttgtttgttacgagactggtggatcagcacacgggagcatgcaagggtttagagtggttcgagccgccggagcgtaataccctactccactgtgtgatgtattgctttgggagcttgtatgaacttgtgagtgtgtgcctaagattgtctgtcttataacgcc

SEQ ID NO: 216913 - DNA, 1871 bp, Zea Mays
gattgatctcaacgattatagtttctacatgcataaaaaggtgcaccaacatagaaagttgtatcagcttggactagtaacaggcaccagtaaatcccctgaagaatacaagataaatgatgtatcaacagatattcttttatgtatttccagcatacctgacatcaaaatttcaagtttgtcagatgaagaatacgaagaggtatgatttactgtgactttgtgtgttccagcagctatagatgggcaggctgtgttagggaacagaggtatacctacacttttttgggaaaaaatgtttattttttatgaaaagtaaatatatatcctatcaaactgcattttttgttattctcattcagaataatagtttcctccatgtatcacttaatattttcccttgcattcataatgttgagcaaaacattctattgtttattataataggaagaatgtcaagaccttcggctgctggccaagaatgaatcctttaaaaggcctactgttggggatctagaggagaaagcaagaagtttacgtagggagatagtgaatcattggatcagtaaagaactccagaggctagaaagattaattgacagggcgagtgagaaagtttgaataccttgataagaaacaactcttgcgcaagccatctgaacaacaacgtttacttgaagaggtgcctcaagttattccagagacagaagataataaagatactgaatttcaagttacaggacaagacaaacctattcaaaagagtactgtcgctttacaaggtaccaatggagagagcattgtttctttgaaaaaaggctcagaagaaaaatgtacatatgtgacaagggcttcttttttgaagagccacacagggaaaaaatccaaaggtactgatggggagagagatctttccttggaaagtttatcggaagaaaaacctgaagttaataaggcccacaccgatggtggtacagctgtaatacacaatcaaaatcggagcactacagctgctattgctgcgctaccaaagtatttgcatcgccatgctgccactgaagccaataatgctggtgatatttcatctgttcaggagctggatggtgttaaagctagcacggatgttgatacaactggaacagatgtccagcacgggagcattgaagctactaaagccaacgctgctggtgatgcacctggagcattttttcaaaagcagtgtgctaaagctgctgatgttattaccattgacgacgatgacgaggacaacagtcatcgttgttataaagaagaacaaacagcagtagttgatcttgaagctgattatgctggggataaccatcccgtgcagcttgaggcaaatagtcgaggccataaacacgtgaaggtgaaggagcgcatttggtattacattgatcctcagggtgatgagcaagggccatttacaatgcagcatctgagcatctggtggagcaatggcttcttccccggcgacttcagggtctggagaacaggccaaactagtaatgacgccatcttgctcgtggacgcactgcagatgactaggtaggctagttaggagcctcgtagaagactagatgtatttatgtatcgcggaaaaagcgggggggcttcgaggcagatatatgtgttctgctggggtgtacatccttctgtgttatatgatatgatgatgacatcctatccccaccatcacctcacccaccaatcaaaaacatcttgccaaacaaaacaatggttgtttgatggcaaagaggatttgttgggatgaaatatttgtggactattcagtatccctgtgctgtgacaatgctactgaaaatctggttctttggcatgttaggctgttt

SEQ ID NO: 216914 - DNA, 4124 bp, Zea Mays
gacacctgccacgattcacactcacacacaggtccactgcaggctgcagtgctgcacaccgccgcctggaacgaagcccctcttcggaatccacctacacgccccgtcggcggtccctcgcccgcatcgctagttcggcacacggagtttataaacccctctgcagtctgcacgaataatccccaacccggctctcggctcctctagtccttttctcgcattgcatttactgcggcatctttgcgtcggattcggttcccctcgattcctctcccgttgattgcctcgccgggtccggggtcaccggccggcgggggttgattgggtcggcggttatggggaaaggggcgaggaggcgcagccgtgcgtctggcgccggcgggggtggacacgggagcaagcgcccgcggcgggccgaggaggaggaacaggaggaagaggaaatggaaccgctggtgggggaggaggaggaggtggcggcgctggagggggaggactattgcttcgtctgcaaggacggcggtgacctccgcgtctgcgatttcaggggctgccagaaagcttaccatcctgcttgcgtggggaaagatagcggcttcctcaattcagatgaagaattcatctgtgaatggcatacttgctttatttgtaaagggcgttcacgttattattgcttttgctgtccgtggcaagccttttgtcaaaattgcgtgaaacaagcagaattcgtcccagtcttgaggaagacaaagggattctgcaccaactgtttaaggatggcaatcatgattgagaagaatgttgatgttgactccgatggggagagggttgatttcaatgacagggcaacttatgaatttttattcaaggagtattgggaggagatagttaaaggcaaggagagcatgactctggataagcttgaaaaagcatatgcttttctgaaagaaaaactaaactgcaaacaagatctagatttagaaaaggttcatgatgaagaacacagttcagatgatgattttgtgggcaatagtgatgacgacgatgacaacaagccatcttccacaaccaaatttaatggaacatcgaatacaatgaaattcttcctgagggaagataggccaatgaagaatggctatgtgggctggggttcaaaagagctcatggagttcctttcctctataggcaaagatacattgaattccctagatcaacatggtgctactgaagttgtgaaggtgtacattcaacaaaaaggtctcttagcaagagataagaaaaaacttgtcatatgtgatgacaagctcaagattttgtttaggagatcaaaagtgaggtacaacaggatatatagcttgttaggtaagcatattgctgtgaatatgacatcagaggatgaaacttttgctaactctgatgataacaatgaaacatttgtgagaaagaaagctcgtattgggaactacagttccagtactccaaagtgtactccagaaataaacaagagatgttttgctgctcttgttcgccataacattgatttaatctacttgaagaaatctttggttgtggatctactaagggagccggatacatttggcagcaaagttattggctgttttgtgagaataaagattgatctcaacgattatagtttctacatgcataaaaaggtgcaccaacatagaaagttgtatcagcttggactagtaacaggcaccagtaaatcccctgaagaatacaagataaatgatgtatcaacagatattcttttatgtatttccagcatacctgacatcaaaatttcaagtttgtcagatgaagaatacgaagaggaagaatgtcaagaccttcggctgctggccaagaatgaatcctttaaaaggcctactgttggggatctagaggagaaagcaagaagtttacgtagggagatagtgaatcattggatcagtaaagaactccagaggctagaaagattaattgacagggcgagtgagaaaggttggcgcaaggaatatccttgctatacgagctcttttaatcatgtactgatgtttcttaatgtggaatgagttaaatacaccagaggtccgctagcttttgtcctcgtttcacataggttcaccaactctgcaagttgattttcaggcccataaactttgtaagtgatgcaccgtgggttcatacctcttcgtttatgttttttggttgatgcggcatgtacaacttagcactgaggtgcgttgacaagagttttaccagcagaacagttaatatatttgcagttagcttacaagggacatatattgtaagtccaccctcctagccttctctctctctccactatttccccatttgacgaaaagcaggagagaaagccacacaactcaattcgattgagcgagttgcatagtgtgcgatgggaagggggccatgatggagccgatacggccatagctagtttcctcccagcttccggactccggaggtgctggactcgccaccatggatggcgcgttatacatgccgcgttggctgaaaagcataaacgaagtggtacgaacctacggtgcatcactaaaaaaattttatggacccgagaatcgacttttagaattgatggacctaaatgaaactatggcaaaagttaatggacctctgatgcatttaactcatgcggaatctatcttgctttcatgtttatgactgttgatcgtgactcacatgtcacaagtgaattttctgctgtgtactgttgtatccttaactggttgcattttacaaagtttgaataccttgataagaaacaactcttgcgcaagccatctgaacaacaacgtttacttgaagaggtgcctcaagttattccagagacagaagataataaagatactgaatttcaagttacaggacaagacaaacctattcaaaagagtactgtcgctttacaaggtaccaatggagagagcattgtttctttgaaaaaaggctcagaagaaaaatgtaaacatttgcttctatagtatgtgttaaaaaaaaatccatgcaaggcgaacattgtgatgtttttattgtaggtacatatgtgacaagggcttcttttttgaagagccacacagggaaaaaatccaaaggtactgatggggagagagatctttccttggaaagtttatcggaagaaaaacctgaagttaataaggcccacaccgatggtggtacagctgtaatacacaatcaaaatcggagcactacagctgctattgctgcgctaccaaagtatttgcatcgccatgctgccactgaagccaataatgctggtgatatttcatctgttcaggagctggatggtgaaggtgttaaagctagcacggatgttgatacaactggaacagatgtccagcacgggagcattgaagctactaaagccaacgctgctggtgatgcacctggagcattttttcaaaagcagtgtgctaaagctgctgatgttattaccattgacgacgatgacgaggacaacagtcatcgttgttataaagaagaacaaacagcagtagttgatcttgaagctgattatgctggggataaccatcccgtgcagcttgaggcaaatagtcgaggccataaacacgtgaaggtgaaggagcgcatttggtattacattgatcctcagggtgatgagcaagggccatttacaatgcagcatctgagcatctggtggagcaatggcttcttccccggcgacttcagggtctggagaacaggccaaactagtaatgacgccatcttgctcgtggacgcactgcagatgactaggtaggctagttaggagcctcgtagaagactagatgtatttatgtatcgcggaaaaagcgggggggcttcgaggcagatatatgtgttctgctggggtgtacatccttctgtgttatatgatatgatgatgacatcctatccccaccatcacctcacccaccaatcaaaaacatcttgccaaacaaaacaatggttgtttgatggcaaagaggatttgttgggatgaaatatttgtggactattcagtatccctgtgctgtgacaatgctactgaaaatctggttctttggcatgttaggctgttt

SEQ ID NO: 216915 - DNA, 3845 bp, Zea Mays
caactactaaacccttgcggcagcgccccaaggcgcgccgccaccagagccccgagccacgacgcctccaaatcgatagggttttcgctgccccgctagcccgccgcctcctcctccgccagcgcgcccggtcgcagtaaaaggaggccaccaggcggcgaccagaataagcttcaggcgggaggaatggcgcagtcgctggagctgctgctgatccagtttttgatgccggataacgacgcacgtcggcaggcggaggagcagatccggcggctggcccgtgacccgcaggtggtccccgcgctcgtccaccatctccgtacggccaagacccccaacgtccgccagctcgccgcggtgctactccgcaagaagatcacctcccactggcccaagcttcccgcggactccaaggcatcgcttaaacaagccctcatcgattcaatcacactcgaccacagtcatcctgtaaggcgagctagtgcaaatgtcgtcagcattatagctaagtatgctatccctgcaggagagtggccagagctgttacctttccttttccaatgcagccaaagtccacaagaagatcatagagaagtggctttgattcttttcagctcccttactgaaactattggagctacttttcagtctcatctgaacaatttgcaacctattttactgaaatgtctgcaagacgaaactagctctcgagtcagaattgcagccctaaaggctgttggatcattcatagaatatgtcaatgatggaggtgacattgtaaaaatgtttcgggattttgttcccagtatcttgaatatatcaagacagtgtcttgctaatggagaagaagatgttgcttccattgcgtttgaaatttttgacgaactaattgaatctcctgcaccacttcttggagactctgtgaggtcaattgtgcaattctcgctggaagtttctgcaaaccaggatttggaaataaatataaggcaacaggctatccagataatttcatggctggtaaaatttaaagcatctttcttgaaaaagcacaagctggttgtacctatcctgcaagttatgtgcccattgcttacggaaacagctaatgaagatgaagattctgatctagcagcagatcgttctgctgccgaggtcattgatacaatggctatcaacttaccaaggcacgttcttgcaccagttcttgagtttgcttctctgagctttcatcacattaatccaaagtatcgtgaggctgctgtgacgtcacttggtgttatctccgagggttgttgtgaacatttgaaagataagttggaggattgtctgaaaattgttttggaagctttaaaagaccaagaacaaatggttagaggtgctgcatcttttgcacttggtcagtttgctgaacacttgcaaccagaaattttatctcattatgcgagtgtacttccatgcattctaaatgctcttgaagacccatcagatgaagttaaggagaagtcatattatgctcttgcagcattctgtgaggacatgggtgaagatatcctaccgtatctagagcccttgatatgcagattggttatgtctttgcagagcagtcctcggaacttgcaggagacatgcatgtctgcaattggttcagtggctgctgctgcggagcaggcttttaccccatatgccgaaaaagtccttgagatgatgaaaggttttatggtgctaattaatgacgaagatctgtgtgcacgtgctagggctactgaagttgttgggatagtagcaatggcagttggcagagcaagaattgaagcaatattgcctccttttattgaggcttctatttctggttttggattggattacagtgaactcagagagtacactcatggtttctttagtaacgttgctgaaattttgggtgatagttttacacagtatcttcctcatgttgtccctctcgtattttcttcctgcaacttggatgatggttctgctgtggacattgatgatgccgatagcattgaaaatggatttggcggtgtttcatctgatgacgatgttaatgatgaaccaagagttagaaatatcagtgtgaggactggagtattagatgagaaagctgctgcaacacaggctattggttttttcgcactacacacgaagagtgcctatgctccgtatcctttagggcgtctccagcagttcatccatatggaaaacaatagaagtgctactccaacaatattttgcataaaatccagaatgatattctaactgcagttagggcaatacctcctgcacatgctgatgtactagagaaacagaaggatgtccttgatactgttctgaacatctacatcaagactatgacagaggatgacgataaagagacatgctgaggcttgctgaggtaacactggtccttttacgccaagaatcaagctgtcagcaagtagagtcagatggtgaggatgatggcgacattgaccatgatgaagtcctcatggatgcagtttcagatcttttgcctgcttttgcaaaagtgatgggatcttattttgatcccatatttgcaaaattatttgatccgttgatgaaatttgctaaatctccccatcctccccaagataagactatggttgttgcaaccttagctgaggttgctcaggaaatgggtgctccaatatctgcttatgttgataagataatgcctttggtgttgaaagagcttgcatcatctgatgctactaataggagaaatgctgctttctgtgctggcgagatatgcaagaatgggggtgctgcagcactgaaatactatggtgatatacttcgttctctgcataatttgtttagtaactcagaatcagatgatgcagtaagagataacgctgctggtgctattgctaggatgataatggtgcagcctcagtcgattcctctcaaccaggttcttccagtttttatcaaagctttgccactaaaagaagatcatgaagaatcaatgactgtctatggttgcgtctgcggtttattattatcatcacatccccagatcctccctctggtgcctgacgtcatacatgtctttgcccaagtggtggtatccccagatgagagcgatgaagtgaaaacaaatattggcaaggctatttctcacttgatatctgtctatggccagcaaatgcagccaatactgagtgcccttccaccagcccatgcaaacgcgctggcttcatttgcgagtagaagatgaccttggaggaccagcttttctttggttccttgttctgcttgattttgttttggttttgtcgacgattgccattttctgaggatctggtcacatggatcaggccagatgggagtgcttgcattgcacattggcaagggcgagcggagttgtcaggttggcgcatgattgattatatggtgagcttggtttctctttgagatacatagttgtgcttgctttggagccctgtacggttatgagtgcctgcctgtattcaggttccggatttggttatttatgctcttgttttttatatttttttgcctgtatttgcaattcattgattgctgttgtatatagaagagagttttaaatagagagaatgtacgactctgcaactggcaaattttgtatacatactgctcataccacttgctaatgttcgtccggattgcgtaccttgtgcccaagttggaaaaaaggcgctccttgtgccgccaataggaaatcatggaagcggggaaagaaagcaaaagtacagataccactggaaagctaaaataattacaggaatgatccagtacaatgtgagcagcgtggccatgcg

SEQ ID NO: 216916 - DNA, 4268 bp, Zea Mays
gacagccattgccaactactaaacccttgcggcagcgccccaaggcgcgccgccaccagagccccgagccacgacgcctccaaatcgatagggttttcgctgccccgctagcccgccgcctcctcctccgccagcgcgcccggtcgcagtaaaaggaggccaccaggcggcgaccagaataagcttcaggcgggaggaatggcgcagtcgctggagctgctgctgatccagtttttgatgccggataacgacgcacgtcggcaggcggaggagcagatccggcggctggcccgtgacccgcaggtggtccccgcgctcgtccaccatctccgtacggccaagacccccaacgtccgccagctcgccgcggtgctactccgcaagaagatcacctcccactggcccaagcttcccgcggactccaaggcatcgcttaaacaagccctcatcgattcaatcacactcgaccacagtcatcctgtaaggcgagctagtgcaaatgtcgtcagcattatagctaagtatgctatccctgcaggagagtggccagagctgttacctttccttttccaatgcagccaaagtccacaagaagatcatagagaagtggctttgattcttttcagctcccttactgaaactattggagctacttttcagtctcatctgaacaatttgcaacctattttactgaaatgtctgcaagacgaaactagctctcgagtcagaattgcagccctaaaggctgttggatcattcatagaatatgtcaatgatggaggtgacattgtaaaaatgtttcgggattttgttcccagtatcttgaatatatcaagacagtgtcttgctaatggagaagaagatgttgcttccattgcgtttgaaatttttgacgaactaattgaatctcctgcaccacttcttggagactctgtgaggtcaattgtgcaattctcgctggaagtttctgcaaaccaggatttggaaataaatataaggcaacaggctatccagataatttcatggctggtaaaatttaaagcatctttcttgaaaaagcacaagctggttgtacctatcctgcaagttatgtgcccattgcttacggaaacagctaatgaagatgaagattctgatctagcagcagatcgttctgctgccgaggtcattgatacaatggctatcaacttaccaaggcacgttcttgcaccagttcttgagtttgcttctctgagctttcatcacattaatccaaagtatcgtgaggctgctgtgacgtcacttggtgttatctccgagggttgttgtgaacatttgaaagataagttggaggattgtctgaaaattgttttggaagctttaaaagaccaagaacaaatggttagaggtgctgcatcttttgcacttggtcagtttgctgaacacttgcaaccagaaattttatctcattatgcgagtgtacttccatgcattctaaatgctcttgaagacccatcagatgaagttaaggagaagtcatattatgctcttgcagcattctgtgaggacatgggtgaagatatcctaccgtatctagagcccttgatatgcagattggttatgtctttgcagagcagtcctcggaacttgcaggagacatgcatgtctgcaattggttcagtggctgctgctgcggagcaggcttttaccccatatgccgaaaaagtccttgagatgatgaaaggttttatggtgctaattaatgacgaagatctgtgtgcacgtgctagggctactgaagttgttgggatagtagcaatggcagttggcagagcaagaattgaagcaatattgcctccttttattgaggcttctatttctggttttggattggattacagtgaactcagagagtacactcatggtttctttagtaacgttgctgaaattttgggtgatagttttacacagtatcttcctcatgttgtccctctcgtattttcttcctgcaacttggatgatggttctgctgtggacattgatgatgccgatagcattgaaaatggatttggcggtgtttcatctgatgacgatgttaatgatgaaccaagagttagaaatatcagtgtgaggactggagtattagatgagaaagctgctgcaacacaggctattggttttttcgcactacacacgaagagtgcctatgctccgtatcctttagggcgtctccagcagttcatccatatggtcatcgaaaacactgttttgcactgttcgtagagtaaagtttaaatatgaggatgagtaagctgctggagagtttaagaaatgctaagctgctctagtcacagtttcacctttccaaatttccttgactgacactaggtatctggaggagtcactgaagattttgatccggcacagtggttatttccatgaagatgtcaggctgcaggcagtcatatctttgaaacgaaaacaatagaagtgctactccaacaatattttgcataaaatccagaatggatgtactagagaaacagaaggatgtccttgatactgttctgaacatctacatcaagactatgacagaggatgacgataaagaggtagttgcacaagcttgcatgagtgtagcagacattgtgaaggactgtggttttgctgcaattgagccttacatgctgaggcttgctgaggtaacactggtccttttacgccaagaatcaagctgtcagcaagtagagtcagatggtgaggatgatggcgacattgaccatgatgaagtcctcatggatgcagtttcagatcttttgcctgcttttgcaaaagtgatgggatcttattttgatcccatatttgcaaaattatttgatccgttgatgaaatttgctgtatgttaccctcttaccctatctctttgcacatattccatagtcctgtttgctcgacacctattggttaattaattcaataaaagttctatattttttaaacacatggttgtcttgtgttttgcttttgaaactacttcctggaataaatgcagaaatctccccatcctccccaagataagactatggttgttgcaaccttagctgaggttgctcaggaaatgggtgctccaatatctgcttatgttgataagataatgcctttggtgttgaaagagcttgcatcatctgatgctactaataggagaaatgctgctttctgtgctggcgagatatgcaagaatgggggtgctgcagcactgaaatactatggtgatatacttcgttctctgcataatttgtttagtaactcagaatcagatgatgcagtaagagataacgctgctggtgctattgctaggatgataatggtgcagcctcagtcgattcctctcaaccaggttcttccagtttttatcaaagctttgccactaaaagaagatcatgaagaatcaatgactgtctatggttgcgtctgcggtttattattatcatcacatccccagatcctccctctggtgcctgacgtcatacatgtctttgcccaagtggtggtatccccagatgagagcgatgaagtgaaaacaaatattggcaaggctatttctcacttgatatctgtctatggccagcaaatgcagccaatactgagtgcccttccaccagcccatgcaaacgcgctggcttcatttgcgagtagaagatgaccttggaggaccagcttttctttggttccttgttctgcttgattttgttttggttttgtcgacgattgccattttctgaggatctggtcacatggatcaggccagatgggagtgcttgcattgcacattggcaagggcgagcggagttgtcaggttggcgcatgattgattatatggtgagcttggtttctctttgagatacatagttgtgcttgctttggagccctgtacggttatgagtgcctgcctgtattcaggttccggatttggttatttatgctcttgttttttatatttttttgcctgtatttgcaattcattgattgctgttgtatatagaagagagttttaaatagagagaatgtacgactctgcaactggcaaattttgtatacatactgctcataccacttgctaatgttcgtccggattgcgtaccttgtgcccaagttggaaaaaaggcgctccttgtgccgccaataggaaatcatggaagcggggaaagaaagcaaaagtacagataccactggaaagctaaaataattacaggaatgatccagtacaatgtgagcagcgtggccatgcg

SEQ ID NO: 216917 - DNA, 3942 bp, Zea Mays
aaacaaacaagaaaagacagccattgccaactactaaacccttgcggcagcgccccaaggcgcgccgccaccagagccccgagccacgacgcctccaaatcgatagggttttcgctgccccgctagcccgccgcctcctcctccgccagcgcgcccggtcgcagtaaaaggaggccaccaggcggcgaccagaataagcttcaggcgggaggaatggcgcagtcgctggagctgctgctgatccagtttttgatgccggataacgacgcacgtcggcaggcggaggagcagatccggcggctggcccgtgacccgcaggtggtccccgcgctcgtccaccatctccgtacggccaagacccccaacgtccgccagctcgccgcggtgctactccgcaagaagatcacctcccactggcccaagcttcccgcggactccaaggcatcgcttaaacaagccctcatcgattcaatcacactcgaccacagtcatcctgtaaggcgagctagtgcaaatgtcgtcagcattatagctaagtatgctatccctgcaggagagtggccagagctgttacctttccttttccaatgcagccaaagtccacaagaagatcatagagaagtggctttgattcttttcagctcccttactgaaactattggagctacttttcagtctcatctgaacaatttgcaacctattttactgaaatgtctgcaagacgaaactagctctcgagtcagaattgcagccctaaaggctgttggatcattcatagaatatgtcaatgatggaggtgacattgtaaaaatgtttcgggattttgttcccagtatcttgaatatatcaagacagtgtcttgctaatggagaagaagatgttgcttccattgcgtttgaaatttttgacgaactaattgaatctcctgcaccacttcttggagactctgtgaggtcaattgtgcaattctcgctggaagtttctgcaaaccaggatttggaaataaatataaggcaacaggctatccagataatttcatggctggtaaaatttaaagcatctttcttgaaaaagcacaagctggttgtacctatcctgcaagttatgtgcccattgcttacggaaacagctaatgaagatgaagattctgatctagcagcagatcgttctgctgccgaggtcattgatacaatggctatcaacttaccaaggcacgttcttgcaccagttcttgagtttgcttctctgagctttcatcacattaatccaaagtatcgtgaggctgctgtgacgtcacttggtgttatctccgagggttgttgtgaacatttgaaagataagttggaggattgtctgaaaattgttttggaagctttaaaagaccaagaacaaatggttagaggtgctgcatcttttgcacttggtcagtttgctgaacacttgcaaccagaaattttatctcattatgcgagtgtacttccatgcattctaaatgctcttgaagacccatcagatgaagttaaggagaagtcatattatgctcttgcagcattctgtgaggacatgggtgaagatatcctaccgtatctagagcccttgatatgcagattggttatgtctttgcagagcagtcctcggaacttgcaggagacatgcatgtctgcaattggttcagtggctgctgctgcggagcaggcttttaccccatatgccgaaaaagtccttgagatgatgaaaggttttatggtgctaattaatgacgaagatctgtgtgcacgtgctagggctactgaagttgttgggatagtagcaatggcagttggcagagcaagaattgaagcaatattgcctccttttattgaggcttctatttctggttttggattggattacagtgaactcagagagtacactcatggtttctttagtaacgttgctgaaattttgggtgatagttttacacagtatcttcctcatgttgtccctctcgtattttcttcctgcaacttggatgatggttctgctgtggacattgatgatgccgatagcattgaaaatggatttggcggtgtttcatctgatgacgatgttaatgatgaaccaagagttagaaatatcagtgtgaggactggagtattagatgagaaagctgctgcaacacaggctattggttttttcgcactacacacgaagagtgcctatgctccgtatcctttagggcgtctccagcagttcatccatatggaaaacaatagaagtgctactccaacaatattttgcataaaatccagaatgatattctaactgcagttagggcaatacctcctgcacatgctgatgtactagagaaacagaaggatgtccttgatactgttctgaacatctacatcaagactatgacagaggatgacgataaagaggtagttgcacaagcttgcatgagtgtagcagacattgtgaaggactgtggttttgctgcaattgagccttacatgctgaggcttgctgaggtaacactggtccttttacgccaagaatcaagctgtcagcaagtagagtcagatggtgaggatgatggcgacattgaccatgatgaagtcctcatggatgcagtttcagatcttttgcctgcttttgcaaaagtgatgggatcttattttgatcccatatttgcaaaattatttgatccgttgatgaaatttgctaaatctccccatcctccccaagataagactatggttgttgcaaccttagctgaggttgctcaggaaatgggtgctccaatatctgcttatgttgataagataatgcctttggtgttgaaagagcttgcatcatctgatgctactaataggagaaatgctgctttctgtgctggcgagatatgcaagaatgggggtgctgcagcactgaaatactatggtgatatacttcgttctctgcataatttgtttagtaactcagaatcagatgatgcagtaagagataacgctgctggtgctattgctaggatgataatggtgcagcctcagtcgattcctctcaaccaggttcttccagtttttatcaaagctttgccactaaaagaagatcatgaagaatcaatgactgtctatggttgcgtctgcggtttattattatcatcacatccccagatcctccctctggtgcctgacgtcatacatgtctttgcccaagtggtggtatccccagatgagagcgatgaagtgaaaacaaatattggcaaggctatttctcacttgatatctgtctatggccagcaaatgcagccaatactgagtgcccttccaccagcccatgcaaacgcgctggcttcatttgcgagtagaagatgaccttggaggaccagcttttctttggttccttgttctgcttgattttgttttggttttgtcgacgattgccattttctgaggatctggtcacatggatcaggccagatgggagtgcttgcattgcacattggcaagggcgagcggagttgtcaggttggcgcatgattgattatatggtgagcttggtttctctttgagatacatagttgtgcttgctttggagccctgtacggttatgagtgcctgcctgtattcaggttccggatttggttatttatgctcttgttttttatatttttttgcctgtatttgcaattcattgattgctgttgtatatagaagagagttttaaatagagagaatgtacgactctgcaactggcaaattttgtatacatactgctcataccacttgctaatgttcgtccggattgcgtaccttgtgcccaagttggaaaaaaggcgctccttgtgccgccaataggaaatcatggaagcggggaaagaaagcaaaagtacagataccactggaaagctaaaataattacaggaatgatccagtacaatgtgagcagcgtggccatgcg

SEQ ID NO: 216918 - DNA, 4087 bp, Zea Mays
taactaattttccttaaaaatagatttttttaaaaaaaatgggttcctaaactaaccctaaatgtaaaataaggatgtattggtttatagaataaaagttagggaataaacgtcaatccatataaaccaaacaagctcctaagtaaacaaacaagaaaagacagccattgccaactactaaacccttgcggcagcgccccaaggcgcgccgccaccagagccccgagccacgacgcctccaaatcgatagggttttcgctgccccgctagcccgccgcctcctcctccgccagcgcgcccggtcgcagtaaaaggaggccaccaggcggcgaccagaataagcttcaggcgggaggaatggcgcagtcgctggagctgctgctgatccagtttttgatgccggataacgacgcacgtcggcaggcggaggagcagatccggcggctggcccgtgacccgcaggtggtccccgcgctcgtccaccatctccgtacggccaagacccccaacgtccgccagctcgccgcggtgctactccgcaagaagatcacctcccactggcccaagcttcccgcggactccaaggcatcgcttaaacaagccctcatcgattcaatcacactcgaccacagtcatcctgtaaggcgagctagtgcaaatgtcgtcagcattatagctaagtatgctatccctgcaggagagtggccagagctgttacctttccttttccaatgcagccaaagtccacaagaagatcatagagaagtggctttgattcttttcagctcccttactgaaactattggagctacttttcagtctcatctgaacaatttgcaacctattttactgaaatgtctgcaagacgaaactagctctcgagtcagaattgcagccctaaaggctgttggatcattcatagaatatgtcaatgatggaggtgacattgtaaaaatgtttcgggattttgttcccagtatcttgaatatatcaagacagtgtcttgctaatggagaagaagatgttgcttccattgcgtttgaaatttttgacgaactaattgaatctcctgcaccacttcttggagactctgtgaggtcaattgtgcaattctcgctggaagtttctgcaaaccaggatttggaaataaatataaggcaacaggctatccagataatttcatggctggtaaaatttaaagcatctttcttgaaaaagcacaagctggttgtacctatcctgcaagttatgtgcccattgcttacggaaacagctaatgaagatgaagattctgatctagcagcagatcgttctgctgccgaggtcattgatacaatggctatcaacttaccaaggcacgttcttgcaccagttcttgagtttgcttctctgagctttcatcacattaatccaaagtatcgtgaggctgctgtgacgtcacttggtgttatctccgagggttgttgtgaacatttgaaagataagttggaggattgtctgaaaattgttttggaagctttaaaagaccaagaacaaatggttagaggtgctgcatcttttgcacttggtcagtttgctgaacacttgcaaccagaaattttatctcattatgcgagtgtacttccatgcattctaaatgctcttgaagacccatcagatgaagttaaggagaagtcatattatgctcttgcagcattctgtgaggacatgggtgaagatatcctaccgtatctagagcccttgatatgcagattggttatgtctttgcagagcagtcctcggaacttgcaggagacatgcatgtctgcaattggttcagtggctgctgctgcggagcaggcttttaccccatatgccgaaaaagtccttgagatgatgaaaggttttatggtgctaattaatgacgaagatctgtgtgcacgtgctagggctactgaagttgttgggatagtagcaatggcagttggcagagcaagaattgaagcaatattgcctccttttattgaggcttctatttctggttttggattggattacagtgaactcagagagtacactcatggtttctttagtaacgttgctgaaattttgggtgatagttttacacagtatcttcctcatgttgtccctctcgtattttcttcctgcaacttggatgatggttctgctgtggacattgatgatgccgatagcattgaaaatggatttggcggtgtttcatctgatgacgatgttaatgatgaaccaagagttagaaatatcagtgtgaggactggagtattagatgagaaagctgctgcaacacaggctattggttttttcgcactacacacgaagagtgcctatgctccgtatctggaggagtcactgaagattttgatccggcacagtggttatttccatgaagatgtcaggctgcaggcagtcatatctttgaaacatattctaactgcagttagggcaatacctcctgcacatgctgatgtactagagaaacagaaggatgtccttgatactgttctgaacatctacatcaagactatgacagaggatgacgataaagaggtagttgcacaagcttgcatgagtgtagcagacattgtgaaggactgtggttttgctgcaattgagccttacatgctgaggcttgctgaggtaacactggtccttttacgccaagaatcaagctgtcagcaagtagagtcagatggtgaggatgatggcgacattgaccatgatgaagtcctcatggatgcagtttcagatcttttgcctgcttttgcaaaagtgatgggatcttattttgatcccatatttgcaaaattatttgatccgttgatgaaatttgctaaatctccccatcctccccaagataagactatggttgttgcaaccttagctgaggttgctcaggaaatgggtgctccaatatctgcttatgttgataagataatgcctttggtgttgaaagagcttgcatcatctgatgctactaataggagaaatgctgctttctgtgctggcgagatatgcaagaatgggggtgctgcagcactgaaatactatggtgatatacttcgttctctgcataatttgtttagtaactcagaatcagatgatgcagtaagagataacgctgctggtgctattgctaggatgataatggtgcagcctcagtcgattcctctcaaccaggttcttccagtttttatcaaagctttgccactaaaagaagatcatgaagaatcaatgactgtctatggttgcgtctgcggtttattattatcatcacatccccagatcctccctctggtgcctgacgtcatacatgtctttgcccaagtggtggtatccccagatgagagcgatgaagtgaaaacaaatattggcaaggctatttctcacttgatatctgtctatggccagcaaatgcagccaatactgagtgcccttccaccagcccatgcaaacgcgctggcttcatttgcgagtagaagatgaccttggaggaccagcttttctttggttccttgttctgcttgattttgttttggttttgtcgacgattgccattttctgaggatctggtcacatggatcaggccagatgggagtgcttgcattgcacattggcaagggcgagcggagttgtcaggttggcgcatgattgattatatggtgagcttggtttctctttgagatacatagttgtgcttgctttggagccctgtacggttatgagtgcctgcctgtattcaggttccggatttggttatttatgctcttgttttttatatttttttgcctgtatttgcaattcattgattgctgttgtatatagaagagagttttaaatagagagaatgtacgactctgcaactggcaaattttgtatacatactgctcataccacttgctaatgttcgtccggattgcgtaccttgtgcccaagttggaaaaaaggcgctccttgtgccgccaataggaaatcatggaagcggggaaagaaagcaaaagtacagataccactggaaagctaaaataattacaggaatgatccagtacaatgtgagcagcgtggccatgcg

SEQ ID NO: 216919 - DNA, 2674 bp, Zea Mays
gacagccattgccaactactaaacccttgcggcagcgccccaaggcgcgccgccaccagagccccgagccacgacgcctccaaatcgatagggttttcgctgccccgctagcccgccgcctcctcctccgccagcgcgcccggtcgcagtaaaaggaggccaccaggcggcgaccagaataagcttcaggcgggaggaatggcgcagtcgctggagctgctgctgatccagtttttgatgccggataacgacgcacgtcggcaggcggaggagcagatccggcggctggcccgtgacccgcaggtggtccccgcgctcgtccaccatctccgtacggccaagacccccaacgtccgccagctcgccgcggtgctactccgcaagaagatcacctcccactggcccaagcttcccgcggactccaaggcatcgcttaaacaagccctcatcgattcaatcacactcgaccacagtcatcctgtaaggcgagctagtgcaaatgtcgtcagcattatagctaagtatgctatccctgcaggagagtggccagagctgttacctttccttttccaatgcagccaaagtccacaagaagatcatagagaagtggctttgattcttttcagctcccttactgaaactattggagctacttttcagtctcatctgaacaatttgcaacctattttactgaaatgtctgcaagacgaaactagctctcgagtcagaattgcagccctaaaggctgttggatcattcatagaatatgtcaatgatggaggtgacattgtaaaaatgtttcgggattttgttcccagtatcttgaatatatcaagacagtgtcttgctaatggagaagaagatgttgcttccattgcgtttgaaatttttgacgaactaattgaatctcctgcaccacttcttggagactctgtgaggtcaattgtgcaattctcgctggaagtttctgcaaaccaggatttggaaataaatataaggcaacaggctatccagataatttcatggctggtaaaatttaaagcatctttcttgaaaaagcacaagctggttgtacctatcctgcaagttatgtgcccattgcttacggaaacagctaatgaagatgaagattctgatctagcagcagatcgttctgctgccgaggtcattgatacaatggctatcaacttaccaaggcacgttcttgcaccagttcttgagtttgcttctctgagctttcatcacattaatccaaagtatcgtgaggctgctgtgacgtcacttggtgttatctccgagggttgttgtgaacatttgaaagataagttggaggattgtctgaaaattgttttggaagctttaaaagaccaagaacaaatggttagaggtgctgcatcttttgcacttggtcagtttgctgaacacttgcaaccagaaattttatctcattatgcgagtgtacttccatgcattctaaatgctcttgaagacccatcagatgaagttaaggagaagtcatattatgctcttgcagcattctgtgaggacatgggtgaagatatcctaccgtatctagagcccttgatatgcagattggttatgtctttgcagagcagtcctcggaacttgcaggagacatgcatgtctgcaattggttcagtggctgctgctgcggagcaggcttttaccccatatgccgaaaaagtccttgagatgatgaaaggttttatggtgctaattaatgacgaagatctgtgtgcacgtgctagggctactgaagttgttgggatagtagcaatggcagttggcagagcaagaattgaagcaatattgcctccttttattgaggcttctatttctggttttggattggattacagtgaactcagagagtacactcatggtttctttagtaacgttgctgaaattttgggtgatagttttacacagtatcttcctcatgttgtccctctcgtattttcttcctgcaacttggatgatggttctgctgtggacattgatgatgccgatagcattgaaaatggatttggcggtgtttcatctgatgacgatgttaatgatgaaccaagagttagaaatatcagtgtgaggactggagtattagatgagaaagctgctgcaacacaggctattggttttttcgcactacacacgaagagtgcctatgctccgtatcctttagggcgtctccagcagttcatccatatggaaaacaatagaagtgctactccaacaatattttgcataaaatccagaatggatgtactagagaaacagaaggatgtccttgatactgttctgaacatctacatcaagactatgacagaggatgacgataaagaggtagttgcacaagcttgcatgagtgtagcagacattgtgaaggactgtggttttgctgcaattgagccttacatgctgaggcttgctgaggtaacactggtccttttacgccaagaatcaagctgtcagcaagtagagtcagatggtgaggatgatggcgacattgaccatgatgaagtcctcatggatgcagtttcagatcttttgcctgcttttgcaaaagtgatgggatcttattttgatcccatatttgcaaaattatttgatccgttgatgaaatttgctcggccccttcatactgtttcatttg

SEQ ID NO: 216920 - DNA, 3524 bp, Zea Mays
atggttgctatattactatcttcatacctgaataagagaagggggtgtctgttatacagaaatgaaaaagaagttgactctggaagcccatctgatgttgagatattagaaaagccaacagattctaataagaggaaactactccacgtgcttgatgatagcgaagtagtgtatgaagatgaggaaggccctattactcaagcagacttgcaaaggtggtttgttgatgattgggataaaagagctcatgtaaaagtctctcccgatgggtgcaccaatgactttttaatggttggtctttccacaaaggacatgccagtgaccaaagccgattcaatagatgttttatgtgattatatcatggcaatagaagacaatacgacactagagtttaataccagctacctcgttctacaagctatggccatgtgggggaatgacagactactgaaatttgttagggaccgaaaaacgctgctgcagcagcactacctgaatgtagggactggaatttggacgacaccaggaacggttgaacaagcgtgggtgggagctgggaagcaggggcggccagtgggggcaccgggaggtggagccgttgtgccaaccgagagttggtggcgcggcgccggccgccgggcagggactggtggtgctgccttctcggagtgtggcagcggcggcggcggagcagtgccagatctgcgactccgacggcgcaatccaccattccctggccagtgggggcaccgggaggtggagccgttgttccagcaaccgagagttggtggcgcggcgccggccgccgggcagggattggtggtgctgccttctcggagtgcggcggcggcggagcagtgccagatctgcgaccccgacggcgcaatccaccattccctggcctccgcattgcatcaggatctaacaatcaacaagcaagcttgtccagtctcataagtaacagctacctggtgtagaagggttgctgctatctgcctgtcttcaccttatgaaggaaacaagagaggagcaagaaaggccggattctggcagcttcctctagtacattggctgcaatttctctttcagtttctaccatgcctcgcaacttggaatgcccagtgcagacccagatggcagtctcagccttggaccgaactcttagcagtgagtatcctactaaaagcaaaagcgagaccaaggttggtggatggaaacgtgtttttgtccaaaccgatgttggttgtgtcctggctattcaattgaattgtggtgacaatgcacatacggtcaaaagaaagctgcaggtggccctaaattttcccactgatgagagtgttctgaaaaatgatctcagcaccattagaaatgatttccctttgcttctcaccaagactttcatgcatcgaagttcctccacaccatgcttgtctcctagtggcaaggatctccaacagcaaaaagataggggctgtccaattgaactgttagtatgcccgagccgctgttctcgaacaaggcagctcgtgaaggatgttgctagggcaatcaagaaaggtgtggatccagtacctatcaaaagtgggcttggtggtgcttactatttcaggaacagcaaaggtgagaatgcagcaattgtgaagccaaatgatgaagagccttttgctcccaacaacccaaaaggttttatagggaaatcccttgggcagccaggcctcaaaagatcagttcgaattggcgagacctgttttagagaggttgcggcgtaccttctggactatgataactctgctaatgttcctccgacgttacttgttaagatttctcatcctgtgtttcatatgaatgaagacatcaattttgctaacaaaaatattgctgatggtagcattcaagctgttagcaagactgcatcatttcagcagtttattcctcacgattttgatgccagtgatcatggcacctcaagctttcctgtttctgctgtccataggatcggtattcttgacatcaggatcttcaacactgatagacatgctggcaatcttctggtaaggaagcaaaccggagcaggaaaatttgggaatcatactgaacttattcctattgatcatggtctctgccttccagagtgtttagaggatccttattttgaatggatccactggcctcaggcatcagtcccattctctgaggatgagctcgagtacatagcaaatcttgatccagtaaaagatgctgacatgctgcggatggagttgcctatgatccgtgaagcatgcctgagagtactaatactctcaaccatatttctgaaagaagccacagcatttggtatgtgccttgcagagattggggagatgatgagcagggaatttactgggatggaagatcagccaagtgagctagagtttgtctgcatggaggcaaggaggctggcagcagagcaagaagacagttccacagaacttgactctggtgaggaggatttaactcagtttgaacttgacaatgaatatcatgaaatgctaaaagaaccatcgacccgccagtttgagtttaagacaagaaactccagaaaccaactgtccaaattagatgaagccaatgaagaagaggaagaagaggaagatgatactgaggaggtagaaagtgatgctggaaaattagcatgtcctaggcctgttaataagtggcttgctaacatttcaaagctgtcgacctcactgaagggtgtcaatctaacaaacaaaacccagcgtcaactgtatgctggtcctaagtttgtggatcctgtgaagagcaacagcaatgacagcggctctcagcattgtaactggggaagtgcaaacgacatgctcccttcaagtgtgagcttcgtcaagctggctgacatgaaacctgagacgtggtgcctgttcctcgagaagttccatgagctccttcctgagacattccgctcacgcaagtgcattgtcaaagagcaaagggcgaagcagaggcttggcacttcttgccagttttgagttggcacaggagtagagaggatttgagtgagtgggggcctgaacctgatgtccatgctgatatgatggcctcgctttgtaaatacattttccccctttttcttagctaggctctgctagacatgagttgcttgaaagaagttgggattcaatgtctgcctgtttctggccgcccgactcttccactcatgatatgcactcaaaagtttcattcgaatgaacattcagcagaaagtttctcgtgtcgtaactaacattgtggcagataaacgctaaagatattacaatcgttttgttgtgttgcgattgacatgttcagcaagtcttgtaatttagtcgtttctgcagacctgcagtgactgaattcgttttgttattcacatggcaatggtaaaaatccagtgtctttactcacactgagctactactgtcgaattcagtgtctgtactcacatggccatggtaaaaatgcagtttataaagtctttttttatcaaa

SEQ ID NO: 216921 - DNA, 2180 bp, Zea Mays
cgacagtcgacaacacggtcaccaactgctcccgtctaacgatcaggatccagacgccaaggaagaagggtgaggtagaggttgacacagaaatcaattttctcctttctcggtctcgcgagcaagcctcgccatggatatctgcaccagttgcttccaagccagatattagagctgcctactacttgcgtcgcgcggagagcgggttgggaccagaaacaagagtagagcaagactcctatcttttttccacgcgccagtcttctctgaaccggtgaacccattcctcctcctcttcctactcaacgccacgatcgaagaggagactcagtcaatctcgccttgctctcctcttcgacccatcgtcggttcctgggatcagcatcgacgagcaggatttttccggctgtggaggagcacgagcacgagcaggagaaggcggctagaaggttcctgctcccgggcgtgacctctcacacggcatggtcgttgcttcgccggggaggcgcagcggggatggtcgataggagcagggccgtgctcatcggggtcaccgccggcgtcgcggccgcgctggtcgcggcggcgggcgtgcttctggccgtctggctctaccgccggcgggccagcgtcgccgcacggacgcgctccccggagtcgccctcggcgacgctgcgggccggcggcgccggtcgcgccagcctcgactccagcgtctccgtctcggtggtctccgagagcgccgccgactggggccacccgccaccgcacaaacgcgccgcgttctgggcctggagaggcggcgccggccacaacggcagggagccgccaccgctgtccgtctccgggatcccaaaataccattacaaggatctgcagaaggctaccagcaactttaccacaattcttgggcaaggatcgttcggccctgtgtacaaagctgtaatggccactggtgaagtggtagctgtaaaggtgctcgcgagtgattcaaggcaaggggaaagagagttccagactgaggtagcattgcttagcaggttgcatcataggaatcttgttaatttggttgggtattgtgtagaaaaaggtcagcgcattctgatttatgagtacatgagcaatgggagtttggcaagacttttatatggcgacaataaacgaagtttgagctggcaagaaaggctgcaaattgctcacgatgtttctcatgggattgagtacctgcatgaaggggctgttccttctgttattcacagggacctaaagtctgataatatacttttggaccattcaatgagagccaaggttgcagactttggtctatcaaaggaggaagtgtatgatggaaggaagtctggccttaagggcacctatggctatatggatcctgattacatgtccacaaataagctaacaaagaagagcgacgtgtatagctttggcataatactttttgaactgataactgccataaatccacaacaaggtctgatggagtacattaatctggcagcgattggaggggaggggagggttgattgggacgagatactggacaaggacctcctagtagggaacatccctgaagaggttcggatgcttgctgatgttgcctaccgatgcgttaacaagaatccgaggaagcgcccctggatatcagaggtcacacaggccatctcaagactcagacagcaccagctgataaagcatgatgcgataactctgccgaggagtgagaccaggaccgtccttaggaggatagactaccagcacgtggagcttagtgacctcactagcatcaaagaacttacgccgataagggcatcatgaactcgtgagcttgttctagtatgtaggttgctttatagagttagatttggacttggttcggcgatgttgtagctgtttgatgaaagcatcaggtagctagatcgttgaaagatgtcttggctgcaatgagagctctccttaattggagttctgtactgacctgaggtttgaaatcgttgtaaaaaaatcaacagtagtagctgtagcatttgataaaaaaagactttataaactgcatttttaccatggccatgtgagtacagacactgaattcgacagtagtagctcagtgtgagtaaagacactggatttttaccattgccatgtgaataacaaaacgaattcag

SEQ ID NO: 216922 - DNA, 2259 bp, Zea Mays
cgacagtcgacaacacggtcaccaactgctcccgtctaacgatcaggatccagacgccaaggaagaagggtgaggtagaggttgacacagaaatcaattttctcctttctcggtctcgcgagcaagcctcgccatggatatctgcaccagttgcttccaagccagatattagagctgcctactacttgcgtcgcgcggagagcgggttgggaccagaaacaagagtagagcaagactcctatcttttttccacgcgccagtcttctctgaaccggtgaacccattcctcctcctcttcctactcaacgccacgatcgaagaggagactcagtcaatctcgccttgctctcctcttcgacccatcgtcggttcctgggatcagcatcgacgagcaggatttttccggctgtggaggagcacgagcacgagcaggagaaggcggctagaaggttcctgctcccgggcgtgacctctcacacggcatggtcgttgcttcgccggggaggcgcagcggggatggtcgataggagcagggccgtgctcatcggggtcaccgccggcgtcgcggccgcgctggtcgcggcggcgggcgtgcttctggccgtctggctctaccgccggcgggccagcgtcgccgcacggacgcgctccccggagtcgccctcggcgacgctgcgggccggcggcgccggtcgcgccagcctcgactccagcgtctccgtctcggtggtctccgagagcgccgccgactggggccacccgccaccgcacaaacgcgccgcgttctgggcctggagaggcggcgccggccacaacggcagggagccgccaccgctgtccgtctccgggatcccaaaataccattacaaggatctgcagaaggctaccagcaactttaccacaattcttgggcaaggatcgttcggccctgtgtacaaagctgtaatggccactggtgaagtggtagctgtaaaggtgctcgcgagtgattcaaggcaaggggaaagagagttccagactgaggtagcattgcttagcaggttgcatcataggaatcttgttaatttggttgggtattgtgtagaaaaaggtcagcgcattctgatttatgagtacatgagcaatgggagtttggcaagacttttatatggcgacaataaacgaagtttgagctggcaagaaaggctgcaaattgctcacgatgtttctcatgggattgagtacctgcatgaaggggtacgttaacatttgataactattaaggtatgtattctcgaataatgggaattaatgaaacctgctatgtttcatgagtgcaggctgttccttctgttattcacagggacctaaagtctgataatatacttttggaccattcaatgagagccaaggttgcagactttggtctatcaaaggaggaagtgtatgatggaaggaagtctggccttaagggcacctatggctatatggatcctgattacatgtccacaaataagctaacaaagaagagcgacgtgtatagctttggcataatactttttgaactgataactgccataaatccacaacaaggtctgatggagtacattaatctgcgattggaggggaggggagggttgattgggacgagatactggacaaggacctcctagtagggaacatccctgaagaggttcggatgcttgctgatgttgcctaccgatgcgttaacaagaatccgaggaagcgcccctggatatcagaggtcacacaggccatctcaagactcagacagcaccagctgataaagcatgatgcgataactctgccgaggagtgagaccaggaccgtccttaggaggatagactaccagcacgtggagcttagtgacctcactagcatcaaagaacttacgccgataagggcatcatgaactcgtgagcttgttctagtatgtaggttgctttatagagttagatttggacttggttcggcgatgttgtagctgtttgatgaaagcatcaggtagctagatcgttgaaagatgtcttggctgcaatgagagctctccttaattggagttctgtactgacctgaggtttgaaatcgttgtaaaaaaatcaacagtagtagctgtagcatttgataaaaaaagactttataaactgcatttttaccatggccatgtgagtacagacactgaattcgacagtagtagctcagtgtgagtaaagacactggatttttaccattgccatgtgaataacaaaacgaattcag

SEQ ID NO: 216923 - DNA, 2160 bp, Zea Mays
cgacagtcgacaacacggtcaccaactgctcccgtctaacgatcaggatccagacgccaaggaagaagggtgaggtagaggttgacacagaaatcaattttctcctttctcggtctcgcgagcaagcctcgccatggatatctgcaccagttgcttccaagccagatattagagctgcctactacttgcgtcgcgcggagagcgggttgggaccagaaacaagagtagagcaagactcctatcttttttccacgcgccagtcttctctgaaccggtgaacccattcctcctcctcttcctactcaacgccacgatcgaagaggagactcagtcaatctcgccttgctctcctcttcgacccatcgtcggttcctgggatcagcatcgacgagcaggatttttccggctgtggaggattactgctgcttgacaaatccgagcgcaaaggttgcttcctgacgcgttcccccatggcacgagcaggagcacgagcacgagcaggagaaggcggctagaaggttcctgctcccgggcgtgacctctcacacggcatggtcgttgcttcgccggggaggcgcagcggggatggtcgataggagcagggccgtgctcatcggggtcaccgccggcgtcgcggccgcgctggtcgcggcggcgggcgtgcttctggccgtctggctctaccgccggcgggccagcgtcgccgcacggacgcgctccccggagtcgccctcggcgacgctgcgggccggcggcgccggtcgcgccagcctcgactccagcgtctccgtctcggtggtctccgagagcgccgccgactggggccacccgccaccgcacaaacgcgccgcgttctgggcctggagaggcggcgccggccacaacggcagggagccgccaccgctgtccgtctccgggatcccaaaataccattacaaggatctgcagaaggctaccagcaactttaccacaattcttgggcaaggatcgttcggccctgtgtacaaagctgtaatggccactggtgaagtggtagctgtaaaggtgctcgcgagtgattcaagaaaaaggtcagcgcattctgatttatgagtacatgagcaatgggagtttggcaagacttttatatggcgacaataaacgaagtttgagctggcaagaaaggctgcaaattgctcacgatgtttctcatgggattgagtacctgcatgaaggggctgttccttctgttattcacagggacctaaagtctgataatatacttttggaccattcaatgagagccaaggttgcagactttggtctatcaaaggaggaagtgtatgatggaaggaagtctggccttaagggcacctatggctatatggatcctgattacatgtccacaaataagctaacaaagaagagcgacgtgtatagctttggcataatactttttgaactgataactgccataaatccacaacaaggtctgatggagtacattaatctggcagcgattggaggggaggggagggttgattgggacgagatactggacaaggacctcctagtagggaacatccctgaagaggttcggatgcttgctgatgttgcctaccgatgcgttaacaagaatccgaggaagcgcccctggatatcagaggtcacacaggccatctcaagactcagacagcaccagctgataaagcatgatgcgataactctgccgaggagtgagaccaggaccgtccttaggaggatagactaccagcacgtggagcttagtgacctcactagcatcaaagaacttacgccgataagggcatcatgaactcgtgagcttgttctagtatgtaggttgctttatagagttagatttggacttggttcggcgatgttgtagctgtttgatgaaagcatcaggtagctagatcgttgaaagatgtcttggctgcaatgagagctctccttaattggagttctgtactgacctgaggtttgaaatcgttgtaaaaaaatcaacagtagtagctgtagcatttgataaaaaaagactttataaactgcatttttaccatggccatgtgagtacagacactgaattcgacagtagtagctcagtgtgagtaaagacactggatttttaccattgccatgtgaataacaaaacgaattcag

SEQ ID NO: 216924 - DNA, 2122 bp, Zea Mays
cgacagtcgacaacacggtcaccaactgctcccgtctaacgatcaggatccagacgccaaggaagaagggtgaggtagaggttgacacagaaatcaattttctcctttctcggtctcgcgagcaagcctcgccatggatatctgcaccagttgcttccaagccagatattagagctgcctactacttgcgtcgcgcggagagcgggttgggaccagaaacaagagtagagcaagactcctatcttttttccacgcgccagtcttctctgaaccggtgaacccattcctcctcctcttcctactcaacgccacgatcgaagaggagactcagtcaatctcgccttgctctcctcttcgacccatcgtcggttcctgggatcagcatcgacgagcaggatttttccggctgtggaggattactgctgcttgacaaatccgagcgcaaaggttgcttcctgacgcgttcccccatggcacgagcaggagcacgagcacgagcaggagaaggcggctagaaggttcctgctcccgggcgtgacctctcacacggcatggtcgttgcttcgccggggaggcgcagcggggatggtcgataggagcagggccgtgctcatcggggtcaccgccggcgtcgcggccgcgctggtcgcggcggcgggcgtgcttctggccgtctggctctaccgccggcgggccagcgtcgccgcacggacgcgctccccggagtcgccctcggcgacgctgcgggccggcggcgccggtcgcgccagcctcgactccagcgtctccgtctcggtggtctccgagagcgccgccgactggggccacccgccaccgcacaaacgcgccgcgttctgggcctggagaggcggcgccggccacaacggcagggagccgccaccgctgtccgtctccgggatcccaaaataccattacaaggatctgcagaaggctaccagcaactttaccacaattcttgggcaaggatcgttcggccctgtgtacaaagctgtaatggccactggtgaagtggtagctgtaaaggtgctcgcgagtgattcaaggcaaggggaaagagagttccagactgaggcgacaataaacgaagtttgagctggcaagaaaggctgcaaattgctcacgatgtttctcatgggattgagtacctgcatgaaggggctgttccttctgttattcacagggacctaaagtctgataatatacttttggaccattcaatgagagccaaggttgcagactttggtctatcaaaggaggaagtgtatgatggaaggaagtctggccttaagggcacctatggctatatggatcctgattacatgtccacaaataagctaacaaagaagagcgacgtgtatagctttggcataatactttttgaactgataactgccataaatccacaacaaggtctgatggagtacattaatctggcagcgattggaggggaggggagggttgattgggacgagatactggacaaggacctcctagtagggaacatccctgaagaggttcggatgcttgctgatgttgcctaccgatgcgttaacaagaatccgaggaagcgcccctggatatcagaggtcacacaggccatctcaagactcagacagcaccagctgataaagcatgatgcgataactctgccgaggagtgagaccaggaccgtccttaggaggatagactaccagcacgtggagcttagtgacctcactagcatcaaagaacttacgccgataagggcatcatgaactcgtgagcttgttctagtatgtaggttgctttatagagttagatttggacttggttcggcgatgttgtagctgtttgatgaaagcatcaggtagctagatcgttgaaagatgtcttggctgcaatgagagctctccttaattggagttctgtactgacctgaggtttgaaatcgttgtaaaaaaatcaacagtagtagctgtagcatttgataaaaaaagactttataaactgcatttttaccatggccatgtgagtacagacactgaattcgacagtagtagctcagtgtgagtaaagacactggatttttaccattgccatgtgaataacaaaacgaattcag

SEQ ID NO: 216925 - DNA, 2013 bp, Zea Mays
cgccaaggaagaagggtgaggtagaggttgacacagaaatcaattttctcctttctcggtctcgcgagcaagcctcgccatggatatctgcaccagttgcttccaagccagatattagagctgcctactacttgcgtcgcgcggagagcgggttgggaccagaaacaagagtagagcaagactcctatcttttttccacgcgccagtcttctctgaaccggtgaacccattcctcctcctcttcctactcaacgccacgatcgaagaggagactcagtcaatctcgccttgctctcctcttcgacccatcgtcggttcctgggatcagcatcgacgagcaggatttttccggctgtggaggagcagggccgtgctcatcggggtcaccgccggcgtcgcggccgcgctggtcgcggcggcgggcgtgcttctggccgtctggctctaccgccggcgggccagcgtcgccgcacggacgcgctccccggagtcgccctcggcgacgctgcgggccggcggcgccggtcgcgccagcctcgactccagcgtctccgtctcggtggtctccgagagcgccgccgactggggccacccgccaccgcacaaacgcgccgcgttctgggcctggagaggcggcgccggccacaacggcagggagccgccaccgctgtccgtctccgggatcccaaaataccattacaaggatctgcagaaggctaccagcaactttaccacaattcttgggcaaggatcgttcggccctgtgtacaaagctgtaatggccactggtgaagtggtagctgtaaaggtgctcgcgagtgattcaaggcaaggggaaagagagttccagactgaggtagcattgcttagcaggttgcatcataggaatcttgttaatttggttgggtattgtgtagaaaaaggtcagcgcattctgatttatgagtacatgagcaatgggagtttggcaagacttttatatggcgacaataaacgaagtttgagctggcaagaaaggctgcaaattgctcacgatgtttctcatgggattgagtacctgcatgaaggggctgttccttctgttattcacagggacctaaagtctgataatatacttttggaccattcaatgagagccaaggttgcagactttggtctatcaaaggaggaagtgtatgatggaaggaagtctggccttaagggcacctatggctatatggatcctgattacatgtccacaaataagctaacaaagaagagcgacgtgtatagctttggcataatactttttgaactgataactgccataaatccacaacaaggtctgatggagtacattaatctggcagcgattggaggggaggggagggttgattgggacgagatactggacaaggacctcctagtagggaacatccctgaagaggttcggatgcttgctgatgttgcctaccgatgcgttaacaagaatccgaggaagcgcccctggatatcagaggtcacacaggccatctcaagactcagacagcaccagctgataaagcatgatgcgataactctgccgaggagtgagaccaggaccgtccttaggaggatagactaccagcacgtggagcttagtgacctcactagcatcaaagaacttacgccgataagggcatcatgaactcgtgagcttgttctagtatgtaggttgctttatagagttagatttggacttggttcggcgatgttgtagctgtttgatgaaagcatcaggtagctagatcgttgaaagatgtcttggctgcaatgagagctctccttaattggagttctgtactgacctgaggtttgaaatcgttgtaaaaaaatcaacagtagtagctgtagcatttgataaaaaaagactttataaactgcatttttaccatggccatgtgagtacagacactgaattcgacagtagtagctcagtgtgagtaaagacactggatttttaccattgccatgtgaataacaaaacgaattcag

SEQ ID NO: 216926 - DNA, 3949 bp, Zea Mays
atggatggtggcagcgcacttccagctacaccggcctcacagccatcatcgaccatactatctcaagcagggcaaggatcaggtgtcacacaaaacaagggggctgccttcatccacgagccgtcgctaacaccggagagtcgcaaagtttcgtctagcgccaagacaaccccacatcagggagacaacctgctgctaggaaaagaaattatccctgctccgcctaacgtggagacgccatcaggagcccacaacacccctggtgccgacactctccgcctgctgcctctaaaactagcaagttcgcaggatgacgcttacagtgtgctagatggatctacaaacaagattgacaaaagtgttaccggaaaaaggtctcgcacatcaccttccaagaaggctgccaagaaactttttagagatgaagtcataaccaatgacgatgctactggttcttcatcggttaatgtcgaggctggcaagaatgagaaaggttccactgtttaccaacaaaggttgttgtcatgtgattatgctgttgtatatggcttcagtttacctgctgcagaaagattcatagcgttggcaaacaaagagacgcttattgcaggtggtcctttcgtgcttccccttgcacacaaacacaaagtgaaaattcttcctgctgattctgagcactctgcaatatttcagaccagtgagtgtagcttggtggattgcctaaagtacttcgctgtggtggagcatcttgacagctatcgttgtgaccgttgttggcacatcattgctgccaaatatctttctcttagatcaaaagttgatgaggaaaagttgcagggatatgttccccctggagtcactgccatgttcatcatcttcacgagcaacaaagcagctgattatcagtcagtgcccgaaggtaacacctcagttgtttctcatccaaataccagtggagacaaagatgtgattgttgaaagaacgcatctaagccttaactttgtaatacatattagccaagacccctcggcgcgcccgcactttcggctgaggcgccatgcgccccgcgcgtccgccactgccaattcgtcgctcttgactctggaagaggtggctcgtgctgctaaggggaagagggcacatacggttatgctcacccagttgctcgctttggcaagccatgctttggcagagaaaccaggcctgaacctaaggatctgtgggaagagccgataaacgctactatgtggagaccgtgttctgatcaaagggattggaaagcctcagagggaaccaatgggtacatcatgatcagtgcgaatggtggcataaaccagcaaagggttgcgatttgtaatgcagttacaatctctcggttgctcaatgcaactcttgtcctcccaaaattcttgtacagtaatgtgtggctggacaaaagtcagtttggcgatatatatcaggaggattattttatcaaatatctgaaatctgatattcagattgtaaaggatcttccagtagagctgcagtcattagacttggaggccatcggtagccttgttaatgatacaaatgtcatgaaagaggcaaagcccagtttatacgtaaaaaaaatactgccaattttactgagaaacagagttgttcactttataggatttggcaatcgcttatcttttgacccaataccttctgaccttcagagattgcgatgcagatgtaattttcacgctcttcgttttgtacacaaaattcaagaaactggtgcagttcttgtagagaggttgcatggccacagggcctcttcgtcacctttgaaggataatcttttaggccagtttgctatcaagtctgaccccagtacgaacaagagtgacgcatccaaatatctggctgttcatctccggtttgagattgatatggttgcatactcattgtgttactttggtggtggcaaagatgaggaagacgaactagaagcttatcgccaaattcactttcctgttctgtcagaactcaagaagacgacaaagttgccgtctgctgctttgttacggtctgaaggcaaatgtccccttgcacctgaagaggctgtgcttatgcttgctgctattggtttcaagcgcagcacaaatatatacattgcaggtgctgaaatttatggagggcaatataggatggctgcaataagtcgtctttatcctgctttagtaactaaagaaacccttctgtctccatcagagcttgaaccatttaggaacttctcatctcagttggcagccctagacttcattgcatgtgcagctgccgatgcatttgctatgactgacccaggaagtcaattctcttctcttgttcaaggttaccgcatgtactatggtggtgggaactttcccacaataaggccaaacaagcgccggctagccagcatacttgtgaagaatgccacgattgagtggaatgaatttgaaagtagagtaaggaaactcatacagcaaactaagcaagttcatgagaggcctgttgcaagaagcatatttagacatccacgatgtccagaatgcatgtgcagaacagagcactaatattttgatagtttcttgtatctataccaacagttgttttttcagaagaaagactaccaattagatcgccaaaggtagttcttttgtgctcccgctgaaatctggatagatctcttgcccttgaactactttggaatcaaactgtacaaaagaaaatataatgattgagcccttgtttgtatcagagaagcaatatagctgactagctcatcaattatcttactgctatggtctactgctaggcatcatgttggatttggggtatttggcagaactttgtctcatgtttgatggaagtagaccagggactaaattgattggggtcagctaaaccattctgtgaatgaaggtgcatcatctgcagctgactgtggaagtaatatgttgacaaaactgagcaacaacattcttattgttgcttgcctaaattctactcaggttaccattcaacaaatcaagctgccagagttctgccaaccttgtattgccatctccattgttgctatcgtgctccggctgaaatctgaatatatctgttgcccttgaactactttggaatcaaactgtaaaaaagaaaatacggtgattgggctcttgtttgtgtcagagaagcaatgtagctgactagctcatccattatcttactgctatggtctactgctaggcatcatgttggatttggagtatttggcagaacttcgtctcatgtttgatggaagtagaccagggactaaattttgcacctcgataacaatgctgccatatttttgattggggtcagctaaaccattctgtgaatgaaggtgcatcatctgcaggtgaatgtggaagtaatatgttgacctaactgagcaacaacattcttattgttgcttgcctcaattctactcgggttaccattcaacaaatcaggctgccagagttctgccaaccttgtattgccatcttcattgttgctatcgtgccaggtggcatcttgattccttttttaaccattcttttgttcattgtaccataagagacgcatatagttaggttttaagtttatcccaactgaaaggtttcattatcaacgagagaaatgttcctttttgtgcaatctttatatgtgctcatccaacggcacttgtatactaatgttttggctattttttttgtttccaaattttctttggcaatgccctgaaactgtgaatgaactcactcagactctgattcgcagagcgatgctcagaaccacctgatctctggtgttgtaatgaatgttgttggaaggcattttgtatggaaacctttggattgctagttacagttctgatctgaaataaagcctgatctccggggagtcacatttgacgtgttcc

SEQ ID NO: 216927 - DNA, 1669 bp, Zea Mays
tcgaagcatcttgtagtgttcagacagttcagttggctatcagtgcgaaggagacacattggtcaagcagaactgcagaggaggtgtacctgggcagacaagttagagttagcaactgacccacttcactttgattttacgttattgagttgctctgcgatgtacaggtttggatctccttatgttgacccaagttctatatcctacagctgataggcaggcgataccgtaccgagagagttgaagctgagaaagaatggcggggctctacgagaagcagtcggagacgtacgccaagaagcgtccgcagtaccccaaggagtggttctccatgctggccagcctcaccgcggggcaccagcgcgcctgggacgccgggtgtggcaccggccaggccgccatcagcatggcggagcactacgagagcgtggtggcgacggacgtgagcgaggggcagctccggcacgccaccgcgcacccgaaggtgcggtacctccacaccccggagcacctctcggaggacgagctggtgtcgctggtcggcggcgagggctccctggacctggtcgtggtggccacctccatccactggttcgacgtcccgctcttctacgccgtcgtgagccgcgccctgcggaagcccggcggcatgctcgccgtgtggggctacaactacgagatccacccgttcgaggacgcgctgcacggccagctctacccggccctgcggccgtacctggacccgcgggcgggactggccatggagcggtacaggtccctgccgttcccgttcgagcccgtcggggtgggcgccgagggcgcgcccgccgacgtggacatcgaggtggagatgacgctggaggacctggtcgggttcctgaacaccggctctgtcgtgaccacggcgagggccaagggcgtggacctggaggcggtcacgagggccgcgctgaagcgtgtggaggagcagtggggcggcgcgcccaccgtgccgaggaagctcgtgttcaaggcgttcatgctcgccgggaggcccaagtgctgaagtgataatgccgaataagtgtttgcttgtcagtcagcgtgagattgagatgagatcacagactacaatacatcatatagccagccactggattatgtctggcgatctaatgacatctgaagccactacatccaacccaggtagaggtagcaaactgcgtattcctttcatgctgtatgcagaatgaagaagaaatacctatttccattgcctagtgaattcccattagtatttcttctttcactggattatgttgtatgcagaatgaagaagaaatacctattttcattgcctagtgaattcccattagtatttcttctttcactggattatgttgtatgcagaatgaagaagaaatacctattttcattgcctagtgaattcccattagtatttcttctttcactggattatgttgtatgcagaatgaagaagaaatacctattttcattgcctagtgaattcccattagtatttcttctttcactggattatgttgtatgagaaaaataattgttgctcgctcatatttcacgtctaagacataagataggcttgacgtgagagaagtgttggaatataatataagagtgtttggtttgaggaatgaaatgattcatcttc

SEQ ID NO: 216928 - DNA, 1932 bp, Zea Mays
cacacctcgttcacgcagcaaacaccatttccacccaaccagaactcctcacgatcctctgcgccacccacaaccgtgcgaccgtccgtgctgccggcgaccccgatccgccgacccgtcccgtcccaccacaccctaccgccgctcgcagctatgtcgccgtcggagccgacgcgggaggagagcgtgtacatggccaagctggcagagcaggcggagcggtacgaggagatggtcgagttcatggagcgcgtcgcgcgctccgccggcggcgccggcggaggggaggagctatccgtggaggagcgcaacctgctgtccgtcgcctacaagaacgtcatcggcgcccgcagggcctcgtggcggatcatctcctccatcgagcagaaggaggagggccgcgggaacgaggcgcacgccgcctccatccgcgcctaccgctccaagatcgagaccgagctcgcccgcatctgcgatggcatcctcgccctgctcgactcccacctcgtcccatccgccggcggcgccgagtccaaggtcttctacctcaagatgaagggtgactaccacaggtaccttgctgagttcaagtctggtgcagagaggaaggatgctgcggagagcaccatgaatgcctacaaagctgctcaggacattgctcttgcagatctggctccaacccaccccatcaggcttggcctcgctctcaacttctcagtgttctactacgagatcctgaactcccctgatcgcgcctgcaaccttgcaaaacagattgtgtgtagcttctgggcaacggattgagtgtgcataaacagctcctgtctccatcagcttatgtaggggtttggttgattcaattaaaaaaagatggtgcaaaggaaatagttcacttgcctccgtctgcatgcctattcactgaaacaattttttcttacattaggcactgtgtaagtgatggatctaattactctgggtgctaacaaaatgcttcttttgctaccacccacggaggctgttgtttattttcactcaatctgtcacgtcttcttgcatacatgttctactacatattgaacattgacaagctacaacctaatgattacaagtcacctagagaattctcaatttcccttgtatgatggttgcactgtctaacttgtctgcaatccatgaagttggacatgacggtcttcatacagtacttgagatgacagatgcattccctatgcaacgaagccttcgatgaggcgatctctgagctagacagcctgggagaggagtcctacaaggacagcactctgatcatgcagctcctgcgcgacaacttgaccctatggacttccgacaccaacgaggatggcggcgacgagatcaaggatgctgctgccccgaaagaatccgcggagggtcagtaagatggattcagtctcacgacctgctgctgctgatgttgaggagtgaccagaaccagaaccgccgtcctcgattctgatagattatcttctagtataccttgtgttgttgctgttgttgtcgtcgtcgcgccggtgtatgcgatgaagctgccattgctgctgttttaattaagcattctagatgttataccgcatgctttgtttcggtttctatgtcgataaatggtggccggatgctggttttcgtgctccgagccggccaccaggaagaagacctgcctgcccttgtgggtgcagcgttgttagaatgacctacggtgtatttgactttgacaggcctgctgcctagtggactgatattctgttatgcgcaaagctatttggcttgatgtctcagaatattcttaatttgcgtcgtcttttaagtctatcacgatgacgcagaccacatttatttttcaacactgctatatggtgatgataccatctttcaaaaagctcattcaaagcgacg

SEQ ID NO: 216929 - DNA, 987 bp, Zea Mays
cacgatgctgtgctgtctcctgtaatgcatggtaccttgctgagttcaagtctggtgcagagaggaaggatgctgcggagagcaccatgaatgcctacaaagctgctcaggacattgctcttgcagatctggctccaacccaccccatcaggcttggcctcgctctcaacttctcagtgttctactacgagatcctgaactcccctgatcgcgcctgcaaccttgcaaaacagttggacatgacggtcttcatacagtacttgagatgacagatgcattccctatgcaacgaagccttcgatgaggcgatctctgagctagacagcctgggagaggagtcctacaaggacagcactctgatcatgcagctcctgcgcgacaacttgaccctatggacttccgacaccaacgaggatggcggcgacgagatcaaggatgctgctgccccgaaagaatccgcggagggtcagtaagatggattcagtctcacgacctgctgctgctgatgttgaggagtgaccagaaccagaaccgccgtcctcgattctgatagattatcttctagtataccttgtgttgttgctgttgttgtcgtcgtcgcgccggtgtatgcgatgaagctgccattgctgctgttttaattaagcattctagatgttataccgcatgctttgtttcggtttctatgtcgataaatggtggccggatgctggttttcgtgctccgagccggccaccaggaagaagacctgcctgcccttgtgggtgcagcgttgttagaatgacctacggtgtatttgactttgacaggcctgctgcctagtggactgatattctgttatgcgcaaagctatttggcttgatgtctcagaatattcttaatttgcgtcgtcttttaagtctatcacgatgacgcagaccacatttatttttcaacactgctatatggtgatgataccatctttcaaaaagctcattcaaagcgacg

SEQ ID NO: 216930 - DNA, 4009 bp, Zea Mays
aacatttatgttcaaactgaaagggaaagcaatgtttagccttggagcatacgcatcttctccttagctgccattctttgtgtatttggtgtccttccgctgaattattttggacaagatatgcatcatgtccggattccttcagcatcattagagacatttacaataggaaatgtggaagaaagatcaagatggctctgggtccattgcgtcgtactgtacatcatctctgctgtagcttgcattcttctatacttggagtacaagcacattgccaggctgaggttatatcacatttctagagcaacaagcaatcctagccattttactatccttgtccgaggaattccaaaatcaagtacagagtcattcagcaggacagttgaaagtttctttaccaagtaccatgcatcaagttacctatctcatcaagtcgtttacaaagttgggaaagttcagaagatagtgagtggtgcaaagaaggtttacaggaagttcagacatttcaagggtgcgacagttgatcggagatgcagacccattagatttcaatgctgtttttgtggagcttcttctaattcattccagttgttgcctagtgattacgagcaagagagtgaaaagtctgatgtgaatgaatcaagctcgagcttacctgatgaggaatgtggtgctgcttttgtgtttttcaaaactcggtatgcagcgctagttgtagccaaaattctgcagacatcgaaccctatgagatgggtcactactttggctcctgagcctgatgacatatattggtctaatctttggttaccctacaagcaactctggattcggcacatagtcacacttatgtgttctatcgttttcatggttgtattccttataccagtgacatttatacaaggtttaactcagctggagcaactgcagcaaaggctcccttttctgagaggaatattgaaaaagaaatacatgacccagctgataactggatatctccccagtgtcatcttgcaaatatttttatatactgttcccccgaccatgatgtttttttctactttggaggggcctatctctcacagtgaaagaaagaaaagtgcctgctgtaaagtattatacttcaccatttggaatgtcttctttgtcaatgtcttatcgggttcagcaattagccaactgaatgctttatcaagcccaaaggacattcctatgcagcttgctaaagcagtacctgtgcaggctacattctttactacctatgttcttacttcaggatgggctagtctatcatcagaacttatgcaactctttggtcttacatggaactttttaagaagatatcttctgagaattaaggaggatagtgattttctttactcatttccctatcacactgaaatgccaaaagttctgctgtttggactgctgggtttcacatgctctgtactagcacctctaatcttgccctttttactgctgtacttttttcttggctacgtcgtctaccgcaaccagttcctcaatgtttactgcacaaaatacgacacaggcggtcaatattggccaattgcgcacaatactacaatattctctctaatcctcactcagatcatctgtcttggtgtgtttggccttaaagaatcccctgtagctgctggcttcactgtcccgcttatcatctttactcttctattcaatcagtattgcagaaagcgtcatctcccattgttcaagactttccctgcacagaatttgattgacatggacaaggaagatcagcaatcagacacaacggaggaccttcatgaacgacttcattctgcctactttcagttccctgataccgacgaggtacctttggaaagagttcgcgttagtgtcggcagagacgaagacgggagcggcagttcaggtgaatcaagccgcaaggaaagcgccgaagacgaacacaagagtggcctctcccacccgacgctggatgggctcccggttagtcggttacgcaacgcggtgagatcacttgggtccgttttgagaccgcagaggagacagttaccagtatagcacatttcctttaaccgcccatgtaaattcaaggtcgacagaccacacacacagatcattgatagcgcgtacagggagaggaaggtacacagacagaaatggaagagagtataccacccgtttgcaagggtagaaaattttgatgtgtcaattgatacttgatgaatggcttttcaggtcattccttttcaattgatcgattcttgaaatattcaggctggcccctctggtgatatgtaccccttcgccttttaaaagacttgctggaaacagcggcgatgcaccattattctttcccaccatcacacaacaaaatgataagtatttttttcgagctcgcaagagaagtattgtatttagagattaggaaaaaagagcaaaaaaaagagagacaaatataaccgtacacaatcgcacatcccctacaccagaggtaacatgcgcgggctcaaatcacaggatggtgcagacagacgtggacgaaggcccctccgcggcggccgccttgtcgccggccggggcaacgcccggccaatcgcggcaggcgcagtgctggccctggggaatctggcggtgcacggaggcgacgtggcggccgcagcccgcccacgtggacttgccgcacgacccgcacttcacctggtagcacatggctgatggctcccgctggcttcgcccctctagctgaagcttccccctcgactcgaagtcgaagcgaaggtatctgaagaaatctgggtcgatgtggacgatgtctccgaggccggcggagctggttaccttttgacctgcaaaaccgatgcttggagagggggcctagtcgcctagggaagataacgatccggctggcctatgctgtattgccgtcacatgagatgtgaggcacagctcatcgcttacctcacccaagcagtgagccaaattggcttatctttcattctattatattttagtttctaacttactaaataataaaattaaaatttttgtatttagtaattttaagattaaaatagaatgagatagagaaactaaaaattaaaccctaaaaatcaaacaccgtacccttaccgccgtaaaccttatcgacactcgtgtaagtgcgttgaccttcgaagacaaatggcccgtcctgcgattactgatccgatcaaagtctttcaagtccggcaacctctaccatcgatccatcgtccaaccaaaacgtgtcgacaactcaaaattggacccaacccgatcgatctatacgaaattttttgacccgactattaatttttgatccacgacaatctatagcgggtatgaaccatgattttgatccaaaacccgactcaaatccggaaaaaaaaagatcaaaagccaaaaatccactcagacccgaaaaacacgacccaacggggattgatatgctcaaacggggcaacgatggatgaccacacgttcgttcgacacggcgggttccgatcctcagggaacagaacaccacgcggtgggcggcgcgaacctcactgcgcagcgccgccctgcgcgggagtggaggcggcggtgccggagtccttcccagcgtcgtcagcggcgctggcggccttcttgacgccggccggggcggtggcggggtcgacgccgggccagtcgcggcaggcgcagtgctggccctccgagatctgcgcgtgcaccgacgcgacgtggcggccgcacccggcccacgtggtcttgccgcaggtgccgcacctcacctggtagcacatggcgtcggacggtggcttcgctgagagactctcgactctgcctctgctcctgatggggtccggtccggatgggaagctcgatgggttgtggtggtcaggtgctgtggctgcctgccttgtgggtggatgacggttggaactgatcatttatagaaggcccattgccgtctaccactgctttcgcccctcgctcggtc

SEQ ID NO: 216931 - DNA, 916 bp, Zea Mays
ctgatgcgttgggtgctagaaattggcctaatcccacgtcggagcccaaccagatccgcgggttcgctacgccgtggtcagcattgttggtgccccctcactgattaacagtgtgttcagctttcgagcaaacgaagatttcctccagaatgatatcagagtaaagccaggtcttgatgccctgggtgctcttggtgatgctgggtggtactgcatccgtgcaatcctgtgggctgttgactacgagttgcccaagactgtgatcgcactgcgtgaccctgtaaagaaccaagctggagtgcttcttgcctgcggcgcgacattgtactggtcggacggcaagactgccaccttcagctgctctttcctcaccaatctcaccatggacatcaccttagttggcacaaacggaactgtctatgtcactgactttgtcatcccatacgaagagaagtcggcggagttcccggtggcttcgaagtcgaacttcgctgagctccacgttgggtgggatcctctgccaagcaagcacgtcgtggcaacagacctgccacaggaggcccttatggtccaggaattcgcgaggcttgtgcagaacatccgggatgctgggggcaagcctgagggcaagtggccggccatcaccaggaagacgcagctggttttggatgctgtgaaagcctccattgacaaagggtctgcgccagttgaggtggctagctaaatgcaacaaacgagtcgcttccgattctgaaggttttagctttagtttttacaccatggcgtggtttgtgcttgcttgatatatttacacatgctaaacttctgtattgtacatgaagtcagtaaaccgctaattctggtaatttgagaaggtttcgtcaggctgaaacgtataattcggatggtattttta

SEQ ID NO: 216932 - DNA, 5980 bp, Zea Mays
atggacgttgaaatgctgccgtacgggattatttcgacgtttcattgcttgagtgtccgtacttcgccgctaaacatggcgttgttaccgtgcgtgtacatgcagatggacggcgtcactctgcgccacctgctccgccccttcgccgcgcaggaggccgcggcggccggccgagtggcagcagcgccagagcagctgttcgcaagtcattcgaccctgcaatccgggccgcctccgagagtggggccgagcaatgagttgcttactcaagttccggggaactattgcactttcgatcttgcgccggacctcactcgggcaaatgcgagcaatgctgctggtaccattgattttactcgggctggtccctccagcagtgctgccactctgcccaagtatccgagacatggattgccagctagcagtagcaatgagcagtcctcttttggagcgcttttcccgaacagaagtgctaatggaatgggtatttttacttgtcaaagttcggctaacgaaggaatagcaaatgttggtgtgcagtttcaggactcaagtgtccatggactgcagaaattgccattcaaatcgatgactcatcagcatcctacactgcctggtgatcgaatccgtgtcacctgtatgaatgttggcggagagttttttgtgggcgaagctgggctttttggagttatctgcttgtgtcatcggttgcgaatgtctgtagctaaattctgcgagcatgctggaggaattccagaaaaagctggtgaaattgtctgcttggagaatggcatgagtattgcacaatggttcaaattctgcataggggtcggaggatctattgctaacaccaggtgggattggccggaatgggcacatatgaaaagttctccagaagagcacatattgaaaagtcttgcatcaagaaacagtggaacaggaaaaatggggttgttaagtagatatggaaaaatcactggacatatgaacaaaccggcttattccaatgatctgtccgttgagggtggagggcacactaatgttgagaagctagtaaacaggacagatgaaacatattacagaaagagtgttgatgtgcatgaaacttttacaaagaactctgctttacttcagaattccgctgtggtgaatttagggcccgctaaaaaccatccagttcatgcattcgacttgaacccacttaccactcctagtggaagcccacactttgaagcaagcatgggaagacattacaatggaaatcatttggcccatagtcatggaatccatttggagaaaaactttgatgcgtcattttgtaatcctatgccacgttttacaggagttatgaaccatgatagtagggcgtgcagaccaaatttctccaataaaacattccaggacactttgagcaatgcttcaaacactgaattaaagcttgggcaatcttcttatcatcaatctatgactactctttccccattggggcaatcaacgatgattgaatttcagaaaccccaaacacataggcctccgataaatcaaaatccttctccaaagcaagcaacaaagatcagcaaaagtctatccgaacataatgaaccatccattagtaccggaaataagaagcaaccacttgaagttgttaatggcatgaagcgttctgaaggtgatgagcttacagatgatacatccaagaattcatttatctcattatttctttcacaccttgagaggaataatacacccgaacccatcgatgacattctcaacagtaatgagcactatcttcctaaggccctggatgttgcatgtggttctgatcatccagaaagtgccactagacagattgaaacaagggtgcctaatgataagcactcaaagttggcctcagccattgttcatacgaaaaggagatcagagggcatttctctttcagtggcttcttctggatataatcctcaagatgcatcccatgctaatagtcaggaacacttgattcatggtgattccttgtcacatttgctgcctagtcaacctaacaccggaatctcgaaaatttctgcaagggtttcatgtcatgcaaattgcatgagctgcattcacgtgggtaataaatcccatcaggttgcacatggtgagattggggttccctgtttctatgataaaatggccaggggccatggtacttttgagcgagttgatgactgcacacatagaagtttgagagctttcacaaaaatcagttgcgataatgggaaatcttgttgttcttctcgtgagcttctacctagcttttgccaaaatgatcagccaacattgggaaaatcgatttgtggatgctgttgcaaaattcaggaagatgcttccaagcttggttttatacctggtcacatgtgcagaactcatttttctagtgatgttggtccagttctagccaataagcctactattgaagggctagatgaattttgtgcttgcagttgctccacttttacacaacgatcatcattatgttctcgggaatacgtcttgcagtcttcctgtgactcatgtcccattaatggactgcactgcagaagttgtatgggacatgcagcagatagcttaacaaaacactctctgtttgatcctcttaatacaaaagaacgaggttcttgttgcaatggaagatgctgctactctgtagtcccaaaatgtttgtctagttgtgactttacaaaacactgtgatgtcataattgaccaaataggtcatgctgcacctaaagataaccatcagctgcaaatgcctaccagatgctgcacactgggggagaatgagaagttaatatgccaatgcttaagcaataaaatagctgtaagaaacttgcctcaaacttctcattgtaaagatgtctctgagaaagtaatgaaccagccttctattgctataacggagagactggagaatgtatcagaaccttcagtggctgatgacagttcatccaaagctgtagcagagaaaaaggatgcttatagagattctgcagtatctaaaggacagccaaattttggtttctcatctgggtcgtccagcattatagtgacaaagttccagaaatcacctgaatttaacaatgtatcctctactgctaaacatagcaaacataaaaatctgtgtgatgaaggatcaagaattgagaaaagttcagcatccagctatgtgcctaccagtacaggatgtgaagaacccctaaatagttctgccaaatctgagctgggtccatcaagagtgaagcgcaaatgtaatcagatttctgagggaaggagactggaagaaacagataatgaggaacattgttctgaactgctaaaaaagactagaacactgaggtgctctgttaaaggttctgaatcagatgattgtactagggctagttcccagtcgtcccagaagggggtttatcaaccacaaaatgaggttaactcattttcttgcagggtgttgagaaccaagcgaaaacatcctattatgcatctaaataagcatgtgaaacagcttcacagacagaccaagttttttgaaggtgatgagcaaccagatgccaagggcaattttcttggtggattagattcctatgatagaaagaggcaagtagaggatatgagcactctggataaaacaagacatcaccaggaagggagtcgagcatttgtccgcaaacttcctaaatatgtgtctctgaattgcattgttaatgaaccgaatactaacagtgaaggtgcttgcagtgggagtggtgggattgattctagtttaattgctacagggattacaaacgataacaggaaatctcccaaaattgttcctctcaatctggttcttaaaaaggctaagagatgcaatgctgttaaactccgtaagacagaaagcacccacttgtatgaggagaaaagctcagattgttctgtgaacagctcagattattctatagaaaagtattccgttgatgatgaaaattgcagcccacaagctgaatatgaactgcaggattccaaaaggagtaggtattcatctaatgatctgaggtcacatgtggctctccacaaaagaacatctggtgtcattggagaagatgactctcttggtctaacagatgtggaaataaattgcctgtcaatatcatcatcaagtaatggaaccaagaatcgaagaacaagtgtatcccttgccaggattaagaaattcgggagcaaatcagtatgctattctggcagtgacaaagacaatgctgtgctagcccatgaagtgaatgctaggagatacagtggaagactcagctcaaattctccatgctgtgtttgtgggatctcagacctggagccttgcaatcgattaatagagtgcagcaagtgctatatcaaagtgcaccaagcctgctatggtgtactaaaagttcctaggggtcaatggttttgcagaccgtgcaagaataataccatggatacagtctgtgtgctgtgtggttatggaggtggagctatgacaagggcactgaaaaccaagaatattttgaaaagtttgctccaaggtttgatgaatttagaaaggtcagaatattatgttgattccttaggaaatgcaagcagtgagtgtacaagcttgcaaaatccagtagacagtgcacatggggataacattatgaatgcgaagaacatcaccagcaattcctggacctctggaaaatactattcgagtttacttggaccacaaccaatgcagtgggttcacatggtctgtgggctgtggacacctggcacaaaatgcccaaatgacaccacaatgagcgcttttgatgtttcaggtgcttcacctgccaagagaaatactgcatgttcaatatgtgacagaactgggggctcatttgtcaagtgccgagctgtaaattgtttggtattctttcatgcttggtgtgcacatcagaggggtttgctgcaaagtgagcctgaaggcgagcacaatgaaaatattggcttttatgggcgatgcgtgtctcacgccattgttttttctagtcacgttaatcctaagaaagaatactttagaaacaacaattggacatgtgcacgtacagagggttttaaaggccgaaagggagaaggcttttctgatagtagccataaaaaatatgaagagtacagtggcgagttcggtgtttcccaagaacagataaatgcttggttacgcataaatggttcaaagccctgcggacgaggacagaaggagtacatccattacaagcagttaaaagggtggaagcatttggttgtttacaaatctggcatacatggacttggtctctacacatcagtctttattccacgcggctctatggttgtagaatatgtgggtgaaattgttgggcaacgggttgctgacagaagagagatcgaataccagtccgggaaacggcaacaatataagagtgcatgttatttctttaagattgacagggagcatattattgatgccacccgcaaaggtgggattgcaagattcgtcaatcattcatgccagccaaactgcgttgcgaaaataatctcagtcaggaatgagaagaagaacggcacataaacccaggggaggaaattacgtacgattaccacttcaaccgggaagatgaaggccagaggatcctttgcttttgtagatcaagatactgcaggcggtacctcaattagtttccggtgggcgtaacatgtctatatataacttatatatctatatgtatatcttatatatttacaaattacaattgcgattcatgcctgctgtatatgtaggaacttgcatctagaactgcctgtttatcttttgtgaagtcaaatgagttatcagctgttcatgtgacactgaagtttcttgtcgggcaaatgctcactgggggagagaaaagctgatgtgcattcaaggaatcaatgggaagtaggctccaatc

SEQ ID NO: 216933 - DNA, 4717 bp, Zea Mays
atggacgttgaaatgctgccgtacgggattatttcgacgtttcattgcttgagtgtccgtacttcgccgctaaacatggcgttgttaccgtgcgtgtacatgcagatggacggcgtcactctgcgccacctgctccgccccttcgccgcgcaggaggccgcggcggccggccgagtggcagcagcgccagagcagctgttcgcaagtcattcgaccctgcaatccgggccgcctccgagagtggggccgagcaatgagttgcttactcaagttccggggaactattgcactttcgatcttgcgccggacctcactcgggcaaatgcgagcaatgctgctggtaccattgattttactcgggctggtccctccagcagtgctgccactctgcccaagtatccgagacatggattgccagctagcagtagcaatgagcagtcctcttttggagcgcttttcccgaacagaagtgctaatggaatgggtatttttacttgtcaaagttcggctaacgaaggaatagcaaatgttggtgtgcagtttcaggactcaagtgtccatggactgcagaaattgccattcaaatcgatgactcatcagcatcctacactgcctggtgatcgaatccgtgtcacctgtatgaatgttggcggagagttttttgtgggcgaagctgggctttttggagttatctgcttgtgtcatcggttgcgaatgtctgtagctaaattctgcgagcatgctggaggaattccagaaaaagctggtgaaattgtctgcttggagaatggcatgagtattgcacaatggttcaaattctgcataggggccaggggccatggtacttttgagcgagttgatgactgcacacatagaagtttgagagctttcacaaaaatcagttgcgataatgggaaatcttgttgttcttctcgtgagcttctacctagcttttgccaaaatgatcagccaacattgggaaaatcgatttgtggatgctgttgcaaaattcaggaagatgcttccaagcttggttttatacctggtcacatgtgcagaactcatttttctagtgatgttggtccagttctagccaataagcctactattgaagggctagatgaattttgtgcttgcagttgctccacttttacacaacgatcatcattatgttctcgggaatacgtcttgcagtcttcctgtgactcatgtcccattaatggactgcactgcagaagttgtatgggacatgcagcagatagcttaacaaaacactctctgtttgatcctcttaatacaaaagaacgaggttcttgttgcaatggaagatgctgctactctgtagtcccaaaatgtttgtctagttgtgactttacaaaacactgtgatgtcataattgaccaaataggtcatgctgcacctaaagataaccatcagctgcaaatgcctaccagatgctgcacactgggggagaatgagaagttaatatgccaatgcttaagcaataaaatagctgtaagaaacttgcctcaaacttctcattgtaaagatgtctctgagaaagtaatgaaccagccttctattgctataacggagagactggagaatgtatcagaaccttcagtggctgatgacagttcatccaaagctgtagcagagaaaaaggatgcttatagagattctgcagtatctaaaggacagccaaattttggtttctcatctgggtcgtccagcattatagtgacaaagttccagaaatcacctgaatttaacaatgtatcctctactgctaaacatagcaaacataaaaatctgtgtgatgaaggatcaagaattgagaaaagttcagcatccagctatgtgcctaccagtacaggatgtgaagaacccctaaatagttctgccaaatctgagctgggtccatcaagagtgaagcgcaaatgtaatcagatttctgagggaaggagactggaagaaacagataatgaggaacattgttctgaactgctaaaaaagactagaacactgaggtgctctgttaaaggttctgaatcagatgattgtactagggctagttcccagtcgtcccagaagggggtttatcaaccacaaaatgaggttaactcattttcttgcagggtgttgagaaccaagcgaaaacatcctattatgcatctaaataagcatgtgaaacagcttcacagacagaccaagttttttgaaggtgatgagcaaccagatgccaagggcaattttcttggtggattagattcctatgatagaaagaggcaagtagaggatatgagcactctggataaaacaagacatcaccaggaagggagtcgagcatttgtccgcaaacttcctaaatatgtgtctctgaattgcattgttaatgaaccgaatactaacagtgaaggtgcttgcagtgggagtggtgggattgattctagtttaattgctacagggattacaaacgataacaggaaatctcccaaaattgttcctctcaatctggttcttaaaaaggctaagagatgcaatgctgttaaactccgtaagacagaaagcacccacttgtatgaggagaaaagctcagattgttctgtgaacagctcagattattctatagaaaagtattccgttgatgatgaaaattgcagcccacaagctgaatatgaactgcaggattccaaaaggagtaggtattcatctaatgatctgaggtcacatgtggctctccacaaaagaacatctggtggaaccaagaatcgaagaacaagtgtatcccttgccaggattaagaaattcgggagcaaatcagtatgctattctggcagtgacaaagacaatgctgtgctagcccatgaagtgaatgctaggagatacagtggaagactcagctcaaattctccatgctgtgtttgtgggatctcagacctggagccttgcaatcgattaatagagtgcagcaagtgctatatcaaagtgcaccaagcctgctatggtgtactaaaagttcctaggggtcaatggttttgcagaccgtgcaagaataataccatggatacagtctgtgtgctgtgtggttatggaggtggagctatgacaagggcactgaaaaccaagaatattttgaaaagtttgctccaaggtttgatgaatttagaaaggtcagaatattatgttgattccttaggaaatgcaagcagtgagtgtacaagcttgcaaaatccagtagacagtgcacatggggataacattatgaatgcgaagaacatcaccagcaattcctggacctctggaaaatactattcgagtttacttggaccacaaccaatgcagtgggttcacatggtctgtgggctgtggacacctggcacaaaatgcccaaatgacaccacaatgagcgcttttgatgtttcaggtgcttcacctgccaagagaaatactgcatgttcaatatgtgacagaactgggggctcatttgtcaagtgccgagctgtaaattgtttggtattctttcatgcttggtgtgcacatcagaggggtttgctgcaaagtgagcctgaaggcgagcacaatgaaaatattggcttttatgggcgatgcgtgtctcacgccattgttttttctagtcacgttaatcctaagaaagaatactttagaaacaacaattggacatgtgcacgtacagagggttttaaaggccgaaagggagaaggcttttctgatagtagccataaaaaatatgaagagtacagtggcgagttcggtgtttcccaagaacagataaatgcttggttacgcataaatggttcaaagccctgcggacgaggacagaaggagtacatccattacaagcagttaaaagggtggaagcatttggttgtttacaaatctggcatacatggacttggtctctacacatcagtctttattccacgcggctctatggttgtagaatatgtgggtgaaattgttgggcaacgggttgctgacagaagagagatcgaataccagtccgggaaacggcaacaatataagagtgcatgttatttctttaagattgacagggagcatattattgatgccacccgcaaaggtgggattgcaagattcgtcaatcattcatgccagccaaactgcgttgcgaaaataatctcagtcaggaatgagaagaaggtaatgttctttgcagaacggcacataaacccaggggaggaaattacgtacgattaccacttcaaccgggaagatgaaggccagaggatcctttgcttttgtagatcaagatactgcaggcggtacctcaattagtttccggtgggcgtaacatgtctatatataacttatatatctatatgtatatcttatatatttacaaattacaattgcgattcatgcctgctgtatatgtaggaacttgcatctagaactgcctgtttatcttttgtgaagtcaaatgagttatcagctgttcatgtgacactgaataacaaaagcataaaaagtgtcactatctcgtttatgagaaatcatgcgcctaatctgaatgatggatgatccagtgatctactttggcaagaagggcttgaggtcagacttgtccacctgaagctttgttgagatggcctcgatctgctgattcctgcaaatccaagagccatccatctttgggaaacagaatatataaaaaaaaatgaccaataacaga

SEQ ID NO: 216934 - DNA, 6013 bp, Zea Mays
cgtggcccgcgcggtggcctccgccggtgccaccgctgcccagccagatggacggcgtcactctgcgccacctgctccgccccttcgccgcgcaggaggccgcggcggccggccgagtggcagcagcgccagagcagctgttcgcaagtcattcgaccctgcaatccgggccgcctccgagagtggggccgagcaatgagttgcttactcaagttccggggaactattgcactttcgatcttgcgccggacctcactcgggcaaatgcgagcaatgctgctggtaccattgattttactcgggctggtccctccagcagtgctgccactctgcccaagtatccgagacatggattgccagctagcagtagcaatgagcagtcctcttttggagcgcttttcccgaacagaagtgctaatggaatgggtatttttacttgtcaaagttcggctaacgaaggaatagcaaatgttggtgtgcagtttcaggactcaagtgtccatggactgcagaaattgccattcaaatcgatgactcatcagcatcctacactgcctggtgatcgaatccgtgtcacctgtatgaatgttggcggagagttttttgtgggcgaagctgggctttttggagttatctgcttgtgtcatcggttgcgaatgtctgtagctaaattctgcgagcatgctggaggaattccagaaaaagctggtgaaattgtctgcttggagaatggcatgagtattgcacaatggttcaaattctgcatagggctttttctttgtcggaggatctattgctaacaccaggtgggattggccggaatgggcacatatgaaaagttctccagaagagcacatattgaaaagtcttgcatcaagaaacagtggaacaggaaaaatggggttgttaagtagatatggaaaaatcactggacatatgaacaaaccggcttattccaatgatctgtccgttgagggtggagggcacactaatgttgagaagctagtaaacaggacagatgaaacatattacagaaagagtgttgatgtgcatgaaacttttacaaagaactctgctttacttcagaattccgctgtggtgaatttagggcccgctaaaaaccatccagttcatgcattcgacttgaacccacttaccactcctagtggaagcccacactttgaagcaagcatgggaagacattacaatggaaatcatttggcccatagtcatggaatccatttggagaaaaactttgatgcgtcattttgtaatcctatgccacgttttacaggagttatgaaccatgatagtagggcgtgcagaccaaatttctccaataaaacattccaggacactttgagcaatgcttcaaacactgaattaaagcttgggcaatcttcttatcatcaatctatgactactctttccccattggggcaatcaacgatgattgaatttcagaaaccccaaacacataggcctccgataaatcaaaatccttctccaaagcaagcaacaaagatcagcaaaagtctatccgaacataatgaaccatccattagtaccggaaataagaagcaaccacttgaagttgttaatggcatgaagcgttctgaaggtgatgagcttacagatgatacatccaagaattcatttatctcattatttctttcacaccttgagaggaataatacacccgaacccatcgatgacattctcaacagtaatgagcactatcttcctaaggccctggatgttgcatgtggttctgatcatccagaaagtgccactagacagattgaaacaagggtgcctaatgataagcactcaaagttggcctcagccattgttcatacgaaaaggagatcagagggcatttctctttcagtggcttcttctggatataatcctcaagatgcatcccatgctaatagtcaggaacacttgattcatggtgattccttgtcacatttgctgcctagtcaacctaacaccggaatctcgaaaatttctgcaagggtttcatgtcatgcaaattgcatgagctgcattcacgtgggtaataaatcccatcaggttgcacatggtgagattggggttccctgtttctatgataaaatggccaggggccatggtacttttgagcgagttgatgactgcacacatagaagtttgagagctttcacaaaaatcagttgcgataatgggaaatcttgttgttcttctcgtgagcttctacctagcttttgccaaaatgatcagccaacattgggaaaatcgatttgtggatgctgttgcaaaattcaggaagatgcttccaagcttggttttatacctggtcacatgtgcagaactcatttttctagtgatgttggtccagttctagccaataagcctactattgaagggctagatgaattttgtgcttgcagttgctccacttttacacaacgatcatcattatgttctcgggaatacgtcttgcagtcttcctgtgactcatgtcccattaatggactgcactgcagaagttgtatgggacatgcagcagatagcttaacaaaacactctctgtttgatcctcttaatacaaaagaacgaggttcttgttgcaatggaagatgctgctactctgtagtcccaaaatgtttgtctagttgtgactttacaaaacactgtgatgtcataattgaccaaataggtcatgctgcacctaaagataaccatcagctgcaaatgcctaccagatgctgcacactgggggagaatgagaagttaatatgccaatgcttaagcaataaaatagctgtaagaaacttgcctcaaacttctcattgtaaagatgtctctgagaaagtaatgaaccagccttctattgctataacggagagactggagaatgtatcagaaccttcagtggctgatgacagttcatccaaagctgtagcagagaaaaaggatgcttatagagattctgcagtatctaaaggacagccaaattttggtttctcatctgggtcgtccagcattatagtgacaaagttccagaaatcacctgaatttaacaatgtatcctctactgctaaacatagcaaacataaaaatctgtgtgatgaaggatcaagaattgagaaaagttcagcatccagctatgtgcctaccagtacaggatgtgaagaacccctaaatagttctgccaaatctgagctgggtccatcaagagtgaagcgcaaatgtaatcagatttctgagggaaggagactggaagaaacagataatgaggaacattgttctgaactgctaaaaaagactagaacactgaggtgctctgttaaaggttctgaatcagatgattgtactagggctagttcccagtcgtcccagaagggggtttatcaaccacaaaatgaggttaactcattttcttgcagggtgttgagaaccaagcgaaaacatcctattatgcatctaaataagcatgtgaaacagcttcacagacagaccaagttttttgaaggtgatgagcaaccagatgccaagggcaattttcttggtggattagattcctatgatagaaagaggcaagtagaggatatgagcactctggataaaacaagacatcaccaggaagggagtcgagcatttgtccgcaaacttcctaaatatgtgtctctgaattgcattgttaatgaaccgaatactaacagtgaaggtgcttgcagtgggagtggtgggattgattctagtttaattgctacagggattacaaacgataacaggaaatctcccaaaattgttcctctcaatctggttcttaaaaaggctaagagatgcaatgctgttaaactccgtaagacagaaagcacccacttgtatgaggagaaaagctcagattgttctgtgaacagctcagattattctatagaaaagtattccgttgatgatgaaaattgcagcccacaagctgaatatgaactgcaggattccaaaaggagtaggtattcatctaatgatctgaggtcacatgtggctctccacaaaagaacatctggtggaaccaagaatcgaagaacaagtgtatcccttgccaggattaagaaattcgggagcaaatcagtatgctattctggcagtgacaaagacaatgctgtgctagcccatgaagtgaatgctaggagatacagtggaagactcagctcaaattctccatgctgtgtttgtgggatctcagacctggagccttgcaatcgattaatagagtgcagcaagtgctatatcaaagtgcaccaagcctgctatggtgtactaaaagttcctaggggtcaatggttttgcagaccgtgcaagaataataccatggatacagtctgtgtgctgtgtggttatggaggtggagctatgacaagggcactgaaaaccaagaatattttgaaaagtttgctccaaggtttgatgaatttagaaaggtcagaatattatgttgattccttaggaaatgcaagcagtgagtgtacaagcttgcaaaatccagtagacagtgcacatggggataacattatgaatgcgaagaacatcaccagcaattcctggacctctggaaaatactattcgagtttacttggaccacaaccaatgcagtgggttcacatggtctgtgggctgtggacacctggcacaaaatgcccaaatgacaccacaatgagcgcttttgatgtttcaggtgcttcacctgccaagagaaatactgcatgttcaatatgtgacagaactgggggctcatttgtcaagtgccgagctgtaaattgtttggtattctttcatgcttggtgtgcacatcagaggggtttgctgcaaagtgagcctgaaggcgagcacaatgaaaatattggcttttatgggcgatgcgtgtctcacgccattgttttttctagtcacgttaatcctaagaaagaatactttagaaacaacaattggacatgtgcacgtacagagggttttaaaggccgaaagggagaaggcttttctgatagtagccataaaaaatatgaagagtacagtggcgagttcggtgtttcccaagaacagataaatgcttggttacgcataaatggttcaaagccctgcggacgaggacagaaggagtacatccattacaagcagttaaaagggtggaagcatttggttgtttacaaatctggcatacatggacttggtctctacacatcagtctttattccacgcggctctatggttgtagaatatgtgggtgaaattgttgggcaacgggttgctgacagaagagagatcgaataccagtccgggaaacggcaacaatataagagtgcatgttatttctttaagattgacagggagcatattattgatgccacccgcaaaggtgggattgcaagattcgtcaatcattcatgccagccaaactgcgttgcgaaaataatctcagtcaggaatgagaagaaggtaatgttctttgcagaacggcacataaacccaggggaggaaattacgtacgattaccacttcaaccgggaagatgaaggccagaggatcctttgcttttgtagatcaagatactgcaggcggtacctcaattagtttccggtgggcgtaacatgtctatatataacttatatatctatatgtatatcttatatatttacaaattacaattgcgattcatgcctgctgtatatgtaggaacttgcatctagaactgcctgtttatcttttgtgaagtcaaatgagttatcagctgttcatgtgacactgaataacaaaagcataaaaagtgtcactatctcgtttatgagaaatcatgcgcctaatctgaatgatggatgatccagtgatctactttggcaagaagggcttgaggtcagacttgtccacctgaagctttgttgagatggcctcgatctgctgattcctgcaaatccaagagccatccatctttgggaaacagaatatataaaaaaaaatgaccaataacaga

SEQ ID NO: 216935 - DNA, 1821 bp, Zea Mays
gtttcagtacattgtttctttcctatcttcatttgatcatgtggaatgaaataatatagcaacacagaatcttctgatgatgttggcaaacaagagattagtgaactatcagatggagatgattttcatttctatgacacaaggcaaagtttcagtgaatttactacgactcctgctgacctgagaaagggatgtgtaaacaccggaaatgaagatcataaatctgttgaatcactgactgttgatgaggccgagaaatatatgctgtcacatccaaaaaggcgctcacagttgcctgagccaatagaaaaggagaaaggggttagcctttggtcaatgattaaagacaatgttggaaaggatctaacaagagtctgccttcctgtttacttcaatgagcctttatcttctctccagaagtgctttgaagagttggagtactcttatttgctggatcgtgcatatgaatgtggtttaagagggaatggtctgatgagaattatttatgtcgctgcatttgcggtctctggatatgcgtccacagattcccgcccctgcaaaccatttaatccattgcttggggaaacctatgaagctgattaccctgaaaaggggatccgtttcttctctgagaaggtcagtcatcatcctatggtcatggcatgtcactgtgaggggaaaggttggaaattttggggagacagcaatctaaagagcaaattctggggacaatccattcgactggatcctaatggtgtgctaactttagagtttgatgatggagaaactttccaatggagtaaggttacaacaacaattaacaaccttatccttggtcgagtatattgccatcaccatggcacaatgaacataagtgggaatagacgatattcatgcaaactgacgtttaaagagcagtctttccttgatcggaatcctcgccaggttcaaggagttgtcaacgatgctgatggaagcaaggtcgcaacattgatggggaagtgggatgaaagtatgcattatatcatcaacaatgatgcctccaagaccaactcccatggttcacatgagggttctggtgccactttgctatgggagaaaaacgagcctccagtcaatcccactcgctacaacttgtccacatttgcaataacattaaatgagttaacaccagagctcaaggagaagctgccaccaacggattcaaggctgagaccagatcaacgtcacctggagaatggggagtacgagaaggccaatgctgaaaaactgcgtctcgagacacggcagcggatggcaaggaagatgcaggagagtggctggaaaccaagatggttccaaagggacagcgaggatgggacataccgctacgtcggaggctactgggaggcaagggagcagagaacatgggttggctgcaatgacatatttggtaacttgtctagcagcccaaagctgccgccatccggtctcaacactagctcaagtatatagaggagctgacatcgcattaatcacttgggtttagctgtgagctaacatcacttgtggtacactgaatcatttgtcacattgaagccaaggacattcaagcttaacccaagcttttgtcgatactagaaagaacacgagaaatattgccaaaactattgttaaaagaattctttatgatatcattttcttctgcattgcacaaggacgttttgcatgtttggtgcttgtgttgtttgtctcgttggtgatgctgctcaaggttgttcaagaactagagcatcaggctgggcttcatattgtgatgctaaaatttgtaggaaattggtc

SEQ ID NO: 216936 - DNA, 2885 bp, Zea Mays
cgcattgcttacacaaaattcccgctcactgtcttacgcctccaaaaccctagcccgtgctcggccggcgacgaggatgcctggtatgccgacggacggtggcggcgcaatggtaccttttacaggggagcctggccaaggggcgcccccgccggcacccgtgcggccaatccgccacggcgtggcgccgcccatcttccgcatctacgtctcctggtccagcggcaaccttctgcaggtcgcgtgcctccgcccgccgaattcggacggtggcggcggcacggaggaggtcgttgggagtgtggtggaggtgaatctcggcgacggtggcagcggtggctcggaggccgaggagaaaattgacgaggcggagatgcggaggatcgagtacgggtcagtgccggccttcgcgctgctgcagagcaggaagaacaccctcgcagatgttgctactatgtcgcacgtgccctcagtccctgatcatgcagaatggtggcaatatgtgcttgaatacagcaaaaccattggcagtctccttgggaacccagacccttctggtttcatgattgaagaacccaagacaattcttaaggttagggagaaacccacaagtttaagggctgcttgggagttgctggagatattctatgttgataaacgtttgcaaggctggcttcctgagcgtcttgttgattggttagccgattttgacagcctgctgtcaacgatggcgagcacggtgtactctaagctcagcaatttccagaaaaaactcgttaacttacagattgttgaagacgatcctgattactggaatggtttgtcagcagcactttcggttggatggcttgatattgtggtgaatatgctacggtttcatggatcgtaccaattagatcagatggatagccgtgagacagaaaatggattggtcgaggctgttgctgttcttgtatcaatgatgccccgcatgagaccgaatttgccaactggtaaattaggccagtgctgcaaaacaagacctgattttatcaaggcatgggaaaagtggcgaggtcaagtaactaaactggagtgcagtgcattttggatccagtgcggccaccaaaaaacccgtgatggtttgaagaatttgcttcatattatgatggggaacataaaggaaattactgctgctacttcccattggctggagctgtttgcttctcattttctttacataaaaccatttactgtgggttttgaagggatgcaccatttagcacagaaatgcatacagcttatgccatcctctggcactaatggattaacaggcctcattatcggtgttatgtcagaaaatccagaggttgtcttggcagaatgcacaaaaaattttggcccttggctggtcacacatgctatggaacttctgacagctgataatgactatgcggatattatgttgcatgaagagcgacctaacttaggcggtataagcatagaggaacttcaccgattagtctatgctcaagttttatgttgtcatcctttaacttggcagcatggatccatccaatgataaataggaaataggttccaaccgagtgatcgcgccgacttatctgtcctcatgtctaaaccaaggcctaggactcttggagattctacttcttaagcaacccatacaagataattgcctagtactcaagactttggaaatttgccgattgtacgaactggagaatgttagtacaatcatcatgaagattgctggcatttatcgttggaagcatggacgaaaaggaactggtgtatactggttccagcaagctcgtgataaagtttgtcttgatagaattgctcaacagttattcgaacacattgggaagtcagtgacagacgatagttttaagcaatgggaagggctgctcgagctccttggttctgacattggtagtgcaggcggtcttgagttccttcacaggtaccgggatttcaagaggtctctgcaacaagctctagacagaaggtgtggtgaggctgctcgacaaactgtggattttttaatacagcttatgaaaaacccatccacacctcaacgtttctggctaccccttctacatgattcggtggagctacttaatagcaaactcagccctcttatggatgttgctgagacgacattgttgctcaacaagctgcaagagctgtcaatggccaagctgcgccctgatttttccagtaatcacctaccaagccatgcgatgagctctgtgagattggctctggcatcaaatctggcacgtgccgttcttgaagaccgtagtccaagcacactttagcacaggagtatgacgtccagtttgctggtggattgtgaccatgtttgcttggggcctcctgacaattcaaatgatcgggtttgagaaagattgaccatgtaacatacattgtactctgcttgcttgcttagtgcatttgtgtcgcgaatgcatgcatcatgctgagcgctgtggtttgaaggaaagaaataaaggatcgacatgttgcttgaaaacatctcttcacgggagcgttttcttgaaaaagaatataacaaaatggcctgaccagtcgattgcttttctccgtttgcaaacagtataagagcaacttcaagaggctctctatattatttctaatatatataaatatatatttaaaaaaaatacttttcaacaacttatctaaatatagccatattctattctggatttctcctagtcaaatatatagaatgtgaatgtgtctctagagtgtacacaagatatagaaacacggttagagattaaaaaaatatagaaaatggtttttatgtaaatgattctaaatgataatttatagtatgtttggtttaaagaatg

SEQ ID NO: 216937 - DNA, 8905 bp, Zea Mays
atgaggaccggcggcggcggcgcggtctggggcgggggagagagcagcgccttgggaggtccctgctcttgcgcgtgggaatgcagagggggcgagctcggctggcttcagatcccgacgacgctcggccatgacgagggagcagaggagggcgcaggatgggatttgaaattctctaggttacgttggctgcaattagcccttcattactcaatgattggtgatctagagcagtcactgaatttactcgctgaggttaatcttgcggaagaaggtgtattgcaactgctattggcatctattcataggttatctagtaggactggaagtgataatgaagccacagtgtcatccaaaccatttaaggcactctatttttgggtcatggaactttacaggttaatggttttagctgttcgctttgcaacaagaatgataaaatgttacgggttacagaagcaaaccacagacaataattcagtaaagcttcatgaaatggctctccttttgatggcaataagaagtatccagagccgagtctctgcaaagaatcagaattctgtttggatgggagatgataagagctcattgaaaataggtacagaagtatttcagcatgattcttcagttccagttgttgtactggatggtgtttcatcagggccatcgggtgggttagatactcatgacaggcaagagttggttcctgtgtgtgttcctgatagcaacagcatgttagctctaacaccagttgggtcatctcttagtgcttcaacttttcatgatattgatactaataaaaggactacccaagttggaagtcaaaattttcaaggaaatatcaaggagatgattaacagatgggaaatgaataactttgacttaaaaattgtagtcagagaagcactgcagtctggtcgcctacctttggcagttcttcagttgcagcttttgcgccagagggaattagtttccaatgattattctgaagatgctttctctgaagttcatgaaattggaaggtccattgtgtatgacctgttgatgaagggtgaaactggattggctgtagcaacactagaaaggctaggaaatgatgtagagtcggacctaagacaacttatgcaaggtactgtcaggaggtcactaaggctacaaattgctgacgagatgaagaagcgtgggtacataacaccagatgactggaagatgctagaaactataacactaattgagcgtctctaccctagcagcagcttctggaacacatacttttacagggagaatgtcattcgtgatgctgcaaaaattgttacactgccaggagacgataaacctgtattggctctaaatattcgcaaccaccccattattgaatgtggtgatgttgacggagcagtgcttggttcttgggtgaacattaatgattgcactaaggagttttctgggagcaacatttctgatggttattgggcctgtgctgctgtgtggtcggatgcttggggtccgagaactgtggaccgtatattgctggaccagccttatcatgtacatgctcatgtcccatgggaatctcagtttgaatattttgttgctcataatgatgtggggaaagtctgcgaactcctggacatgattcccaatagcatactttcagaagggattattagagtaaacgtgaacagtttacaagctcctgccaacactctttctgatttaacagtccctgattacaacatgtacatatgtgactcagaagagcttgaacctttctgtgtggagataccacatgttaaagtatttagatctttgtggaatcatgagtcaacattatatattcgaatggtaatgcagcaggaattggcaaagagacacatctttatgaaagagtattggcaaagtactactgaaattatacctttgcttgctcgtgctggcatacttataaaggttggtctaaaggaagaatgttctacaatattttctgcttcagagattccagatgatgcccatcaccagggccgtgaaggcgcactgcataagctaatcatacgtttctgtgtgcaatataacttgccatatctactggacctctatctggacacctgtaatttgactcctgataaggattgtatccgtttactcaaagaaaacacaggtgattgcaagtgggcacaatggttactcttctccaggatcaaaggttatgagtatgaggcatcattctctaatgcacgttggaatttgtcaaagaaaatggtcaataatagtaatcctacggctgttgagatagatgaaatgttgtatacagtagatgatatggcagaacgaattggtgaaatgtctgcattagctaccttgatgtatgcttcagcaccaattcagaaatccatatgtactggaagtgtgaacagaagtggttcgtcttcccagtgcacattggagaacctggctccttgtctccagcaatttccaacactatggaaaacccttttttcagcttgttttggccaagatgaatatgggtgtttaaactactctgctggtaatgcgtatggaaaaagatcaatttcagagtacttgagatggcgctatagcgttttttcctctgctggaggagacacttcgttgttgcaaatgcttccatgttgggtcccaaagtctgttagaagattaattcaactatttgaacagggcccttttggaatgcaacttctatcaactgccccatcatctgaagagttattcactcacggtgtctccaattatatatacaattctactggatataccgaagccaatgcactgtccttagaagcatcgatccaaaaaagtgttgaagaagaattatattcttcccttgaggagaaagatgtgagagtggaacaccatttgcaccgtggtcgagccttagctgctttcaggcatcttattgctaagagggcttcacagttgaaatcagctagtgcacgtcaagtgatatccgcacagtctaatgttcaagcagatgtacaattgatacttgctcctctaagtcaagttgaacgatcaattcttatatcggtggctccactagctattacaaactttgaggactcgactctagttgcttcctgtatattcttgttggaactttgtggcctgtgtgccaacatgcttcgtttagatattgctgcactacgacgcatctcttcctactacaagtcagttcaagaaaataaacatgttgatctatctccaccaaggggcccagagctccatgtgcagtcccatggagctggtatagctcctgctctagctcgagcgctagctgaagattatgtccagtctgatcatctgcatgttttggagcagactcaaacctcgatggctcccaagcgggaacagacacaatatcctcttatttctattctgcaacaccttgaaaaagcaagtttgccatcattggaggaaggtaaaacttgtgggttttggcttttgactggtgttggtgatgcatctctttaccggtcgcaacagaatgaagcaagtcaacactggaatttggttactgaattctgtcaggcacactatctcccactaagtacaaaatatcttgcattactggccaatgacaatgattgggttggttttttaacagaagctcagatagctggattttctattgaagctgttattgaagtggcagccaaagagatcagggattcaagactgagggcccacatactgactgttctaaaaaatatgatatcacttcgaaggaaatcatctggtaatgtaccttcaggaagcagtgatccatctttctcttctgttgatggcaataatcccatggaacttttctgcattcttggagtctgtgaaaagcaaaaaaaccctggggaggcactcctaattaaagcaaaacaaatgcagtggtctttgcttgccatgattgcctcatgctttccggatgtaactcctctcacatgcttaagtgtttggcttgagattacagccgcaagggagatgtcctcgatcaaggtggatgatgtttccttgaaaatagcaaagaatgttggatctgctgttgaagccacaaataaattgccaagcactagcagaaatgttgaatttcgttacaataggaagaatccaaagcgaagacggttcctggaagcgtcacatgaaaagttatgtttctcaatagatagcacatgtgggccagattctgctgcaacttccaatcctatcagtattgttgaccatcagggaataggaaagccaatctcaggagaaaccataatgtccgttgatattgatgaaaggcttgcatctttatcaaacatggtagcagtgctttgcgaacaacaactgtttctaccattacttagagcttttgaaatgtttttgccttcctgctcccttctttccttcattcgttctctccaggcattttctcaaatgcgtcttcccgaggcttctgcacgtttggcatccttttcagcaagaataaaagatgaagcctctcatactcaactaaactcttccaaagaagtgtcagtaatagcagaatgggtggccactacagctgtaaaagctgcagatgctgtcctttcaaactgttcatcaatttatgagaagaggtgtctactgcagcttctttcagcagtggattttgctgatggtggcacttcatcatcttactttagccgaagatattggaagattaatctgtctgaaccatctttgtgtaaagatactgatgtgtacaactggaatgatttgatggatgatgcttctcttttaacatcattagaaaaggacggtcaatgggagcaagctcgaacttgggcaagacatctggagtcaagtggcatagcttgggaatctactcttgatcatgtcactgaatcacaggcagaagccatggttgctgaatggaaggagtttctttgggatatcccacaagaacgtgcagccttgtggggtcactgtcaatctctctttatgagatattctttccctcctttaaaggctggattatttttccttaagcatgccgaagcagtaggaaaagagataccagcacaagagcttcatgaaatattattgctctctttacaatggctaagtggaactatgactaaatcctctccggtctatcctcttcatcttttgcgggaaattgagactagggtgtggctcctggctgttgagtcagagagtcaatccaaggttgatggtgaatttgccacttctgctgttgctcataacaaagctgttggaaacagtagcagtattatagaacatactgctgatatcatcacaaaaatagacagtaacatgagcttgccgcacatgaaaattacagaaaggaatagcacacgggacagtttatcataccaacatgtgcaactctttgagtctaacagtgaagcatcttcaacaacaataaataacacgcgagcaaagcgaaggatgaaaacaaattcaccacttaaacgaggtgtcaatgacaatattgaaagtagagctaatgagctggataacaattctaacactttacatagttcaaagattggtgaacaagctagaaatttgctctctgaagaggaatttgtaaagatggaagcatctttatctggttgggaacaaaatgttaggcctgtagatatggagaaggctgtgctctctttactggaatttgggcaaataactgctgctaagcaactccaacaaaagctgtctccatcatatattcctgaagaacttgtccttgttgatgttgctttaagaattgccaaaaacagcagtaatggagagatcaatttgtcatgctttgacacacaggctcttcggatacttcagtcactgagagtagcaaatagctgcgatatgattagcccatcacaggttatggagatactagctgcgaaatgtggtgagggtcgtgggcgagctcttattaggagaataataggagttgttcgaactgctagattattgggactcccattttccgaagcatttgagaaacaaccaattgaacttctacagttgctttccctgaaagctcaggattcttttgatgaagcgaaatttctagtggagacacacatcatgcctgcatctagcattgcaagaattctagctgattcgttcctaaaggtctgttcattgctcaggtttttacagtacacttgggtatgtgatattgcagtgctactgctgttccatgatatgctttcaatccttgataggggcttttggccgcacatcgtggaggctatttggattcccaaaaggaagagggtcctgcacctctattgtggagatcaagtgacttcttaaagtgggcaaaactatgtccatcagaatcagaaattggccatgctttgatgcgtttggtaatgactggacatgaagtaccacatgcttgtgaggttgaactcctaatattgtcgcaccacttctacatgtcatcttcttgtcttgatggagtggatgttctcgtcacatttgcagcaaatagagtggactcatatgttttagaggaggatttttcttgtttagctcgtttgatcactggagtgagcaatttccattccttgagcttcattctttcaatccttgtagagaatggccaattggagttgctgcttcaaaagtattctgccactgacacagccacagggacgcttgcatcggttcgaggatttaggatggctgttattacatcactgaaacagtttatcccgaatgatgacgacgctctctctatggtatacaagcactttgacatgaagcatgaagctgcttctctccttgaatcacgtgcagagcaatacatgaacagctggttatcacgatatgataaggaacggcgaaatgatgagcttctggacgctatgcatcatcttgtagagacagctgaggttctttcaactattgatgctggccaaagaacacatcgtgcttgtgcccgtgcttctcttctgtcacttcagatccgaataccagatcttttgtggattggtctttctgagaccaatgcccggcggatttttgtggaacaatctaggttccaggaagctcttattgttgctgaagcatacaacataaatcaacctatagaatgggccccagtcttttggaatcaaatgctaaaaccggatctaatcgagcaattcgtggctgagtttgtctcagtgctgcccctgcagccaccaatgcttctcgagcttgcaaggttttacagggcggaggttgcagccaggggggagcagtcacacttctctgtctggctttcacctggaggcttgcctgcagagtgggtgaaacatcttggtagatccttcaggagcctgctgcgtagaacaagggacatgaggctgaggctgcagttggcaactctggcgacaggcttcattgacgtccttgttatttgcaatagagttttggacaaagtcccggacaatgctggcccgctgatcctaaggaagggacatggtggagcataccttcctctcatgtagatatttcccttctctttttggtgcattggattcagaacttaattcttggcagttaggctatatattgaaaggcagatgaatcttgcaaatattatatgtatcagctttctttggttcagcatctttaaagtcaagcttggctgcagtcttggacatggattctcatcgatgatgccatgaaagacttttgtgattgtatgtgcagcattttgagcggaaaagctggcagaaatgggatttttgcagcttcatccggcaggtgttttcgcacccatgatatattgtatgttttgcatgggatcttgtcctggcaactgctgagatcaactcatcacaagttgaatctcagagctctatcggatacctgtactcaggcagtcttcaaaacgttttctactattccccgagtgaagtctttagcatggggatactgttctgatgcttttgatgactcaagttttaatgaaattctagtggtatcaagtgatgcttctatcacagtccatgcattctgccattctcgcaaaagcacactaacagttaattcaatgtctgatgctaaagagttgcatggggagtggaaagagtggcgccctactgaatgttcagtgttggaggatggtgagtcaggtccagataattggttttgttcttttcctaactacagtcactgcgtctgtttctaatggaaaaataccaagccagattgcccatgaaatctttattgcctaattcagcagaagttgtatcctttagcatatatgacattactctctctttcttgaaatattggtatagcaaatgttctctgaagactatggcggaaactgacagtgaatcaccacgacgttttcttagagcatcgtgcagttgtcagtgggagtgtctaaaagttttgtctagctcgtcatgttatttgatcggcttagttctgactcctaatgaatcagtacgttgtgaggcccatccatccaatgcggagtgtattttggttactgttctggagctaaaccactggggcatacagtggaactttgtggcagaccttcaggatgtatctgatggtattacgccaagtccaaaatgggttgattttcagttatcagatgtgtttcttgcctgccttaatacagcaggttttgttgccatttggaacgtgaaaactggtggtcttgtgacgtcattcagtgttcttcaacaatgcagaactgatctggagatgcctctgaggagctctatgtccattgtgacaaatttggacgagggaaatatccatgttgagaactttgttggcagaatgtttaagcggatgggatttgaaattctctaggttacgttggctgcaattagcccttcattactcaatgattggtgatctagagcagtaa

SEQ ID NO: 216938 - DNA, 8908 bp, Zea Mays
atgaggaccggcggcggcggcgcggtctggggcgggggagagagcagcgccttgggaggtccctgctcttgcgcgtgggaatgcagagggggcgagctcggctggcttcagatcccgacgacgctcggccatgacgagggagcagaggagggcgcaggatgggatttgaaattctctaggttacgttggctgcaattagcccttcattactcaatgattggtgatctagagcagtcactgaatttactcgctgaggttaatcttgcggaagaaggtgtattgcaactgctattggcatctattcataggttatctagtaggactggaagtgataatgaagccacagtgtcatccaaaccatttaaggcactctatttttgggtcatggaactttacaggttaatggttttagctgttcgctttgcaacaagaatgataaaatgttacgggttacagaagcaaaccacagacaataattcagtaaagcttcatgaaatggctctccttttgatggcaataagaagtatccagagccgagtctctgcaaagaatcagaattctgtttggatgcagggagatgataagagctcattgaaaataggtacagaagtatttcagcatgattcttcagttccagttgttgtactggatggtgtttcatcagggccatcgggtgggttagatactcatgacaggcaagagttggttcctgtgtgtgttcctgatagcaacagcatgttagctctaacaccagttgggtcatctcttagtgcttcaacttttcatgatattgatactaataaaaggactacccaagttggaagtcaaaattttcaaggaaatatcaaggagatgattaacagatgggaaatgaataactttgacttaaaaattgtagtcagagaagcactgcagtctggtcgcctacctttggcagttcttcagttgcagcttttgcgccagagggaattagtttccaatgattattctgaagatgctttctctgaagttcatgaaattggaaggtccattgtgtatgacctgttgatgaagggtgaaactggattggctgtagcaacactagaaaggctaggaaatgatgtagagtcggacctaagacaacttatgcaaggtactgtcaggaggtcactaaggctacaaattgctgacgagatgaagaagcgtgggtacataacaccagatgactggaagatgctagaaactataacactaattgagcgtctctaccctagcagcagcttctggaacacatacttttacagggagaatgtcattcgtgatgctgcaaaaattgttacactgccaggagacgataaacctgtattggctctaaatattcgcaaccaccccattattgaatgtggtgatgttgacggagcagtgcttggttcttgggtgaacattaatgattgcactaaggagttttctgggagcaacatttctgatggttattgggcctgtgctgctgtgtggtcggatgcttggggtccgagaactgtggaccgtatattgctggaccagccttatcatgtacatgctcatgtcccatgggaatctcagtttgaatattttgttgctcataatgatgtggggaaagtctgcgaactcctggacatgattcccaatagcatactttcagaagggattattagagtaaacgtgaacagtttacaagctcctgccaacactctttctgatttaacagtccctgattacaacatgtacatatgtgactcagaagagcttgaacctttctgtgtggagataccacatgttaaagtatttagatctttgtggaatcatgagtcaacattatatattcgaatggtaatgcagcaggaattggcaaagagacacatctttatgaaagagtattggcaaagtactactgaaattatacctttgcttgctcgtgctggcatacttataaaggttggtctaaaggaagaatgttctacaatattttctgcttcagagattccagatgatgcccatcaccagggccgtgaaggcgcactgcataagctaatcatacgtttctgtgtgcaatataacttgccatatctactggacctctatctggacacctgtaatttgactcctgataaggattgtatccgtttactcaaagaaaacacaggtgattgcaagtgggcacaatggttactcttctccaggatcaaaggttatgagtatgaggcatcattctctaatgcacgttggaatttgtcaaagaaaatggtcaataatagtaatcctacggctgttgagatagatgaaatgttgtatacagtagatgatatggcagaacgaattggtgaaatgtctgcattagctaccttgatgtatgcttcagcaccaattcagaaatccatatgtactggaagtgtgaacagaagtggttcgtcttcccagtgcacattggagaacctggctccttgtctccagcaatttccaacactatggaaaacccttttttcagcttgttttggccaagatgaatatgggtgtttaaactactctgctggtaatgcgtatggaaaaagatcaatttcagagtacttgagatggcgctatagcgttttttcctctgctggaggagacacttcgttgttgcaaatgcttccatgttgggtcccaaagtctgttagaagattaattcaactatttgaacagggcccttttggaatgcaacttctatcaactgccccatcatctgaagagttattcactcacggtgtctccaattatatatacaattctactggatataccgaagccaatgcactgtccttagaagcatcgatccaaaaaagtgttgaagaagaattatattcttcccttgaggagaaagatgtgagagtggaacaccatttgcaccgtggtcgagccttagctgctttcaggcatcttattgctaagagggcttcacagttgaaatcagctagtgcacgtcaagtgatatccgcacagtctaatgttcaagcagatgtacaattgatacttgctcctctaagtcaagttgaacgatcaattcttatatcggtggctccactagctattacaaactttgaggactcgactctagttgcttcctgtatattcttgttggaactttgtggcctgtgtgccaacatgcttcgtttagatattgctgcactacgacgcatctcttcctactacaagtcagttcaagaaaataaacatgttgatctatctccaccaaggggcccagagctccatgtgcagtcccatggagctggtatagctcctgctctagctcgagcgctagctgaagattatgtccagtctgatcatctgcatgttttggagcagactcaaacctcgatggctcccaagcgggaacagacacaatatcctcttatttctattctgcaacaccttgaaaaagcaagtttgccatcattggaggaaggtaaaacttgtgggttttggcttttgactggtgttggtgatgcatctctttaccggtcgcaacagaatgaagcaagtcaacactggaatttggttactgaattctgtcaggcacactatctcccactaagtacaaaatatcttgcattactggccaatgacaatgattgggttggttttttaacagaagctcagatagctggattttctattgaagctgttattgaagtggcagccaaagagatcagggattcaagactgagggcccacatactgactgttctaaaaaatatgatatcacttcgaaggaaatcatctggtaatgtaccttcaggaagcagtgatccatctttctcttctgttgatggcaataatcccatggaacttttctgcattcttggagtctgtgaaaagcaaaaaaaccctggggaggcactcctaattaaagcaaaacaaatgcagtggtctttgcttgccatgattgcctcatgctttccggatgtaactcctctcacatgcttaagtgtttggcttgagattacagccgcaagggagatgtcctcgatcaaggtggatgatgtttccttgaaaatagcaaagaatgttggatctgctgttgaagccacaaataaattgccaagcactagcagaaatgttgaatttcgttacaataggaagaatccaaagcgaagacggttcctggaagcgtcacatgaaaagttatgtttctcaatagatagcacatgtgggccagattctgctgcaacttccaatcctatcagtattgttgaccatcagggaataggaaagccaatctcaggagaaaccataatgtccgttgatattgatgaaaggcttgcatctttatcaaacatggtagcagtgctttgcgaacaacaactgtttctaccattacttagagcttttgaaatgtttttgccttcctgctcccttctttccttcattcgttctctccaggcattttctcaaatgcgtcttcccgaggcttctgcacgtttggcatccttttcagcaagaataaaagatgaagcctctcatactcaactaaactcttccaaagaagtgtcagtaatagcagaatgggtggccactacagctgtaaaagctgcagatgctgtcctttcaaactgttcatcaatttatgagaagaggtgtctactgcagcttctttcagcagtggattttgctgatggtggcacttcatcatcttactttagccgaagatattggaagattaatctgtctgaaccatctttgtgtaaagatactgatgtgtacaactggaatgatttgatggatgatgcttctcttttaacatcattagaaaaggacggtcaatgggagcaagctcgaacttgggcaagacatctggagtcaagtggcatagcttgggaatctactcttgatcatgtcactgaatcacaggcagaagccatggttgctgaatggaaggagtttctttgggatatcccacaagaacgtgcagccttgtggggtcactgtcaatctctctttatgagatattctttccctcctttaaaggctggattatttttccttaagcatgccgaagcagtaggaaaagagataccagcacaagagcttcatgaaatattattgctctctttacaatggctaagtggaactatgactaaatcctctccggtctatcctcttcatcttttgcgggaaattgagactagggtgtggctcctggctgttgagtcagagagtcaatccaaggttgatggtgaatttgccacttctgctgttgctcataacaaagctgttggaaacagtagcagtattatagaacatactgctgatatcatcacaaaaatagacagtaacatgagcttgccgcacatgaaaattacagaaaggaatagcacacgggacagtttatcataccaacatgtgcaactctttgagtctaacagtgaagcatcttcaacaacaataaataacacgcgagcaaagcgaaggatgaaaacaaattcaccacttaaacgaggtgtcaatgacaatattgaaagtagagctaatgagctggataacaattctaacactttacatagttcaaagattggtgaacaagctagaaatttgctctctgaagaggaatttgtaaagatggaagcatctttatctggttgggaacaaaatgttaggcctgtagatatggagaaggctgtgctctctttactggaatttgggcaaataactgctgctaagcaactccaacaaaagctgtctccatcatatattcctgaagaacttgtccttgttgatgttgctttaagaattgccaaaaacagcagtaatggagagatcaatttgtcatgctttgacacacaggctcttcggatacttcagtcactgagagtagcaaatagctgcgatatgattagcccatcacaggttatggagatactagctgcgaaatgtggtgagggtcgtgggcgagctcttattaggagaataataggagttgttcgaactgctagattattgggactcccattttccgaagcatttgagaaacaaccaattgaacttctacagttgctttccctgaaagctcaggattcttttgatgaagcgaaatttctagtggagacacacatcatgcctgcatctagcattgcaagaattctagctgattcgttcctaaaggtctgttcattgctcaggtttttacagtacacttgggtatgtgatattgcagtgctactgctgttccatgatatgctttcaatccttgataggggcttttggccgcacatcgtggaggctatttggattcccaaaaggaagagggtcctgcacctctattgtggagatcaagtgacttcttaaagtgggcaaaactatgtccatcagaatcagaaattggccatgctttgatgcgtttggtaatgactggacatgaagtaccacatgcttgtgaggttgaactcctaatattgtcgcaccacttctacatgtcatcttcttgtcttgatggagtggatgttctcgtcacatttgcagcaaatagagtggactcatatgttttagaggaggatttttcttgtttagctcgtttgatcactggagtgagcaatttccattccttgagcttcattctttcaatccttgtagagaatggccaattggagttgctgcttcaaaagtattctgccactgacacagccacagggacgcttgcatcggttcgaggatttaggatggctgttattacatcactgaaacagtttatcccgaatgatgacgacgctctctctatggtatacaagcactttgacatgaagcatgaagctgcttctctccttgaatcacgtgcagagcaatacatgaacagctggttatcacgatatgataaggaacggcgaaatgatgagcttctggacgctatgcatcatcttgtagagacagctgaggttctttcaactattgatgctggccaaagaacacatcgtgcttgtgcccgtgcttctcttctgtcacttcagatccgaataccagatcttttgtggattggtctttctgagaccaatgcccggcggatttttgtggaacaatctaggttccaggaagctcttattgttgctgaagcatacaacataaatcaacctatagaatgggccccagtcttttggaatcaaatgctaaaaccggatctaatcgagcaattcgtggctgagtttgtctcagtgctgcccctgcagccaccaatgcttctcgagcttgcaaggttttacagggcggaggttgcagccaggggggagcagtcacacttctctgtctggctttcacctggaggcttgcctgcagagtgggtgaaacatcttggtagatccttcaggagcctgctgcgtagaacaagggacatgaggctgaggctgcagttggcaactctggcgacaggcttcattgacgtccttgttatttgcaatagagttttggacaaagtcccggacaatgctggcccgctgatcctaaggaagggacatggtggagcataccttcctctcatgtagatatttcccttctctttttggtgcattggattcagaacttaattcttggcagttaggctatatattgaaaggcagatgaatcttgcaaatattatatgtatcagctttctttggttcagcatctttaaagtcaagcttggctgcagtcttggacatggattctcatcgatgatgccatgaaagacttttgtgattgtatgtgcagcattttgagcggaaaagctggcagaaatgggatttttgcagcttcatccggcaggtgttttcgcacccatgatatattgtatgttttgcatgggatcttgtcctggcaactgctgagatcaactcatcacaagttgaatctcagagctctatcggatacctgtactcaggcagtcttcaaaacgttttctactattccccgagtgaagtctttagcatggggatactgttctgatgcttttgatgactcaagttttaatgaaattctagtggtatcaagtgatgcttctatcacagtccatgcattctgccattctcgcaaaagcacactaacagttaattcaatgtctgatgctaaagagttgcatggggagtggaaagagtggcgccctactgaatgttcagtgttggaggatggtgagtcaggtccagataattggttttgttcttttcctaactacagtcactgcgtctgtttctaatggaaaaataccaagccagattgcccatgaaatctttattgcctaattcagcagaagttgtatcctttagcatatatgacattactctctctttcttgaaatattggtatagcaaatgttctctgaagactatggcggaaactgacagtgaatcaccacgacgttttcttagagcatcgtgcagttgtcagtgggagtgtctaaaagttttgtctagctcgtcatgttatttgatcggcttagttctgactcctaatgaatcagtacgttgtgaggcccatccatccaatgcggagtgtattttggttactgttctggagctaaaccactggggcatacagtggaactttgtggcagaccttcaggatgtatctgatggtattacgccaagtccaaaatgggttgattttcagttatcagatgtgtttcttgcctgccttaatacagcaggttttgttgccatttggaacgtgaaaactggtggtcttgtgacgtcattcagtgttcttcaacaatgcagaactgatctggagatgcctctgaggagctctatgtccattgtgacaaatttggacgagggaaatatccatgttgagaactttgttggcagaatgtttaagcggatgggatttgaaattctctaggttacgttggctgcaattagcccttcattactcaatgattggtgatctagagcagtaa

SEQ ID NO: 216939 - DNA, 8774 bp, Zea Mays
atgaggaccggcggcggcggcgcggtctggggcgggggagagagcagcgccttgggaggtccctgctcttgcgcgtgggaatgcagagggggcgagctcggctggcttcagatcccgacgacgctcggccatgacgagggagcagaggagggcgcaggatgggatttgaaattctctaggttacgttggctgcaattagcccttcattactcaatgattggtgatctagagcagtcactgaatttactcgctgaggttaatcttgcggaagaaggtgtattgcaactgctattggcatctattcataggttatctagtaggactggaagtgataatgaagccacagtgtcatccaagttaatggttttagctgttcgctttgcaacaagaatgataaaatgttacgggttacagaagcaaaccacagacaataattcagtaaagcttcatgaaatggctctccttttgatggcaataagaagtatccagagccgagtctctgcaaagaatcagaattctgtttggatgcagggagatgataagagctcattgaaaataggtacagaagtatttcagcatgattcttcagttccagttgttgtactggatggtgtttcatcagggccatcgggtgggttagatactcatgacaggcaagagttggttcctgtgtgtgttcctgatagcaacagcatgttagctctaacaccagttgggtcatctcttagtgcttcaacttttcatgatattgatactaataaaaggactacccaagttggaagtcaaaattttcaaggaaatatcaaggagatgattaacagatgggaaatgaataactttgacttaaaaattgtagtcagagaagcactgcagtctggtcgcctacctttggcagttcttcagttgcagcttttgcgccagagggaattagtttccaatgattattctgaagatgctttctctgaagttcatgaaattggaaggtccattgtgtatgacctgttgatgaagggtgaaactggattggctgtagcaacactagaaaggctaggaaatgatgtagagtcggacctaagacaacttatgcaaggtactgtcaggaggtcactaaggctacaaattgctgacgagatgaagaagcgtgggtacataacaccagatgactggaagatgctagaaactataacactaattgagcgtctctaccctagcagcagcttctggaacacatacttttacagggagaatgtcattcgtgatgctgcaaaaattgttacactgccaggagacgataaacctgtattggctctaaatattcgcaaccaccccattattgaatgtggtgatgttgacggagcagtgcttggttcttgggtgaacattaatgattgcactaaggagttttctgggagcaacatttctgatggttattgggcctgtgctgctgtgtggtcggatgcttggggtccgagaactgtggaccgtatattgctggaccagccttatcatgtacatgctcatgtcccatgggaatctcagtttgaatattttgttgctcataatgatgtggggaaagtctgcgaactcctggacatgattcccaatagcatactttcagaagggattattagagtaaacgtgaacagtttacaagctcctgccaacactctttctgatttaacagtccctgattacaacatgtacatatgtgactcagaagagcttgaacctttctgtgtggagataccacatgttaaagtatttagatctttgtggaatcatgagtcaacattatatattcgaatggtaatgcagcaggaattggcaaagagacacatctttatgaaagagtattggcaaagtactactgaaattatacctttgcttgctcgtgctggcatacttataaaggttggtctaaaggaagaatgttctacaatattttctgcttcagagattccagatgatgcccatcaccagggccgtgaaggcgcactgcataagctaatcatacgtttctgtgtgcaatataacttgccatatctactggacctctatctggacacctgtaatttgactcctgataaggattgtatccgtttactcaaagaaaacacaggtgattgcaagtgggcacaatggttactcttctccaggatcaaaggttatgagtatgaggcatcattctctaatgcacgttggaatttgtcaaagaaaatggtcaataatagtaatcctacggctgttgagatagatgaaatgttgtatacagtagatgatatggcagaacgaattggtgaaatgtctgcattagctaccttgatgtatgcttcagcaccaattcagaaatccatatgtactggaagtgtgaacagaagtggttcgtcttcccagtgcacattggagaacctggctccttgtctccagcaatttccaacactatggaaaacccttttttcagcttgttttggccaagatgaatatgggtgtttaaactactctgctggtaatgcgtatggaaaaagatcaatttcagagtacttgagatggcgctatagcgttttttcctctgctggaggagacacttcgttgttgcaaatgcttccatgttgggtcccaaagtctgttagaagattaattcaactatttgaacagggcccttttggaatgcaacttctatcaactgccccatcatctgaagagttattcactcacggtgtctccaattatatatacaattctactggatataccgaagccaatgcactgtccttagaagcatcgatccaaaaaagtgttgaagaagaattatattcttcccttgaggagaaagatgtgagagtggaacaccatttgcaccgtggtcgagccttagctgctttcaggcatcttattgctaagagggcttcacagttgaaatcagctagtgcacgtcaagtgatatccgcacagtctaatgttcaagcagatgtacaattgatacttgctcctctaagtcaagttgaacgatcaattcttatatcggtggctccactagctattacaaactttgaggactcgactctagttgcttcctgtatattcttgttggaactttgtggcctgtgtgccaacatgcttcgtttagatattgctgcactacgacgcatctcttcctactacaagtcagttcaagaaaataaacatgttgatctatctccaccaaggggcccagagctccatgtgcagtcccatggagctggtatagctcctgctctagctcgagcgctagctgaagattatgtccagtctgatcatctgcatgttttggagcagactcaaacctcgatggctcccaagcgggaacagacacaatatcctcttatttctattctgcaacaccttgaaaaagcaagtttgccatcattggaggaaggtaaaacttgtgggttttggcttttgactggtgttggtgatgcatctctttaccggtcgcaacagaatgaagcaagtcaacactggaatttggttactgaattctgtcaggcacactatctcccactaagtacaaaatatcttgcattactggccaatgacaatgattgggttggttttttaacagaagctcagatagctggattttctattgaagctgttattgaagtggcagccaaagagatcagggattcaagactgagggcccacatactgactgttctaaaaaatatgatatcacttcgaaggaaatcatctggtaatgtaccttcaggaagcagtgatccatctttctcttctgttgatggcaataatcccatggaacttttctgcattcttggagtctgtgaaaagcaaaaaaaccctggggaggcactcctaattaaagcaaaacaaatgcagtggtctttgcttgccatgattgcctcatgctttccggatgtaactcctctcacatgcttaagtgtttggcttgagattacagccgcaagggagatgtcctcgatcaaggtggatgatgtttccttgaaaatagcaaagaatgttggatctgctgttgaagccacaaataaattgccaagcactagcagaaatgttgaatttcgttacaataggaagaatccaaagcgaagacggttcctggaagcgtcacatgaaaagttatgtttctcaatagatagcacatgtgggccagattctgctgcaacttccaatcctatcagtattgttgaccatcagggaataggaaagccaatctcaggagaaaccataatgtccgttgatattgatgaaaggcttgcatctttatcaaacatggtagcagtgctttgcgaacaacaactgtttctaccattacttagagcttttgaaatgtttttgccttcctgctcccttctttccttcattcgttctctccaggcattttctcaaatgcgtcttcccgaggcttctgcacgtttggcatccttttcagcaagaataaaagatgaagcctctcatactcaactaaactcttccaaagaagtgtcagtaatagcagaatgggtggccactacagctgtaaaagctgcagatgctgtcctttcaaactgttcatcaatttatgagaagaggtgtctactgcagcttctttcagcagtggattttgctgatggtggcacttcatcatcttactttagccgaagatattggaagattaatctgtctgaaccatctttgtgtaaagatactgatgtgtacaactggaatgatttgatggatgatgcttctcttttaacatcattagaaaaggacggtcaatgggagcaagctcgaacttgggcaagacatctggagtcaagtggcatagcttgggaatctactcttgatcatgtcactgaatcacaggcagaagccatggttgctgaatggaaggagtttctttgggatatcccacaagaacgtgcagccttgtggggtcactgtcaatctctctttatgagatattctttccctcctttaaaggctggattatttttccttaagcatgccgaagcagtaggaaaagagataccagcacaagagcttcatgaaatattattgctctctttacaatggctaagtggaactatgactaaatcctctccggtctatcctcttcatcttttgcgggaaattgagactagggtgtggctcctggctgttgagtcagagagtcaatccaaggttgatggtgaatttgccacttctgctgttgctcataacaaagctgttggaaacagtagcagtattatagaacatactgctgatatcatcacaaaaatagacagtaacatgagcttgccgcacatgaaaattacagaaaggaatagcacacgggacagtttatcataccaacatgtgcaactctttgagtctaacagtgaagcatcttcaacaacaataaataacacgcgagcaaagcgaaggatgaaaacaaattcaccacttaaacgaggtgtcaatgacaatattgaaagtagagctaatgagctggataacaattctaacactttacatagttcaaagattggtgaacaagctagaaatttgctctctgaagaggaatttgtaaagatggaagcatctttatctggttgggaacaaaatgttaggcctgtagatatggagaaggctgtgctctctttactggaatttgggcaaataactgctgctaagcaactccaacaaaagctgtctccatcatatattcctgaagaacttgtccttgttgatgttgctttaagaattgccaaaaacagcagtaatggagagatcaatttgtcatgctttgacacacaggctcttcggatacttcagtcactgagagtagcaaatagctgcgatatgattagcccatcacaggttatggagatactagctgcgaaatgtggtgagggtcgtgggcgagctcttattaggagaataataggagttgttcgaactgctagattattgggactcccattttccgaagcatttgagaaacaaccaattgaacttctacagttgctttccctgaaagctcaggattcttttgatgaagcgaaatttctagtggagacacacatcatgcctgcatctagcattgcaagaattctagctgattcgttcctaaaggggcttttggccgcacatcgtggaggctatttggattcccaaaaggaagagggtcctgcacctctattgtggagatcaagtgacttcttaaagtgggcaaaactatgtccatcagaatcagaaattggccatgctttgatgcgtttggtaatgactggacatgaagtaccacatgcttgtgaggttgaactcctaatattgtcgcaccacttctacatgtcatcttcttgtcttgatggagtggatgttctcgtcacatttgcagcaaatagagtggactcatatgttttagaggaggatttttcttgtttagctcgtttgatcactggagtgagcaatttccattccttgagcttcattctttcaatccttgtagagaatggccaattggagttgctgcttcaaaagtattctgccactgacacagccacagggacgcttgcatcggttcgaggatttaggatggctgttattacatcactgaaacagtttatcccgaatgatgacgacgctctctctatggtatacaagcactttgacatgaagcatgaagctgcttctctccttgaatcacgtgcagagcaatacatgaacagctggttatcacgatatgataaggaacggcgaaatgatgagcttctggacgctatgcatcatcttgtagagacagctgaggttctttcaactattgatgctggccaaagaacacatcgtgcttgtgcccgtgcttctcttctgtcacttcagatccgaataccagatcttttgtggattggtctttctgagaccaatgcccggcggatttttgtggaacaatctaggttccaggaagctcttattgttgctgaagcatacaacataaatcaacctatagaatgggccccagtcttttggaatcaaatgctaaaaccggatctaatcgagcaattcgtggctgagtttgtctcagtgctgcccctgcagccaccaatgcttctcgagcttgcaaggttttacagggcggaggttgcagccaggggggagcagtcacacttctctgtctggctttcacctggaggcttgcctgcagagtgggtgaaacatcttggtagatccttcaggagcctgctgcgtagaacaagggacatgaggctgaggctgcagttggcaactctggcgacaggcttcattgacgtccttgttatttgcaatagagttttggacaaagtcccggacaatgctggcccgctgatcctaaggaagggacatggtggagcataccttcctctcatgtagatatttcccttctctttttggtgcattggattcagaacttaattcttggcagttaggctatatattgaaaggcagatgaatcttgcaaatattatatgtatcagctttctttggttcagcatctttaaagtcaagcttggctgcagtcttggacatggattctcatcgatgatgccatgaaagacttttgtgattgtatgtgcagcattttgagcggaaaagctggcagaaatgggatttttgcagcttcatccggcaggtgttttcgcacccatgatatattgtatgttttgcatgggatcttgtcctggcaactgctgagatcaactcatcacaagttgaatctcagagctctatcggatacctgtactcaggcagtcttcaaaacgttttctactattccccgagtgaagtctttagcatggggatactgttctgatgcttttgatgactcaagttttaatgaaattctagtggtatcaagtgatgcttctatcacagtccatgcattctgccattctcgcaaaagcacactaacagttaattcaatgtctgatgctaaagagttgcatggggagtggaaagagtggcgccctactgaatgttcagtgttggaggatggtgagtcaggtccagataattggttttgttcttttcctaactacagtcactgcgtctgtttctaatggaaaaataccaagccagattgcccatgaaatctttattgcctaattcagcagaagttgtatcctttagcatatatgacattactctctctttcttgaaatattggtatagcaaatgttctctgaagactatggcggaaactgacagtgaatcaccacgacgttttcttagagcatcgtgcagttgtcagtgggagtgtctaaaagttttgtctagctcgtcatgttatttgatcggcttagttctgactcctaatgaatcagtacgttgtgaggcccatccatccaatgcggagtgtattttggttactgttctggagctaaaccactggggcatacagtggaactttgtggcagaccttcaggatgtatctgatggtattacgccaagtccaaaatgggttgattttcagttatcagatgtgtttcttgcctgccttaatacagcaggttttgttgccatttggaacgtgaaaactggtggtcttgtgacgtcattcagtgttcttcaacaatgcagaactgatctggagatgcctctgaggagctctatgtccattgtgacaaatttggacgagggaaatatccatgttgagaactttgttggcagaatgtttaagcggatgggatttgaaattctctaggttacgttggctgcaattagcccttcattactcaatgattggtgatctagagcagtaa

SEQ ID NO: 216940 - DNA, 8771 bp, Zea Mays
atgaggaccggcggcggcggcgcggtctggggcgggggagagagcagcgccttgggaggtccctgctcttgcgcgtgggaatgcagagggggcgagctcggctggcttcagatcccgacgacgctcggccatgacgagggagcagaggagggcgcaggatgggatttgaaattctctaggttacgttggctgcaattagcccttcattactcaatgattggtgatctagagcagtcactgaatttactcgctgaggttaatcttgcggaagaaggtgtattgcaactgctattggcatctattcataggttatctagtaggactggaagtgataatgaagccacagtgtcatccaagttaatggttttagctgttcgctttgcaacaagaatgataaaatgttacgggttacagaagcaaaccacagacaataattcagtaaagcttcatgaaatggctctccttttgatggcaataagaagtatccagagccgagtctctgcaaagaatcagaattctgtttggatgggagatgataagagctcattgaaaataggtacagaagtatttcagcatgattcttcagttccagttgttgtactggatggtgtttcatcagggccatcgggtgggttagatactcatgacaggcaagagttggttcctgtgtgtgttcctgatagcaacagcatgttagctctaacaccagttgggtcatctcttagtgcttcaacttttcatgatattgatactaataaaaggactacccaagttggaagtcaaaattttcaaggaaatatcaaggagatgattaacagatgggaaatgaataactttgacttaaaaattgtagtcagagaagcactgcagtctggtcgcctacctttggcagttcttcagttgcagcttttgcgccagagggaattagtttccaatgattattctgaagatgctttctctgaagttcatgaaattggaaggtccattgtgtatgacctgttgatgaagggtgaaactggattggctgtagcaacactagaaaggctaggaaatgatgtagagtcggacctaagacaacttatgcaaggtactgtcaggaggtcactaaggctacaaattgctgacgagatgaagaagcgtgggtacataacaccagatgactggaagatgctagaaactataacactaattgagcgtctctaccctagcagcagcttctggaacacatacttttacagggagaatgtcattcgtgatgctgcaaaaattgttacactgccaggagacgataaacctgtattggctctaaatattcgcaaccaccccattattgaatgtggtgatgttgacggagcagtgcttggttcttgggtgaacattaatgattgcactaaggagttttctgggagcaacatttctgatggttattgggcctgtgctgctgtgtggtcggatgcttggggtccgagaactgtggaccgtatattgctggaccagccttatcatgtacatgctcatgtcccatgggaatctcagtttgaatattttgttgctcataatgatgtggggaaagtctgcgaactcctggacatgattcccaatagcatactttcagaagggattattagagtaaacgtgaacagtttacaagctcctgccaacactctttctgatttaacagtccctgattacaacatgtacatatgtgactcagaagagcttgaacctttctgtgtggagataccacatgttaaagtatttagatctttgtggaatcatgagtcaacattatatattcgaatggtaatgcagcaggaattggcaaagagacacatctttatgaaagagtattggcaaagtactactgaaattatacctttgcttgctcgtgctggcatacttataaaggttggtctaaaggaagaatgttctacaatattttctgcttcagagattccagatgatgcccatcaccagggccgtgaaggcgcactgcataagctaatcatacgtttctgtgtgcaatataacttgccatatctactggacctctatctggacacctgtaatttgactcctgataaggattgtatccgtttactcaaagaaaacacaggtgattgcaagtgggcacaatggttactcttctccaggatcaaaggttatgagtatgaggcatcattctctaatgcacgttggaatttgtcaaagaaaatggtcaataatagtaatcctacggctgttgagatagatgaaatgttgtatacagtagatgatatggcagaacgaattggtgaaatgtctgcattagctaccttgatgtatgcttcagcaccaattcagaaatccatatgtactggaagtgtgaacagaagtggttcgtcttcccagtgcacattggagaacctggctccttgtctccagcaatttccaacactatggaaaacccttttttcagcttgttttggccaagatgaatatgggtgtttaaactactctgctggtaatgcgtatggaaaaagatcaatttcagagtacttgagatggcgctatagcgttttttcctctgctggaggagacacttcgttgttgcaaatgcttccatgttgggtcccaaagtctgttagaagattaattcaactatttgaacagggcccttttggaatgcaacttctatcaactgccccatcatctgaagagttattcactcacggtgtctccaattatatatacaattctactggatataccgaagccaatgcactgtccttagaagcatcgatccaaaaaagtgttgaagaagaattatattcttcccttgaggagaaagatgtgagagtggaacaccatttgcaccgtggtcgagccttagctgctttcaggcatcttattgctaagagggcttcacagttgaaatcagctagtgcacgtcaagtgatatccgcacagtctaatgttcaagcagatgtacaattgatacttgctcctctaagtcaagttgaacgatcaattcttatatcggtggctccactagctattacaaactttgaggactcgactctagttgcttcctgtatattcttgttggaactttgtggcctgtgtgccaacatgcttcgtttagatattgctgcactacgacgcatctcttcctactacaagtcagttcaagaaaataaacatgttgatctatctccaccaaggggcccagagctccatgtgcagtcccatggagctggtatagctcctgctctagctcgagcgctagctgaagattatgtccagtctgatcatctgcatgttttggagcagactcaaacctcgatggctcccaagcgggaacagacacaatatcctcttatttctattctgcaacaccttgaaaaagcaagtttgccatcattggaggaaggtaaaacttgtgggttttggcttttgactggtgttggtgatgcatctctttaccggtcgcaacagaatgaagcaagtcaacactggaatttggttactgaattctgtcaggcacactatctcccactaagtacaaaatatcttgcattactggccaatgacaatgattgggttggttttttaacagaagctcagatagctggattttctattgaagctgttattgaagtggcagccaaagagatcagggattcaagactgagggcccacatactgactgttctaaaaaatatgatatcacttcgaaggaaatcatctggtaatgtaccttcaggaagcagtgatccatctttctcttctgttgatggcaataatcccatggaacttttctgcattcttggagtctgtgaaaagcaaaaaaaccctggggaggcactcctaattaaagcaaaacaaatgcagtggtctttgcttgccatgattgcctcatgctttccggatgtaactcctctcacatgcttaagtgtttggcttgagattacagccgcaagggagatgtcctcgatcaaggtggatgatgtttccttgaaaatagcaaagaatgttggatctgctgttgaagccacaaataaattgccaagcactagcagaaatgttgaatttcgttacaataggaagaatccaaagcgaagacggttcctggaagcgtcacatgaaaagttatgtttctcaatagatagcacatgtgggccagattctgctgcaacttccaatcctatcagtattgttgaccatcagggaataggaaagccaatctcaggagaaaccataatgtccgttgatattgatgaaaggcttgcatctttatcaaacatggtagcagtgctttgcgaacaacaactgtttctaccattacttagagcttttgaaatgtttttgccttcctgctcccttctttccttcattcgttctctccaggcattttctcaaatgcgtcttcccgaggcttctgcacgtttggcatccttttcagcaagaataaaagatgaagcctctcatactcaactaaactcttccaaagaagtgtcagtaatagcagaatgggtggccactacagctgtaaaagctgcagatgctgtcctttcaaactgttcatcaatttatgagaagaggtgtctactgcagcttctttcagcagtggattttgctgatggtggcacttcatcatcttactttagccgaagatattggaagattaatctgtctgaaccatctttgtgtaaagatactgatgtgtacaactggaatgatttgatggatgatgcttctcttttaacatcattagaaaaggacggtcaatgggagcaagctcgaacttgggcaagacatctggagtcaagtggcatagcttgggaatctactcttgatcatgtcactgaatcacaggcagaagccatggttgctgaatggaaggagtttctttgggatatcccacaagaacgtgcagccttgtggggtcactgtcaatctctctttatgagatattctttccctcctttaaaggctggattatttttccttaagcatgccgaagcagtaggaaaagagataccagcacaagagcttcatgaaatattattgctctctttacaatggctaagtggaactatgactaaatcctctccggtctatcctcttcatcttttgcgggaaattgagactagggtgtggctcctggctgttgagtcagagagtcaatccaaggttgatggtgaatttgccacttctgctgttgctcataacaaagctgttggaaacagtagcagtattatagaacatactgctgatatcatcacaaaaatagacagtaacatgagcttgccgcacatgaaaattacagaaaggaatagcacacgggacagtttatcataccaacatgtgcaactctttgagtctaacagtgaagcatcttcaacaacaataaataacacgcgagcaaagcgaaggatgaaaacaaattcaccacttaaacgaggtgtcaatgacaatattgaaagtagagctaatgagctggataacaattctaacactttacatagttcaaagattggtgaacaagctagaaatttgctctctgaagaggaatttgtaaagatggaagcatctttatctggttgggaacaaaatgttaggcctgtagatatggagaaggctgtgctctctttactggaatttgggcaaataactgctgctaagcaactccaacaaaagctgtctccatcatatattcctgaagaacttgtccttgttgatgttgctttaagaattgccaaaaacagcagtaatggagagatcaatttgtcatgctttgacacacaggctcttcggatacttcagtcactgagagtagcaaatagctgcgatatgattagcccatcacaggttatggagatactagctgcgaaatgtggtgagggtcgtgggcgagctcttattaggagaataataggagttgttcgaactgctagattattgggactcccattttccgaagcatttgagaaacaaccaattgaacttctacagttgctttccctgaaagctcaggattcttttgatgaagcgaaatttctagtggagacacacatcatgcctgcatctagcattgcaagaattctagctgattcgttcctaaaggggcttttggccgcacatcgtggaggctatttggattcccaaaaggaagagggtcctgcacctctattgtggagatcaagtgacttcttaaagtgggcaaaactatgtccatcagaatcagaaattggccatgctttgatgcgtttggtaatgactggacatgaagtaccacatgcttgtgaggttgaactcctaatattgtcgcaccacttctacatgtcatcttcttgtcttgatggagtggatgttctcgtcacatttgcagcaaatagagtggactcatatgttttagaggaggatttttcttgtttagctcgtttgatcactggagtgagcaatttccattccttgagcttcattctttcaatccttgtagagaatggccaattggagttgctgcttcaaaagtattctgccactgacacagccacagggacgcttgcatcggttcgaggatttaggatggctgttattacatcactgaaacagtttatcccgaatgatgacgacgctctctctatggtatacaagcactttgacatgaagcatgaagctgcttctctccttgaatcacgtgcagagcaatacatgaacagctggttatcacgatatgataaggaacggcgaaatgatgagcttctggacgctatgcatcatcttgtagagacagctgaggttctttcaactattgatgctggccaaagaacacatcgtgcttgtgcccgtgcttctcttctgtcacttcagatccgaataccagatcttttgtggattggtctttctgagaccaatgcccggcggatttttgtggaacaatctaggttccaggaagctcttattgttgctgaagcatacaacataaatcaacctatagaatgggccccagtcttttggaatcaaatgctaaaaccggatctaatcgagcaattcgtggctgagtttgtctcagtgctgcccctgcagccaccaatgcttctcgagcttgcaaggttttacagggcggaggttgcagccaggggggagcagtcacacttctctgtctggctttcacctggaggcttgcctgcagagtgggtgaaacatcttggtagatccttcaggagcctgctgcgtagaacaagggacatgaggctgaggctgcagttggcaactctggcgacaggcttcattgacgtccttgttatttgcaatagagttttggacaaagtcccggacaatgctggcccgctgatcctaaggaagggacatggtggagcataccttcctctcatgtagatatttcccttctctttttggtgcattggattcagaacttaattcttggcagttaggctatatattgaaaggcagatgaatcttgcaaatattatatgtatcagctttctttggttcagcatctttaaagtcaagcttggctgcagtcttggacatggattctcatcgatgatgccatgaaagacttttgtgattgtatgtgcagcattttgagcggaaaagctggcagaaatgggatttttgcagcttcatccggcaggtgttttcgcacccatgatatattgtatgttttgcatgggatcttgtcctggcaactgctgagatcaactcatcacaagttgaatctcagagctctatcggatacctgtactcaggcagtcttcaaaacgttttctactattccccgagtgaagtctttagcatggggatactgttctgatgcttttgatgactcaagttttaatgaaattctagtggtatcaagtgatgcttctatcacagtccatgcattctgccattctcgcaaaagcacactaacagttaattcaatgtctgatgctaaagagttgcatggggagtggaaagagtggcgccctactgaatgttcagtgttggaggatggtgagtcaggtccagataattggttttgttcttttcctaactacagtcactgcgtctgtttctaatggaaaaataccaagccagattgcccatgaaatctttattgcctaattcagcagaagttgtatcctttagcatatatgacattactctctctttcttgaaatattggtatagcaaatgttctctgaagactatggcggaaactgacagtgaatcaccacgacgttttcttagagcatcgtgcagttgtcagtgggagtgtctaaaagttttgtctagctcgtcatgttatttgatcggcttagttctgactcctaatgaatcagtacgttgtgaggcccatccatccaatgcggagtgtattttggttactgttctggagctaaaccactggggcatacagtggaactttgtggcagaccttcaggatgtatctgatggtattacgccaagtccaaaatgggttgattttcagttatcagatgtgtttcttgcctgccttaatacagcaggttttgttgccatttggaacgtgaaaactggtggtcttgtgacgtcattcagtgttcttcaacaatgcagaactgatctggagatgcctctgaggagctctatgtccattgtgacaaatttggacgagggaaatatccatgttgagaactttgttggcagaatgtttaagcggatgggatttgaaattctctaggttacgttggctgcaattagcccttcattactcaatgattggtgatctagagcagtaa

SEQ ID NO: 216941 - DNA, 10774 bp, Zea Mays
cggagggaacaactgccgcacggcacggagacagacgcggacagaccgagcgattggtcggcgaccacctcacctccgccgccatccactcctcggctcgggctccacgcaatgttactcgttaccatcattagctgttgatgggcatatgaacgatgtccacatctcgtcagatagatgatgggcctgctgtactacagttatgcagatggacattgctacaaccccatctcaaactatcaaaatttcgagaggcttttatatctccaacaaggcgtctttttggactgctctcagaccatggggatcttgtcctggcaactgctgagatcaactcatcacaagttgaatctcatagagctctatcggatacctgtactcaggcagtcttcaaaacgttttctactattccccgagtgaagtctttagcatggggatactgttctgatgcttttgatgactcaagttttaatgaaattctagtggtatcaagtgatgcttctatcacagtccatgcattctgccattctcgcaaaagcacactaacagttaattcaatgtctgatgctaaagagttgcatggggagtggaaagagtggcgccctactgaatgttcagtgttggaggatggtgagtcaggtccagaaaattggttttgttctttcctaactacagtcactgcgtctgtttctaatggaaaataccaagccagattgcccatgaaatctttattgcctaattcagcagaagttgtatcctttagcatatatgacattactctctctttcttgaaatattggtatagcaaatgttctctgaagactatggcggaaactgacagtgaatcaccacgacgttttcttagagcatcgtgcagttgtcagtgggagtgtctaaaagttttgtctagctcgtcatgttatttgatcggcttagttctgactcctaatgaatcagtacgttgtgaggcccatccatccaatgcggagtgtattttggttactgttctggagctaaaccactggggcatacagtggaactttgtggcagaccttcaggatgtatctgatggtattacgccaagtccaaaatgggttgattttcagttatcagatgtgtttcttgcctgccttaatacagcaggttttgttgccatttggaacgtgaaaactggtggtcttgtgacgtcattcagtgttcttcaacaatgcagaactgatctggagatgcctctgaggagctctatgtccattgtgacaaatttggacgagggaaatatccatgttgagaactttgttggcagaatgtttaagcggttagttttggcatcatattcttatcttcttgctgttgtagatgaggttggagtagtgtatgtgttctatgcggatgacatcttaaacttcaaagctaatgtgcacgaaaactttgatctgcctgttatgaatcagtttgctgattgtttttctatctgggaagctgctggtcatgagataggaagtctatcattttgtgctaatcagtccatacaacaagggtcacttagtctaaccaaattggttcctgagttctcagggaaaagcgatgatattgtcaggcctagagaaagaagaaaatatagatgcgatgaaaatgaagtggacagctggccaagtggctttgtcactgcagggcagatgaaagttggggcaggttatcgtcgcacaaattcctcttgtttctttaggaggataattcttcctccatgcagatcacagcaggatgtaattagcctgtgtccacttggactaactagaatttttaaaggttctattgcggatggaaacgagcatgtcaaaatttttcattccgagttgcttatgtattcatcttttcttggcaaaggagatattgatattggttttatggacgaaatgcttccatttaaaaaggattccacttttgtcggagattctgttgtttgctcctgccagggatatttgtatttaattacccagtatggcctttctgtggtccttcctccagtttctatatcatccttttcatctcaatgtgacgctatcaaattctggcaaatgggtcctgctgctggtagcacatgcaatgctctgaacttactatctgttgacaaatcagacacaagctggaaaacctggcaaatagaagtcctggatagagctttgttgtatgaaggtcccgcactagcagacaggctctgttgggagaatggatgggatttgaaattctctaggttacgttggctgcaattagcccttcattactcaatgattggtgatctagagcagtcactgaatttactcgctgaggttaatcttgcggaagaaggtgtattgcaactgctattggcatctattcataggttatctagtaggactggaagtgataatgaagccacagtgtcatccaagttaatggttttagctgttcgctttgcaacaagaatgataaaatgttacgggttacagaagcaaaccacagacaataattcagtaaagcttcatgaaatggctctccttttgatggcaataagaagtatccagagccgagtctctgcaaagaatcagaattctgtttggatgggagatgataagagctcattgaaaatagggccatcgggtgggttagatactcatgacaggcaagagttggttcctgtgtgtgttcctgatagcaacagcatgttagctctaacaccagttgggtcatctcttagtgcttcaacttttcatgatattgatactaataaaaggactacccaagttggaagtcaaaattttcaaggaaatatcaaggagatgattaacagatgggaaatgaataactttgacttaaaaattgtagtcagagaagcactgcagtctggtcgcctacctttggcagttcttcagttgcagcttttgcgccagagggaattagtttccaatgattattctgaagatgctttctctgaagttcatgaaattggaaggtccattgtgtatgacctgttgatgaagggtgaaactggattggctgtagcaacactagaaaggctaggaaatgatgtagagtcggacctaagacaacttatgcaaggtactgtcaggaggtcactaaggctacaaattgctgacgagatgaagaagcgtgggtacataacaccagatgactggaagatgctagaaactataacactaattgagcgtctctaccctagcagcagcttctggaacacatacttttacagggagaatgtcattcgtgatgctgcaaaaattgttacactgccaggagacgataaacctgtattggctctaaatattcgcaaccaccccattattgaatgtggtgatgttgacggagcagtgcttggttcttgggtgaacattaatgattgcactaaggagttttctgggagcaacatttctgatggttattgggcctgtgctgctgtgtggtcggatgcttggggtccgagaactgtggaccgtatattgctggaccagccttatcatgtacatgctcatgtcccatgggaatctcagtttgaatattttgttgctcataatgatgtggggaaagtctgcgaactcctggacatgattcccaatagcatactttcagaagggattattagagtaaacgtgaacagtttacaagctcctgccaacactctttctgatttaacagtccctgattacaacatgtacatatgtgactcagaagagcttgaacctttctgtgtggagataccacatgttaaagtatttagatctttgtggaatcatgagtcaacattatatattcgaatggtaatgcagcaggaattggcaaagagacacatctttatgaaagagtattggcaaagtactactgaaattatacctttgcttgctcgtgctggcatacttataaaggttggtctaaaggaagaatgttctacaatattttctgcttcagagattccagatgatgcccatcaccagggccgtgaaggcgcactgcataagctaatcatacgtttctgtgtgcaatataacttgccatatctactggacctctatctggacacctgtaatttgactcctgataaggattgtatccgtttactcaaagaaaacacaggtgattgcaagtgggcacaatggttactcttctccaggatcaaaggttatgagtatgaggcatcattctctaatgcacgttggaatttgtcaaagaaaatggtcaataatagtaatcctacggctgttgagatagatgaaatgttgtatacagtagatgatatggcagaacgaattggtgaaatgtctgcattagctaccttgatgtatgcttcagcaccaattcagaaatccatatgtactggaagtgtgaacagaagtggttcgtcttcccagtgcacattggagaacctggctccttgtctccagcaatttccaacactatggaaaacccttttttcagcttgttttggccaagatgaatatgggtgtttaaactactctgctgcgtatggaaaaagatcaatttcagagtacttgagatggcgctatagcgttttttcctctgctggaggagacacttcgttgttgcaaatgcttccatgttgggtcccaaagtctgttagaagattaattcaactatttgaacagggcccttttggaatgcaacttctatcaactgccccatcatctgaagagttattcactcacggtgtctccaattatatatacaattctactggatataccgaagccaatgcactgtccttagaagcatcgatccaaaaaagtgttgaagaagaattatattcttcccttgaggagaaagatgtgagagtggaacaccatttgcaccgtggtcgagccttagctgctttcaggcatcttattgctaagagggcttcacagttgaaatcagctagtgcacgtcaagtgatatccgcacagtctaatgttcaagcagatgtacaattgatacttgctcctctaagtcaagttgaacgatcaattcttatatcggtggctccactagctattacaaactttgaggactcgactctagttgcttcctgtatattcttgttggaactttgtggcctgtgtgccaacatgcttcgtttagatattgctgcactacgacgcatctcttcctactacaagtcagttcaagaaaataaacatgttgatctatctccaccaaggggcccagagctccatgtgcagtcccatggagctggtatagctcctgctctagctcgagcgctagctgaagattatgtccagtctgatcatctgcatgttttggagcagactcaaacctcgatggctcccaagcgggaacagacacaatatcctcttatttctattctgcaacaccttgaaaaagcaagtttgccatcattggaggaaggtaaaacttgtgggttttggcttttgactggtgttggtgatgcatctctttaccggtcgcaacagaatgaagcaagtcaacactggaatttggttactgaattctgtcaggcacactatctcccactaagtacaaaatatcttgcattactggccaatgacaatgattgggttggttttttaacagaagctcagatagctggattttctattgaagctgttattgaagtggcagccaaagagatcagggattcaagactgagggcccacatactgactgttctaaaaaatatgatatcacttcgaaggaaatcatctggtaatgtaccttcaggaagcagtgatccatctttctcttctgttgatggcaataatcccatggaacttttctgcattcttggagtctgtgaaaagcaaaaaaaccctggggaggcactcctaattaaagcaaaacaaatgcagtggtctttgcttgccatgattgcctcatgctttccggatgtaactcctctcacatgcttaagtgtttggcttgagattacagccgcaagggagatgtcctcgatcaaggtggatgatgtttccttgaaaatagcaaagaatgttggatctgctgttgaagccacaaataaattgccaagcactagcagaaatgttgaatttcgttacaataggaagaatccaaagcgaagacggttcctggaagcgtcacatgaaaagttatgtttctcaatagatagcacatgtgggccagattctgctgcaacttccaatcctatcagtattgttgaccatcagggaataggaaagccaatctcaggagaaaccataatgtccgttgatattgatgaaaggcttgcatctttatcaaacatggtagcagtgctttgcgaacaacaactgtttctaccattacttagagcttttgaaatgtttttgccttcctgctcccttctttccttcattcgttctctccaggcattttctcaaatgcgtcttcccgaggcttctgcacgtttggcatccttttcagcaagaataaaagatgaagcctctcatactcaactaaactcttccaaagaagtgtcagtaatagcagaatgggtggccactacagctgtaaaagctgcagatgctgtcctttcaaactgttcatcaatttatgagaagaggtgtctactgcagcttctttcagcagtggattttgctgatggtggcacttcatcatcttactttagccgaagatattggaagattaatctgtctgaaccatctttgtgtaaagatactgatgtgtacaactggaatgatttgatggatgatgcttctcttttaacatcattagaaaaggacggtcaatgggagcaagctcgaacttgggcaagacatctggagtcaagtggcatagcttgggaatctactcttgatcatgtcactgaatcacaggcagaagccatggttgctgaatggaaggagtttctttgggatatcccacaagaacgtgcagccttgtggggtcactgtcaatctctctttatgagatattctttccctcctttaaaggctggattatttttccttaagcatgccgaagcagtaggaaaagagataccagcacaagagcttcatgaaatattattgctctctttacaatggctaagtggaactatgactaaatcctctccggtctatcctcttcatcttttgcgggaaattgagactagggtgtggctcctggctgttgagtcagagagtcaatccaaggttgatggtgaatttgccacttctgctgttgctcataacaaagctgttggaaacagtagcagtattatagaacatactgctgatatcatcacaaaaatagacagtaacatgagcttgccgcacatgaaaattacagaaaggaatagcacacgggacagtttatcataccaacatgtgcaactctttgagtctaacagtgaagcatcttcaacaacaataaataacacgcgagcaaagcgaaggatgaaaacaaattcaccacttaaacgaggtgtcaatgacaatattgaaagtagagctaatgagctggataacaattctaacactttacatagttcaaagattggtgaacaagctagaaatttgctctctgaagaggaatttgtaaagatggaagcatctttatctggttgggaacaaaatgttaggcctgtagatatggagaaggctgtgctctctttactggaatttgggcaaataactgctgctaagcaactccaacaaaagctgtctccatcatatattcctgaagaacttgtccttgttgatgttgctttaagaattgccaaaaacagcagtaatggagagatcaatttgtcatgctttgacacacaggctcttcggatacttcagtcactgagagtagcaaatagctgcgatatgattagcccatcacaggttatggagatactagctgcgaaatgtggtgagggtcgtgggcgagctcttattaggagaataataggagttgttcgaactgctagattattgggactcccattttccgaagcatttgagaaacaaccaattgaacttctacagttgctttccctgaaagctcaggattcttttgatgaagcgaaatttctagtggagacacacatcatgcctgcatctagcattgcaagaattctagctgattcgttcctaaaggggcttttggccgcacatcgtggaggctatttggattcccaaaaggaagagggtcctgcacctctattgtggagatcaagtgacttcttaaagtgggcaaaactatgtccatcagaatcagaaattggccatgctttgatgcgtttggtaatgactggacatgaagtaccacatgcttgtgaggttgaactcctaatattgtcgcaccacttctacatgtcatcttcttgtcttgatggagtggatgttctcgtcacatttgcagcaaatagagtggactcatatgttttagaggaggatttttcttgtttagctcgtttgatcactggagtgagcaatttccattccttgagcttcattctttcaatccttgtagagaatggccaattggagttgctgcttcaaaagtattctgccactgacacagccacagggacgcttgcatcggttcgaggatttaggatggctgttattacatcactgaaacagtttatcccgaatgatgacgacgctctctctatggtatacaagcactttgacatgaagcatgaagctgcttctctccttgaatcacgtgcagagcaatacatgaacagctggttatcacgatatgataaggaacggcgaaatgatgagcttctggacgctatgcatcatcttgtagagacagctgaggttctttcaactattgatgctggccaaagaacacatcgtgcttgtgcccgtgcttctcttctgtcacttcagatccgaataccagatcttttgtggattggtctttctgagaccaatgcccggcggatttttgtggaacaatctaggttccaggaagctcttattgttgctgaagcatacaacataaatcaacctatagaatgggccccagtcttttggaatcaaatgctaaaaccggatctaatcgagcaattcgtggctgagtttgtctcagtgctgcccctgcagccaccaatgcttctcgagcttgcaaggttttacagggcggaggttgcagccaggggggagcagtcacacttctctgtctggctttcacctggaggcttgcctgcagagtgggtgaaacatcttggtagatccttcaggagcctgctgcgtagaacaagggacatgaggctgaggctgcagttggcaactctggcgacaggcttcattgacgtccttgttatttgcaatagagttttggacaaagtcccggacaatgctggcccgctgatcctaaggaagggacatggtggagcataccttcctctcatgtagatatttcccttctctttttggtgcattggattcagaacttaattcttggcagttaggctatatattgaaaggcagatgaatcttgcaaatattatatgtatcagctttctttggttcagcatctttaaagtcaagcttggctgcagtcttggacatggattctcatcgatgatgccatgaaagacttttgtgattgtatgtgcagcattttgagcggaaaagctggcagaaatgggatttttgcagcttcatccggcaggtgttttcgcacccatgatatattgtatgttttgcatgggatcttgtcctggcaactgctgagatcaactcatcacaagttgaatctcagagctctatcggatacctgtactcaggcagtcttcaaaacgttttctactattccccgagtgaagtctttagcatggggatactgttctgatgcttttgatgactcaagttttaatgaaattctagtggtatcaagtgatgcttctatcacagtccatgcattctgccattctcgcaaaagcacactaacagttaattcaatgtctgatgctaaagagttgcatggggagtggaaagagtggcgccctactgaatgttcagtgttggaggatggtgagtcaggtccagataattggttttgttcttttcctaactacagtcactgcgtctgtttctaatggaaaaataccaagccagattgcccatgaaatctttattgcctaattcagcagaagttgtatcctttagcatatatgacattactctctctttcttgaaatattggtatagcaaatgttctctgaagactatggcggaaactgacagtgaatcaccacgacgttttcttagagcatcgtgcagttgtcagtgggagtgtctaaaagttttgtctagctcgtcatgttatttgatcggcttagttctgactcctaatgaatcagtacgttgtgaggcccatccatccaatgcggagtgtattttggttactgttctggagctaaaccactggggcatacagtggaactttgtggcagaccttcaggatgtatctgatggtattacgccaagtccaaaatgggttgattttcagttatcagatgtgtttcttgcctgccttaatacagcaggttttgttgccatttggaacgtgaaaactggtggtcttgtgacgtcattcagtgttcttcaacaatgcagaactgatctggagatgcctctgaggagctctatgtccattgtgacaaatttggacgagggaaatatccatgttgagaactttgttggcagaatgtttaagcggatgggatttgaaattctctaggttacgttggctgcaattagcccttcattactcaatgattggtgatctagagcagtaa

SEQ ID NO: 216942 - DNA, 10805 bp, Zea Mays
ctggcatgaggccccatgccgaagccaccagcgaaatgaacggaagaagagagcggagggaacaactgccgcacggcacggagacagacgcggacagaccgagcgattggtcggcgaccacctcacctccgccgccatccactcctcggctcgggctccacgttatgcagatggacattgctacaaccccatctcaaactatcaaaatttcgagaggcttttatatctccaacaaggcgtctttttggactgctctcagaccatggggatcttgtcctggcaactgctgagatcaactcatcacaagttgaatctcatagagctctatcggatacctgtactcaggcagtcttcaaaacgttttctactattccccgagtgaagtctttagcatggggatactgttctgatgcttttgatgactcaagttttaatgaaattctagtggtatcaagtgatgcttctatcacagtccatgcattctgccattctcgcaaaagcacactaacagttaattcaatgtctgatgctaaagagttgcatggggagtggaaagagtggcgccctactgaatgttcagtgttggaggatggtgagtcaggtccagaaaattggttttgttctttcctaactacagtcactgcgtctgtttctaatggaaaataccaagccagattgcccatgaaatctttattgcctaattcagcagaagttgtatcctttagcatatatgacattactctctctttcttgaaatattggtatagcaaatgttctctgaagactatggcggaaactgacagtgaatcaccacgacgttttcttagagcatcgtgcagttgtcagtgggagtgtctaaaagttttgtctagctcgtcatgttatttgatcggcttagttctgactcctaatgaatcagtacgttgtgaggcccatccatccaatgcggagtgtattttggttactgttctggagctaaaccactggggcatacagtggaactttgtggcagaccttcaggatgtatctgatggtattacgccaagtccaaaatgggttgattttcagttatcagatgtgtttcttgcctgccttaatacagcaggttttgttgccatttggaacgtgaaaactggtggtcttgtgacgtcattcagtgttcttcaacaatgcagaactgatctggagatgcctctgaggagctctatgtccattgtgacaaatttggacgagggaaatatccatgttgagaactttgttggcagaatgtttaagcggttagttttggcatcatattcttatcttcttgctgttgtagatgaggttggagtagtgtatgtgttctatgcggatgacatcttaaacttcaaagctaatgtgcacgaaaactttgatctgcctgttatgaatcagtttgctgattgtttttctatctgggaagctgctggtcatgagataggaagtctatcattttgtgctaatcagtccatacaacaagggtcacttagtctaaccaaattggttcctgagttctcagggaaaagcgatgatattgtcaggcctagagaaagaagaaaatatagatgcgatgaaaatgaagtggacagctggccaagtggctttgtcactgcagggcagatgaaagttggggcaggttatcgtcgcacaaattcctcttgtttctttaggaggataattcttcctccatgcagatcacagcaggatgtaattagcctgtgtccacttggactaactagaatttttaaaggttctattgcggatggaaacgagcatgtcaaaatttttcattccgagttgcttatgtattcatcttttcttggcaaaggagatattgatattggttttatggacgaaatgcttccatttaaaaaggattccacttttgtcggagattctgttgtttgctcctgccagggatatttgtatttaattacccagtatggcctttctgtggtccttcctccagtttctatatcatccttttcatctcaatgtgacgctatcaaattctggcaaatgggtcctgctgctggtagcacatgcaatgctctgaacttactatctgttgacaaatcagacacaagctggaaaacctggcaaatagaagtcctggatagagctttgttgtatgaaggtcccgcactagcagacaggctctgttgggagaatggatgggatttgaaattctctaggttacgttggctgcaattagcccttcattactcaatgattggtgatctagagcagtcactgaatttactcgctgaggttaatcttgcggaagaaggtgtattgcaactgctattggcatctattcataggttatctagtaggactggaagtgataatgaagccacagtgtcatccaagttaatggttttagctgttcgctttgcaacaagaatgataaaatgttacgggttacagaagcaaaccacagacaataattcagtaaagcttcatgaaatggctctccttttgatggcaataagaagtatccagagccgagtctctgcaaagaatcagaattctgtttggatgggagatgataagagctcattgaaaataggtacagaagtatttcagcatgattcttcagttccagttgttgtactggatggtgtttcatcagggccatcgggtgggttagatactcatgacaggcaagagttggttcctgtgtgtgttcctgatagcaacagcatgttagctctaacaccagttgggtcatctcttagtgcttcaacttttcatgatattgatactaataaaaggactacccaagttggaagtcaaaattttcaaggaaatatcaaggagatgattaacagatgggaaatgaataactttgacttaaaaattgtagtcagagaagcactgcagtctggtcgcctacctttggcagttcttcagttgcagcttttgcgccagagggaattagtttccaatgattattctgaagatgctttctctgaagttcatgaaattggaaggtccattgtgtatgacctgttgatgaagggtgaaactggattggctgtagcaacactagaaaggctaggaaatgatgtagagtcggacctaagacaacttatgcaaggtactgtcaggaggtcactaaggctacaaattgctgacgagatgaagaagcgtgggtacataacaccagatgactggaagatgctagaaactataacactaattgagcgtctctaccctagcagcagcttctggaacacatacttttacagggagaatgtcattcgtgatgctgcaaaaattgttacactgccaggagacgataaacctgtattggctctaaatattcgcaaccaccccattattgaatgtggtgatgttgacggagcagtgcttggttcttgggtgaacattaatgattgcactaaggagttttctgggagcaacatttctgatggttattgggcctgtgctgctgtgtggtcggatgcttggggtccgagaactgtggaccgtatattgctggaccagccttatcatgtacatgctcatgtcccatgggaatctcagtttgaatattttgttgctcataatgatgtggggaaagtctgcgaactcctggacatgattcccaatagcatactttcagaagggattattagagtaaacgtgaacagtttacaagctcctgccaacactctttctgatttaacagtccctgattacaacatgtacatatgtgactcagaagagcttgaacctttctgtgtggagataccacatgttaaagtatttagatctttgtggaatcatgagtcaacattatatattcgaatggtaatgcagcaggaattggcaaagagacacatctttatgaaagagtattggcaaagtactactgaaattatacctttgcttgctcgtgctggcatacttataaaggttggtctaaaggaagaatgttctacaatattttctgcttcagagattccagatgatgcccatcaccagggccgtgaaggcgcactgcataagctaatcatacgtttctgtgtgcaatataacttgccatatctactggacctctatctggacacctgtaatttgactcctgataaggattgtatccgtttactcaaagaaaacacaggtgattgcaagtgggcacaatggttactcttctccaggatcaaaggttatgagtatgaggcatcattctctaatgcacgttggaatttgtcaaagaaaatggtcaataatagtaatcctacggctgttgagatagatgaaatgttgtatacagtagatgatatggcagaacgaattggtgaaatgtctgcattagctaccttgatgtatgcttcagcaccaattcagaaatccatatgtactggaagtgtgaacagaagtggttcgtcttcccagtgcacattggagaacctggctccttgtctccagcaatttccaacactatggaaaacccttttttcagcttgttttggccaagatgaatatgggtgtttaaactactctgctggtaatgcgtatggaaaaagatcaatttcagagtacttgagatggcgctatagcgttttttcctctgctggaggagacacttcgttgttgcaaatgcttccatgttgggtcccaaagtctgttagaagattaattcaactatttgaacagggcccttttggaatgcaacttctatcaactgccccatcatctgaagagttattcactcacggtgtctccaattatatatacaattctactggatataccgaagccaatgcactgtccttagaagcatcgatccaaaaaagtgttgaagaagaattatattcttcccttgaggagaaagatgtgagagtggaacaccatttgcaccgtggtcgagccttagctgctttcaggcatcttattgctaagagggcttcacagttgaaatcagctagtgcacgtcaagtgatatccgcacagtctaatgttcaagcagatgtacaattgatacttgctcctctaagtcaagttgaacgatcaattcttatatcggtggctccactagctattacaaactttgaggactcgactctagttgcttcctgtatattcttgttggaactttgtggcctgtgtgccaacatgcttcgtttagatattgctgcactacgacgcatctcttcctactacaagtcagttcaagaaaataaacatgttgatctatctccaccaaggggcccagagctccatgtgcagtcccatggagctggtatagctcctgctctagctcgagcgctagctgaagattatgtccagtctgatcatctgcatgttttggagcagactcaaacctcgatggctcccaagcgggaacagacacaatatcctcttatttctattctgcaacaccttgaaaaagcaagtttgccatcattggaggaaggtaaaacttgtgggttttggcttttgactggtgttggtgatgcatctctttaccggtcgcaacagaatgaagcaagtcaacactggaatttggttactgaattctgtcaggcacactatctcccactaagtacaaaatatcttgcattactggccaatgacaatgattgggttggttttttaacagaagctcagatagctggattttctattgaagctgttattgaagtggcagccaaagagatcagggattcaagactgagggcccacatactgactgttctaaaaaatatgatatcacttcgaaggaaatcatctggtaatgtaccttcaggaagcagtgatccatctttctcttctgttgatggcaataatcccatggaacttttctgcattcttggagtctgtgaaaagcaaaaaaaccctggggaggcactcctaattaaagcaaaacaaatgcagtggtctttgcttgccatgattgcctcatgctttccggatgtaactcctctcacatgcttaagtgtttggcttgagattacagccgcaagggagatgtcctcgatcaaggtggatgatgtttccttgaaaatagcaaagaatgttggatctgctgttgaagccacaaataaattgccaagcactagcagaaatgttgaatttcgttacaataggaagaatccaaagcgaagacggttcctggaagcgtcacatgaaaagttatgtttctcaatagatagcacatgtgggccagattctgctgcaacttccaatcctatcagtattgttgaccatcagggaataggaaagccaatctcaggagaaaccataatgtccgttgatattgatgaaaggcttgcatctttatcaaacatggtagcagtgctttgcgaacaacaactgtttctaccattacttagagcttttgaaatgtttttgccttcctgctcccttctttccttcattcgttctctccaggcattttctcaaatgcgtcttcccgaggcttctgcacgtttggcatccttttcagcaagaataaaagatgaagcctctcatactcaactaaactcttccaaagaagtgtcagtaatagcagaatgggtggccactacagctgtaaaagctgcagatgctgtcctttcaaactgttcatcaatttatgagaagaggtgtctactgcagcttctttcagcagtggattttgctgatggtggcacttcatcatcttactttagccgaagatattggaagattaatctgtctgaaccatctttgtgtaaagatactgatgtgtacaactggaatgatttgatggatgatgcttctcttttaacatcattagaaaaggacggtcaatgggagcaagctcgaacttgggcaagacatctggagtcaagtggcatagcttgggaatctactcttgatcatgtcactgaatcacaggcagaagccatggttgctgaatggaaggagtttctttgggatatcccacaagaacgtgcagccttgtggggtcactgtcaatctctctttatgagatattctttccctcctttaaaggctggattatttttccttaagcatgccgaagcagtaggaaaagagataccagcacaagagcttcatgaaatattattgctctctttacaatggctaagtggaactatgactaaatcctctccggtctatcctcttcatcttttgcgggaaattgagactagggtgtggctcctggctgttgagtcagagagtcaatccaaggttgatggtgaatttgccacttctgctgttgctcataacaaagctgttggaaacagtagcagtattatagaacatactgctgatatcatcacaaaaatagacagtaacatgagcttgccgcacatgaaaattacagaaaggaatagcacacgggacagtttatcataccaacatgtgcaactctttgagtctaacagtgaagcatcttcaacaacaataaataacacgcgagcaaagcgaaggatgaaaacaaattcaccacttaaacgaggtgtcaatgacaatattgaaagtagagctaatgagctggataacaattctaacactttacatagttcaaagattggtgaacaagctagaaatttgctctctgaagaggaatttgtaaagatggaagcatctttatctggttgggaacaaaatgttaggcctgtagatatggagaaggctgtgctctctttactggaatttgggcaaataactgctgctaagcaactccaacaaaagctgtctccatcatatattcctgaagaacttgtccttgttgatgttgctttaagaattgccaaaaacagcagtaatggagagatcaatttgtcatgctttgacacacaggctcttcggatacttcagtcactgagagtagcaaatagctgcgatatgattagcccatcacaggttatggagatactagctgcgaaatgtggtgagggtcgtgggcgagctcttattaggagaataataggagttgttcgaactgctagattattgggactcccattttccgaagcatttgagaaacaaccaattgaacttctacagttgctttccctgaaagctcaggattcttttgatgaagcgaaatttctagtggagacacacatcatgcctgcatctagcattgcaagaattctagctgattcgttcctaaaggggcttttggccgcacatcgtggaggctatttggattcccaaaaggaagagggtcctgcacctctattgtggagatcaagtgacttcttaaagtgggcaaaactatgtccatcagaatcagaaattggccatgctttgatgcgtttggtaatgactggacatgaagtaccacatgcttgtgaggttgaactcctaatattgtcgcaccacttctacatgtcatcttcttgtcttgatggagtggatgttctcgtcacatttgcagcaaatagagtggactcatatgttttagaggaggatttttcttgtttagctcgtttgatcactggagtgagcaatttccattccttgagcttcattctttcaatccttgtagagaatggccaattggagttgctgcttcaaaagtattctgccactgacacagccacagggacgcttgcatcggttcgaggatttaggatggctgttattacatcactgaaacagtttatcccgaatgatgacgacgctctctctatggtatacaagcactttgacatgaagcatgaagctgcttctctccttgaatcacgtgcagagcaatacatgaacagctggttatcacgatatgataaggaacggcgaaatgatgagcttctggacgctatgcatcatcttgtagagacagctgaggttctttcaactattgatgctggccaaagaacacatcgtgcttgtgcccgtgcttctcttctgtcacttcagatccgaataccagatcttttgtggattggtctttctgagaccaatgcccggcggatttttgtggaacaatctaggttccaggaagctcttattgttgctgaagcatacaacataaatcaacctatagaatgggccccagtcttttggaatcaaatgctaaaaccggatctaatcgagcaattcgtggctgagtttgtctcagtgctgcccctgcagccaccaatgcttctcgagcttgcaaggttttacagggcggaggttgcagccaggggggagcagtcacacttctctgtctggctttcacctggaggcttgcctgcagagtgggtgaaacatcttggtagatccttcaggagcctgctgcgtagaacaagggacatgaggctgaggctgcagttggcaactctggcgacaggcttcattgacgtccttgttatttgcaatagagttttggacaaagtcccggacaatgctggcccgctgatcctaaggaagggacatggtggagcataccttcctctcatgtagatatttcccttctctttttggtgcattggattcagaacttaattcttggcagttaggctatatattgaaaggcagatgaatcttgcaaatattatatgtatcagctttctttggttcagcatctttaaagtcaagcttggctgcagtcttggacatggattctcatcgatgatgccatgaaagacttttgtgattgtatgtgcagcattttgagcggaaaagctggcagaaatgggatttttgcagcttcatccggcaggtgttttcgcacccatgatatattgtatgttttgcatgggatcttgtcctggcaactgctgagatcaactcatcacaagttgaatctcagagctctatcggatacctgtactcaggcagtcttcaaaacgttttctactattccccgagtgaagtctttagcatggggatactgttctgatgcttttgatgactcaagttttaatgaaattctagtggtatcaagtgatgcttctatcacagtccatgcattctgccattctcgcaaaagcacactaacagttaattcaatgtctgatgctaaagagttgcatggggagtggaaagagtggcgccctactgaatgttcagtgttggaggatggtgagtcaggtccagataattggttttgttcttttcctaactacagtcactgcgtctgtttctaatggaaaaataccaagccagattgcccatgaaatctttattgcctaattcagcagaagttgtatcctttagcatatatgacattactctctctttcttgaaatattggtatagcaaatgttctctgaagactatggcggaaactgacagtgaatcaccacgacgttttcttagagcatcgtgcagttgtcagtgggagtgtctaaaagttttgtctagctcgtcatgttatttgatcggcttagttctgactcctaatgaatcagtacgttgtgaggcccatccatccaatgcggagtgtattttggttactgttctggagctaaaccactggggcatacagtggaactttgtggcagaccttcaggatgtatctgatggtattacgccaagtccaaaatgggttgattttcagttatcagatgtgtttcttgcctgccttaatacagcaggttttgttgccatttggaacgtgaaaactggtggtcttgtgacgtcattcagtgttcttcaacaatgcagaactgatctggagatgcctctgaggagctctatgtccattgtgacaaatttggacgagggaaatatccatgttgagaactttgttggcagaatgtttaagcggatgggatttgaaattctctaggttacgttggctgcaattagcccttcattactcaatgattggtgatctagagcagtaa

SEQ ID NO: 216943 - DNA, 8953 bp, Zea Mays
atgaggaccggcggcggcggcgcggtctggggcgggggagagagcagcgccttgggaggtccctgctcttgcgcgtgggaatgcagagggggcgagctcggctggcttcagatcccgacgacgctcggccatgacgagggagcagaggagggcgcaggatgggatttgaaattctctaggttacgttggctgcaattagcccttcattactcaatgattggtgatctagagcagtcactgaatttactcgctgaggttaatcttgcggaagaaggtgtattgcaactgctattggcatctattcataggttatctagtaggactggaagtgataatgaagccacagtgtcatccaagttaatggttttagctgttcgctttgcaacaagaatgataaaatgttacgggttacagaagcaaaccacagacaataattcagtaaagcttcatgaaatggctctccttttgatggcaataagaagtatccagagccgagtctctgcaaagaatcagaattctgtttggatgcagggagatgataagagctcattgaaaatagggccatcgggtgggttagatactcatgacaggcaagagttggttcctgtgtgtgttcctgatagcaacagcatgttagctctaacaccagttgggtcatctcttagtgcttcaacttttcatgatattgatactaataaaaggactacccaagttggaagtcaaaattttcaaggaaatatcaaggagatgattaacagatgggaaatgaataactttgacttaaaaattgtagtcagagaagcactgcagtctggtcgcctacctttggcagttcttcagttgcagcttttgcgccagagggaattagtttccaatgattattctgaagatgctttctctgaagttcatgaaattggaaggtccattgtgtatgacctgttgatgaagggtgaaactggattggctgtagcaacactagaaaggctaggaaatgatgtagagtcggacctaagacaacttatgcaaggtactgtcaggaggtcactaaggctacaaattgctgacgagatgaagaagcgtgggtacataacaccagatgactggaagatgctagaaactataacactaattgagcgtctctaccctagcagcagcttctggaacacatacttttacagggagaatgtcattcgtgatgctgcaaaaattgttacactgccaggagacgataaacctgtattggctctaaatattcgcaaccaccccattattgaatgtggtgatgttgacggagcagtgcttggttcttgggtgaacattaatgattgcactaaggagttttctgggagcaacatttctgatggttattgggcctgtgctgctgtgtggtcggatgcttggggtccgagaactgtggaccgtatattgctggaccagccttatcatgtacatgctcatgtcccatgggaatctcagtttgaatattttgttgctcataatgatgtggggaaagtctgcgaactcctggacatgattcccaatagcatactttcagaagggattattagagtaaacgtgaacagtttacaagctcctgccaacactctttctgatttaacagtccctgattacaacatgtacatatgtgactcagaagagcttgaacctttctgtgtggagataccacatgttaaagtatttagatctttgtggaatcatgagtcaacattatatattcgaatggtaatgcagcaggaattggcaaagagacacatctttatgaaagagtattggcaaagtactactgaaattatacctttgcttgctcgtgctggcatacttataaaggttggtctaaaggaagaatgttctacaatattttctgcttcagagattccagatgatgcccatcaccagggccgtgaaggcgcactgcataagctaatcatacgtttctgtgtgcaatataacttgccatatctactggacctctatctggacacctgtaatttgactcctgataaggattgtatccgtttactcaaagaaaacacaggtgattgcaagtgggcacaatggttactcttctccaggatcaaaggttatgagtatgaggcatcattctctaatgcacgttggaatttgtcaaagaaaatggtcaataatagtaatcctacggctgttgagatagatgaaatgttgtatacagtagatgatatggcagaacgaattggtgaaatgtctgcattagctaccttgatgtatgcttcagcaccaattcagaaatccatatgtactggaagtgtgaacagaagtggttcgtcttcccagtgcacattggagaacctggctccttgtctccagcaatttccaacactatggaaaacccttttttcagcttgttttggccaagatgaatatgggtgtttaaactactctgctggtaatgcgtatggaaaaagatcaatttcagagtacttgagatggcgctatagcgttttttcctctgctggaggagacacttcgttgttgcaaatgcttccatgttgggtcccaaagtctgttagaagattaattcaactatttgaacagggcccttttggaatgcaacttctatcaactgccccatcatctgaagagttattcactcacggtgtctccaattatatatacaattctactggatataccgaagccaatgcactgtccttagaagcatcgatccaaaaaagtgttgaagaagaattatattcttcccttgaggagaaagatgtgagagtggaacaccatttgcaccgtggtcgagccttagctgctttcaggcatcttattgctaagagggcttcacagttgaaatcagctagtgcacgtcaagtgatatccgcacagtctaatgttcaagcagatgtacaattgatacttgctcctctaagtcaagttgaacgatcaattcttatatcggtggctccactagctattacaaactttgaggactcgactctagttgcttcctgtatattcttgttggaactttgtggcctgtgtgccaacatgcttcgtttagatattgctgcactacgacgcatctcttcctactacaagtcagttcaagaaaataaacatgttgatctatctccaccaaggggcccagagctccatgtgcagtcccatggagctggtatagctcctgctctagctcgagcgctagctgaagattatgtccagtctgatcatctgcatgttttggagcagactcaaacctcgatggctcccaagcgggaacagacacaatatcctcttatttctattctgcaacaccttgaaaaagcaagtttgccatcattggaggaaggtaaaacttgtgggttttggcttttgactggtgttggtgatgcatctctttaccggtcgcaacagaatgaagcaagtcaacactggaatttggttactgaattctgtcaggcacactatctcccactaagtacaaaatatcttgcattactggccaatgacaatgattgggttggttttttaacagaagctcagatagctggattttctattgaagctgttattgaagtggcagccaaagagatcagggattcaagactgagggcccacatactgactgttctaaaaaatatgatatcacttcgaaggaaatcatctggtaatgtaccttcaggaagcagtgatccatctttctcttctgttgatggcaataatcccatggaacttttctgcattcttggagtctgtgaaaagcaaaaaaaccctggggaggcactcctaattaaagcaaaacaaatgcagtggtctttgcttgccatgattgcctcatgctttccggatgtaactcctctcacatgcttaagtgtttggcttgagattacagccgcaagggagatgtcctcgatcaaggtggatgatgtttccttgaaaatagcaaagaatgttggatctgctgttgaagccacaaataaattgccaagcactagcagaaatgttgaatttcgttacaataggaagaatccaaagcgaagacggttcctggaagcgtcacatgaaaagttatgtttctcaatagatagcacatgtgggccagattctgctgcaacttccaatcctatcagtattgttgaccatcagggaataggaaagccaatctcaggagaaaccataatgtccgttgatattgatgaaaggcttgcatctttatcaaacatggtagcagtgctttgcgaacaacaactgtttctaccattacttagagcttttgaaatgtttttgccttcctgctcccttctttccttcattcgttctctccaggcattttctcaaatgcgtcttcccgaggcttctgcacgtttggcatccttttcagcaagaataaaagatgaagcctctcatactcaactaaactcttccaaagaagtgtcagtaatagcagaatgggtggccactacagctgtaaaagctgcagatgctgtcctttcaaactgttcatcaatttatgagaagaggtgtctactgcagcttctttcagcagtggattttgctgatggtggcacttcatcatcttactttagccgaagatattggaagattaatctgtctgaaccatctttgtgtaaagatactgatgtgtacaactggaatgatttgatggatgatgcttctcttttaacatcattagaaaaggacggtcaatgggagcaagctcgaacttgggcaagacatctggagtcaagtggcatagcttgggaatctactcttgatcatgtcactgaatcacaggcagaagccatggttgctgaatggaaggagtttctttgggatatcccacaagaacgtgcagccttgtggggtcactgtcaatctctctttatgagatattctttccctcctttaaaggctggattatttttccttaagcatgccgaagcagtaggaaaagagataccagcacaagagcttcatgaaatattattgctctctttacaatggctaagtggaactatgactaaatcctctccggtctatcctcttcatcttttgcgggaaattgagactagggtgtggctcctggctgttgagtcagagagtcaatccaaggttgatggtgaatttgccacttctgctgttgctcataacaaagctgttggaaacagtagcagtattatagaacatactgctgatatcatcacaaaaatagacagtaacatgagcttgccgcacatgaaaattacagaaaggaatagcacacgggacagtttatcataccaacatgtgcaactctttgagtctaacagtgaagcatcttcaacaacaataaataacacgcgagcaaagcgaaggatgaaaacaaattcaccacttaaacgaggtgtcaatgacaatattgaaagtagagctaatgagctggataacaattctaacactttacatagttcaaagattggtgaacaagctagaaatttgctctctgaagaggaatttgtaaagatggaagcatctttatctggttgggaacaaaatgttaggcctgtagatatggagaaggctgtgctctctttactggaatttgggcaaataactgctgctaagcaactccaacaaaagctgtctccatcatatattcctgaagaacttgtccttgttgatgttgctttaagaattgccaaaaacagcagtaatggagagatcaatttgtcatgctttgacacacaggctcttcggatacttcagtcactgagagtagcaaatagctgcgatatgattagcccatcacaggttatggagatactagctgcgaaatgtggtgagggtcgtgggcgagctcttattaggagaataataggagttgttcgaactgctagattattgggactcccattttccgaagcatttgagaaacaaccaattgaacttctacagttgctttccctgaaagctcaggattcttttgatgaagcgaaatttctagtggagacacacatcatgcctgcatctagcattgcaagaattctagctgattcgttcctaaaggggcttttggccgcacatcgtggaggctatttggattcccaaaaggaagagggtcctgcacctctattgtggagatcaagtgacttcttaaagtgggcaaaactatgtccatcagaatcagaaattggccatgctttgatgcgtttggtaatgactggacatgaagtaccacatgcttgtgaggttgaactcctaatattgtcgcaccacttctacatgtcatcttcttgtcttgatggagtggatgttctcgtcacatttgcagcaaatagagtggactcatatgttttagaggaggatttttcttgtttagctcgtttgatcactggagtgagcaatttccattccttgagcttcattctttcaatccttgtagagaatggccaattggagttgctgcttcaaaagtattctgccactgacacagccacagggacgcttgcatcggttcgaggatttaggatggctgttattacatcactgaaacagtttatcccgaatgatgacgacgctctctctatggtatacaagcactttgacatgaagcatgaagctgcttctctccttgaatcacgtgcagagcaatacatgaacagctggttatcacgatatgataaggaacggcgaaatgatgagcttctggacgctatgcatcatcttgtagagacagctgaggttctttcaactattgatgctggccaaagaacacatcgtgcttgtgcccgtgcttctcttctgtcacttcagatccgaataccagatcttttgtggattggtctttctgagaccaatgcccggcggatttttgtggaacaatctaggttccaggaagctcttattgttgctgaagcatacaacataaatcaacctatagaatgggccccagtcttttggaatcaaatgctaaaaccggatctaatcgagcaattcgtggctgagtttgtctcagtgctgcccctgcagccaccaatgcttctcgagcttgcaaggttttacagggcggaggttgcagccaggggggagcagtcacacttctctgtctggctttcacctggaggcttgcctgcagagtgggtgaaacatcttggtagatccttcaggagcctgctgcgtagaacaagggacatgaggctgaggctgcagttggcaactctggcgacaggcttcattgacgtccttgttatttgcaatagagttttggacaaagtcccggacaatgctggcccgctgatcctaaggaagggacatggtggagcataccttcctctcatgtagatatttcccttctctttttggtgcattggattcagaacttaattcttggcagttaggctatatattgaaaggcagatgaatcttgcaaatattatatgtatcagctttctttggttcagcatctttaaagtcaagcttggctgcagtcttggacatggattctcatcgatgatgccatgaaagacttttgtgattgtatgtgcagcattttgagcggaaaagctggcagaaatgggatttttgcagcttcatccggcaggtgttttcgcacccatgatatattgtatgttttgcatgtacgaagatccgccccgtatttgttttcctcttttttttttggttttgcaagtgtcatgtaggtcgatttgctgtctgtgatttggactgcaagtctgcaaccagacggcagatgcgtcgagacgtcgagtgtccagtccagcgaaagcgtaaatacaaagcacatggacgttaaccagacggcagatagcctttgtttgttgttctactggtaatgttcttattttctaaccatggttttacaacccaggggatcttgtcctggcaactgctgagatcaactcatcacaagttgaatctcagagctctatcggatacctgtactcaggcagtcttcaaaacgttttctactattccccgagtgaagtctttagcatggggatactgttctgatgcttttgatgactcaagttttaatgaaattctagtggtatcaagtgatgcttctatcacagtccatgcattctgccattctcgcaaaagcacactaacagttaattcaatgtctgatgctaaagagttgcatggggagtggaaagagtggcgccctactgaatgttcagtgttggaggatgcaaatgttctctgaagactatggcggaaactgacagtgaatcaccacgacgttttcttagagcatcgtgcagttgtcagtgggagtgtctaaaagttttgtctagctcgtcatgttatttgatcggcttagttctgactcctaatgaatcagtacgttgtgaggcccatccatccaatgcggagtgtattttggttactgttctggagctaaaccactggggcatacagtggaactttgtggcagaccttcaggatgtatctgatggtattacgccaagtccaaaatgggttgattttcagttatcagatgtgtttcttgcctgccttaatacagcaggttttgttgccatttggaacgtgaaaactggtggtcttgtgacgtcattcagtgttcttcaacaatgcagaactgatctggagatgcctctgaggagctctatgtccattgtgacaaatttggacgagggaaatatccatgttgagaactttgttggcagaatgtttaagcggttagttttggcatcatattcttatcttcttgctgttgtagatgaggttggagtagtgtatgtgttctatgcggatgacatcttaaacttcaaagctaatgtgcacgaaaactttgatctgcctgttatgaatcagtttgctgattgtttttctatctgggaagctgctggtcatgagataggaagtctatcattttgtgctaatcagtccatacaacaagggtcacttagggggtgtttggtttcta

SEQ ID NO: 216944 - DNA, 11091 bp, Zea Mays
cggagggaacaactgccgcacggcacggagacagacgcggacagaccgagcgattggtcggcgaccacctcacctccgccgccatccactcctcggctcgggctccacgcaatgttactcgttaccatcattagctgttgatgggcatatgaacgatgtccacatctcgtcagatagatgatgggcctgctgtactacagttatgcagatggacattgctacaaccccatctcaaactatcaaaatttcgagaggcttttatatctccaacaaggcgtctttttggactgctctcagaccatggggatcttgtcctggcaactgctgagatcaactcatcacaagttgaatctcatagagctctatcggatacctgtactcaggcagtcttcaaaacgttttctactattccccgagtgaagtctttagcatggggatactgttctgatgcttttgatgactcaagttttaatgaaattctagtggtatcaagtgatgcttctatcacagtccatgcattctgccattctcgcaaaagcacactaacagttaattcaatgtctgatgctaaagagttgcatggggagtggaaagagtggcgccctactgaatgttcagtgttggaggatggtgagtcaggtccagaaaattggttttgttctttcctaactacagtcactgcgtctgtttctaatggaaaataccaagccagattgcccatgaaatctttattgcctaattcagcagaagttgtatcctttagcatatatgacattactctctctttcttgaaatattggtatagcaaatgttctctgaagactatggcggaaactgacagtgaatcaccacgacgttttcttagagcatcgtgcagttgtcagtgggagtgtctaaaagttttgtctagctcgtcatgttatttgatcggcttagttctgactcctaatgaatcagtacgttgtgaggcccatccatccaatgcggagtgtattttggttactgttctggagctaaaccactggggcatacagtggaactttgtggcagaccttcaggatgtatctgatggtattacgccaagtccaaaatgggttgattttcagttatcagatgtgtttcttgcctgccttaatacagcaggttttgttgccatttggaacgtgaaaactggtggtcttgtgacgtcattcagtgttcttcaacaatgcagaactgatctggagatgcctctgaggagctctatgtccattgtgacaaatttggacgagggaaatatccatgttgagaactttgttggcagaatgtttaagcggttagttttggcatcatattcttatcttcttgctgttgtagatgaggttggagtagtgtatgtgttctatgcggatgacatcttaaacttcaaagctaatgtgcacgaaaactttgatctgcctgttatgaatcagtttgctgattgtttttctatctgggaagctgctggtcatgagataggaagtctatcattttgtgctaatcagtccatacaacaagggtcacttagtctaaccaaattggttcctgagttctcagggaaaagcgatgatattgtcaggcctagagaaagaagaaaatatagatgcgatgaaaatgaagtggacagctggccaagtggctttgtcactgcagggcagatgaaagttggggcaggttatcgtcgcacaaattcctcttgtttctttaggaggataattcttcctccatgcagatcacagcaggatgtaattagcctgtgtccacttggactaactagaatttttaaaggttctattgcggatggaaacgagcatgtcaaaatttttcattccgagttgcttatgtattcatcttttcttggcaaaggagatattgatattggttttatggacgaaatgcttccatttaaaaaggattccacttttgtcggagattctgttgtttgctcctgccagggatatttgtatttaattacccagtatggcctttctgtggtccttcctccagtttctatatcatccttttcatctcaatgtgacgctatcaaattctggcaaatgggtcctgctgctggtagcacatgcaatgctctgaacttactatctgttgacaaatcagacacaagctggaaaacctggcaaatagaagtcctggatagagctttgttgtatgaaggtcccgcactagcagacaggctctgttgggagaatggatgggatttgaaattctctaggttacgttggctgcaattagcccttcattactcaatgattggtgatctagagcagtcactgaatttactcgctgaggttaatcttgcggaagaaggtgtattgcaactgctattggcatctattcataggttatctagtaggactggaagtgataatgaagccacagtgtcatccaagttaatggttttagctgttcgctttgcaacaagaatgataaaatgttacgggttacagaagcaaaccacagacaataattcagtaaagcttcatgaaatggctctccttttgatggcaataagaagtatccagagccgagtctctgcaaagaatcagaattctgtttggatgggagatgataagagctcattgaaaataggtacagaagtatttcagcatgattcttcagttccagttgttgtactggatggtgtttcatcagggccatcgggtgggttagatactcatgacaggcaagagttggttcctgtgtgtgttcctgatagcaacagcatgttagctctaacaccagttgggtcatctcttagtgcttcaacttttcatgatattgatactaataaaaggactacccaagttggaagtcaaaattttcaaggaaatatcaaggagatgattaacagatgggaaatgaataactttgacttaaaaattgtagtcagagaagcactgcagtctggtcgcctacctttggcagttcttcagttgcagcttttgcgccagagggaattagtttccaatgattattctgaagatgctttctctgaagttcatgaaattggaaggtccattgtgtatgacctgttgatgaagggtgaaactggattggctgtagcaacactagaaaggctaggaaatgatgtagagtcggacctaagacaacttatgcaaggtactgtcaggaggtcactaaggctacaaattgctgacgagatgaagaagcgtgggtacataacaccagatgactggaagatgctagaaactataacactaattgagcgtctctaccctagcagcagcttctggaacacatacttttacagggagaatgtcattcgtgatgctgcaaaaattgttacactgccaggagacgataaacctgtattggctctaaatattcgcaaccaccccattattgaatgtggtgatgttgacggagcagtgcttggttcttgggtgaacattaatgattgcactaaggagttttctgggagcaacatttctgatggttattgggcctgtgctgctgtgtggtcggatgcttggggtccgagaactgtggaccgtatattgctggaccagccttatcatgtacatgctcatgtcccatgggaatctcagtttgaatattttgttgctcataatgatgtggggaaagtctgcgaactcctggacatgattcccaatagcatactttcagaagggattattagagtaaacgtgaacagtttacaagctcctgccaacactctttctgatttaacagtccctgattacaacatgtacatatgtgactcagaagagcttgaacctttctgtgtggagataccacatgttaaagtatttagatctttgtggaatcatgagtcaacattatatattcgaatggtaatgcagcaggaattggcaaagagacacatctttatgaaagagtattggcaaagtactactgaaattatacctttgcttgctcgtgctggcatacttataaaggttggtctaaaggaagaatgttctacaatattttctgcttcagagattccagatgatgcccatcaccagggccgtgaaggcgcactgcataagctaatcatacgtttctgtgtgcaatataacttgccatatctactggacctctatctggacacctgtaatttgactcctgataaggattgtatccgtttactcaaagaaaacacaggtgattgcaagtgggcacaatggttactcttctccaggatcaaaggttatgagtatgaggcatcattctctaatgcacgttggaatttgtcaaagaaaatggtcaataatagtaatcctacggctgttgagatagatgaaatgttgtatacagtagatgatatggcagaacgaattggtgaaatgtctgcattagctaccttgatgtatgcttcagcaccaattcagaaatccatatgtactggaagtgtgaacagaagtggttcgtcttcccagtgcacattggagaacctggctccttgtctccagcaatttccaacactatggaaaacccttttttcagcttgttttggccaagatgaatatgggtgtttaaactactctgctggtaatgcgtatggaaaaagatcaatttcagagtacttgagatggcgctatagcgttttttcctctgctggaggagacacttcgttgttgcaaatgcttccatgttgggtcccaaagtctgttagaagattaattcaactatttgaacaggagaaagatgtgagagtggaacaccatttgcaccgtggtcgagccttagctgctttcaggcatcttattgctaagagggcttcacagttgaaatcagctagtgcacgtcaagtgatatccgcacagtctaatgttcaagcagatgtacaattgatacttgctcctctaagtcaagttgaacgatcaattcttatatcggtggctccactagctattacaaactttgaggactcgactctagttgcttcctgtatattcttgttggaactttgtggcctgtgtgccaacatgcttcgtttagatattgctgcactacgacgcatctcttcctactacaagtcagttcaagaaaataaacatgttgatctatctccaccaaggggcccagagctccatgtgcagtcccatggagctggtatagctcctgctctagctcgagcgctagctgaagattatgtccagtctgatcatctgcatgttttggagcagactcaaacctcgatggctcccaagcgggaacagacacaatatcctcttatttctattctgcaacaccttgaaaaagcaagtttgccatcattggaggaaggtaaaacttgtgggttttggcttttgactggtgttggtgatgcatctctttaccggtcgcaacagaatgaagcaagtcaacactggaatttggttactgaattctgtcaggcacactatctcccactaagtacaaaatatcttgcattactggccaatgacaatgattgggttggttttttaacagaagctcagatagctggattttctattgaagctgttattgaagtggcagccaaagagatcagggattcaagactgagggcccacatactgactgttctaaaaaatatgatatcacttcgaaggaaatcatctggtaatgtaccttcaggaagcagtgatccatctttctcttctgttgatggcaataatcccatggaacttttctgcattcttggagtctgtgaaaagcaaaaaaaccctggggaggcactcctaattaaagcaaaacaaatgcagtggtctttgcttgccatgattgcctcatgctttccggatgtaactcctctcacatgcttaagtgtttggcttgagattacagccgcaagggagatgtcctcgatcaaggtggatgatgtttccttgaaaatagcaaagaatgttggatctgctgttgaagccacaaataaattgccaagcactagcagaaatgttgaatttcgttacaataggaagaatccaaagcgaagacggttcctggaagcgtcacatgaaaagttatgtttctcaatagatagcacatgtgggccagattctgctgcaacttccaatcctatcagtattgttgaccatcagggaataggaaagccaatctcaggagaaaccataatgtccgttgatattgatgaaaggcttgcatctttatcaaacatggtagcagtgctttgcgaacaacaactgtttctaccattacttagagcttttgaaatgtttttgccttcctgctcccttctttccttcattcgttctctccaggcattttctcaaatgcgtcttcccgaggcttctgcacgtttggcatccttttcagcaagaataaaagatgaagcctctcatactcaactaaactcttccaaagaagtgtcagtaatagcagaatgggtggccactacagctgtaaaagctgcagatgctgtcctttcaaactgttcatcaatttatgagaagaggtgtctactgcagcttctttcagcagtggattttgctgatggtggcacttcatcatcttactttagccgaagatattggaagattaatctgtctgaaccatctttgtgtaaagatactgatgtgtacaactggaatgatttgatggatgatgcttctcttttaacatcattagaaaaggacggtcaatgggagcaagctcgaacttgggcaagacatctggagtcaagtggcatagcttgggaatctactcttgatcatgtcactgaatcacaggcagaagccatggttgctgaatggaaggagtttctttgggatatcccacaagaacgtgcagccttgtggggtcactgtcaatctctctttatgagatattctttccctcctttaaaggctggattatttttccttaagcatgccgaagcagtaggaaaagagataccagcacaagagcttcatgaaatattattgctctctttacaatggctaagtggaactatgactaaatcctctccggtctatcctcttcatcttttgcgggaaattgagactagggtgtggctcctggctgttgagtcagagagtcaatccaaggttgatggtgaatttgccacttctgctgttgctcataacaaagctgttggaaacagtagcagtattatagaacatactgctgatatcatcacaaaaatagacagtaacatgagcttgccgcacatgaaaattacagaaaggaatagcacacgggacagtttatcataccaacatgtgcaactctttgagtctaacagtgaagcatcttcaacaacaataaataacacgcgagcaaagcgaaggatgaaaacaaattcaccacttaaacgaggtgtcaatgacaatattgaaagtagagctaatgagctggataacaattctaacactttacatagttcaaagattggtgaacaagctagaaatttgctctctgaagaggaatttgtaaagatggaagcatctttatctggttgggaacaaaatgttaggcctgtagatatggagaaggctgtgctctctttactggaatttgggcaaataactgctgctaagcaactccaacaaaagctgtctccatcatatattcctgaagaacttgtccttgttgatgttgctttaagaattgccaaaaacagcagtaatggagagatcaatttgtcatgctttgacacacaggctcttcggatacttcagtcactgagagtagcaaatagctgcgatatgattagcccatcacaggttatggagatactagctgcgaaatgtggtgagggtcgtgggcgagctcttattaggagaataataggagttgttcgaactgctagattattgggactcccattttccgaagcatttgagaaacaaccaattgaacttctacagttgctttccctgaaagctcaggattcttttgatgaagcgaaatttctagtggagacacacatcatgcctgcatctagcattgcaagaattctagctgattcgttcctaaaggggcttttggccgcacatcgtggaggctatttggattcccaaaaggaagagggtcctgcacctctattgtggagatcaagtgacttcttaaagtgggcaaaactatgtccatcagaatcagaaattggccatgctttgatgcgtttggtaatgactggacatgaagtaccacatgcttgtgaggttgaactcctaatattgtcgcaccacttctacatgtcatcttcttgtcttgatggagtggatgttctcgtcacatttgcagcaaatagagtggactcatatgttttagaggaggatttttcttgtttagctcgtttgatcactggagtgagcaatttccattccttgagcttcattctttcaatccttgtagagaatggccaattggagttgctgcttcaaaagtattctgccactgacacagccacagggacgcttgcatcggttcgaggatttaggatggctgttattacatcactgaaacagtttatcccgaatgatgacgacgctctctctatggtatacaagcactttgacatgaagcatgaagctgcttctctccttgaatcacgtgcagagcaatacatgaacagctggttatcacgatatgataaggaacggcgaaatgatgagcttctggacgctatgcatcatcttgtagagacagctgaggttctttcaactattgatgctggccaaagaacacatcgtgcttgtgcccgtgcttctcttctgtcacttcagatccgaataccagatcttttgtggattggtctttctgagaccaatgcccggcggatttttgtggaacaatctaggttccaggaagctcttattgttgctgaagcatacaacataaatcaacctatagaatgggccccagtcttttggaatcaaatgctaaaaccggatctaatcgagcaattcgtggctgagtttgtctcagtgctgcccctgcagccaccaatgcttctcgagcttgcaaggttttacagggcggaggttgcagccaggggggagcagtcacacttctctgtctggctttcacctggaggcttgcctgcagagtgggtgaaacatcttggtagatccttcaggagcctgctgcgtagaacaagggacatgaggctgaggctgcagttggcaactctggcgacaggcttcattgacgtccttgttatttgcaatagagttttggacaaagtcccggacaatgctggcccgctgatcctaaggaagggacatggtggagcataccttcctctcatgtagatatttcccttctctttttggtgcattggattcagaacttaattcttggcagttaggctatatattgaaaggcagatgaatcttgcaaatattatatgtatcagctttctttggttcagcatctttaaagtcaagcttggctgcagtcttggacatggattctcatcgatgatgccatgaaagacttttgtgattgtatgtgcagcattttgagcggaaaagctggcagaaatgggatttttgcagcttcatccggcaggtgttttcgcacccatgatatattgtatgttttgcatgtacgaagatccgccccgtatttgttttcctcttttttttttggttttgcaagtgtcatgtaggtcgatttgctgtctgtgatttggactgcaagtctgcaaccagacggcagatgcgtcgagacgtcgagtgtccagtccagcgaaagcgtaaatacaaagcacatggacgttaaccagacggcagatagcctttgtttgttgttctactggtaatgttcttattttctaaccatggttttacaacccaggggatcttgtcctggcaactgctgagatcaactcatcacaagttgaatctcagagctctatcggatacctgtactcaggcagtcttcaaaacgttttctactattccccgagtgaagtctttagcatggggatactgttctgatgcttttgatgactcaagttttaatgaaattctagtggtatcaagtgatgcttctatcacagtccatgcattctgccattctcgcaaaagcacactaacagttaattcaatgtctgatgctaaagagttgcatggggagtggaaagagtggcgccctactgaatgttcagtgttggaggatggtgagtcaggtccagataattggttttgttcttttcctaactacagtcactgcgtctgtttctaatggaaaaataccaagccagattgcccatgaaatctttattgcctaattcagcagaagttgtatcctttagcatatatgacattactctctctttcttgaaatattggtatagcaaatgttctctgaagactatggcggaaactgacagtgaatcaccacgacgttttcttagagcatcgtgcagttgtcagtgggagtgtctaaaagttttgtctagctcgtcatgttatttgatcggcttagttctgactcctaatgaatcagtacgttgtgaggcccatccatccaatgcggagtgtattttggttactgttctggagctaaaccactggggcatacagtggaactttgtggcagaccttcaggatgtatctgatggtattacgccaagtccaaaatgggttgattttcagttatcagatgtgtttcttgcctgccttaatacagcaggttttgttgccatttggaacgtgaaaactggtggtcttgtgacgtcattcagtgttcttcaacaatgcagaactgatctggagatgcctctgaggagctctatgtccattgtgacaaatttggacgagggaaatatccatgttgagaactttgttggcagaatgtttaagcggttagttttggcatcatattcttatcttcttgctgttgtagatgaggttggagtagtgtatgtgttctatgcggatgacatcttaaacttcaaagctaatgtgcacgaaaactttgatctgcctgttatgaatcagtttgctgattgtttttctatctgggaagctgctggtcatgagataggaagtctatcattttgtgctaatcagtccatacaacaagggtcacttagggggtgtttggtttcta

SEQ ID NO: 216945 - DNA, 11200 bp, Zea Mays
gcggagggaacaactgccgcacggcacggagacagacgcggacagaccgagcgattggtcggcgaccacctcacctccgccgccatccactcctcggctcgggctccacgcaatgttactcgttaccatcattagctgttgatgggcatatgaacgatgtccacatctcgtcagatagatgatgggcctgctgtactacagttatgcagatggacattgctacaaccccatctcaaactatcaaaatttcgagaggcttttatatctccaacaaggcgtctttttggactgctctcagaccatggggatcttgtcctggcaactgctgagatcaactcatcacaagttgaatctcatagagctctatcggatacctgtactcaggcagtcttcaaaacgttttctactattccccgagtgaagtctttagcatggggatactgttctgatgcttttgatgactcaagttttaatgaaattctagtggtatcaagtgatgcttctatcacagtccatgcattctgccattctcgcaaaagcacactaacagttaattcaatgtctgatgctaaagagttgcatggggagtggaaagagtggcgccctactgaatgttcagtgttggaggatggtgagtcaggtccagaaaattggttttgttctttcctaactacagtcactgcgtctgtttctaatggaaaataccaagccagattgcccatgaaatctttattgcctaattcagcagaagttgtatcctttagcatatatgacattactctctctttcttgaaatattggtatagcaaatgttctctgaagactatggcggaaactgacagtgaatcaccacgacgttttcttagagcatcgtgcagttgtcagtgggagtgtctaaaagttttgtctagctcgtcatgttatttgatcggcttagttctgactcctaatgaatcagtacgttgtgaggcccatccatccaatgcggagtgtattttggttactgttctggagctaaaccactggggcatacagtggaactttgtggcagaccttcaggatgtatctgatggtattacgccaagtccaaaatgggttgattttcagttatcagatgtgtttcttgcctgccttaatacagcaggttttgttgccatttggaacgtgaaaactggtggtcttgtgacgtcattcagtgttcttcaacaatgcagaactgatctggagatgcctctgaggagctctatgtccattgtgacaaatttggacgagggaaatatccatgttgagaactttgttggcagaatgtttaagcggttagttttggcatcatattcttatcttcttgctgttgtagatgaggttggagtagtgtatgtgttctatgcggatgacatcttaaacttcaaagctaatgtgcacgaaaactttgatctgcctgttatgaatcagtttgctgattgtttttctatctgggaagctgctggtcatgagataggaagtctatcattttgtgctaatcagtccatacaacaagggtcacttagtctaaccaaattggttcctgagttctcagggaaaagcgatgatattgtcaggcctagagaaagaagaaaatatagatgcgatgaaaatgaagtggacagctggccaagtggctttgtcactgcagggcagatgaaagttggggcaggttatcgtcgcacaaattcctcttgtttctttaggaggataattcttcctccatgcagatcacagcaggatgtaattagcctgtgtccacttggactaactagaatttttaaaggttctattgcggatggaaacgagcatgtcaaaatttttcattccgagttgcttatgtattcatcttttcttggcaaaggagatattgatattggttttatggacgaaatgcttccatttaaaaaggattccacttttgtcggagattctgttgtttgctcctgccagggatatttgtatttaattacccagtatggcctttctgtggtccttcctccagtttctatatcatccttttcatctcaatgtgacgctatcaaattctggcaaatgggtcctgctgctggtagcacatgcaatgctctgaacttactatctgttgacaaatcagacacaagctggaaaacctggcaaatagaagtcctggatagagctttgttgtatgaaggtcccgcactagcagacaggctctgttgggagaatggatgggatttgaaattctctaggttacgttggctgcaattagcccttcattactcaatgattggtgatctagagcagtcactgaatttactcgctgaggttaatcttgcggaagaaggtgtattgcaactgctattggcatctattcataggttatctagtaggactggaagtgataatgaagccacagtgtcatccaagttaatggttttagctgttcgctttgcaacaagaatgataaaatgttacgggttacagaagcaaaccacagacaataattcagtaaagcttcatgaaatggctctccttttgatggcaataagaagtatccagagccgagtctctgcaaagaatcagaattctgtttggatgggagatgataagagctcattgaaaatagggccatcgggtgggttagatactcatgacaggcaagagttggttcctgtgtgtgttcctgatagcaacagcatgttagctctaacaccagttgggtcatctcttagtgcttcaacttttcatgatattgatactaataaaaggactacccaagttggaagtcaaaattttcaaggaaatatcaaggagatgattaacagatgggaaatgaataactttgacttaaaaattgtagtcagagaagcactgcagtctggtcgcctacctttggcagttcttcagttgcagcttttgcgccagagggaattagtttccaatgattattctgaagatgctttctctgaagttcatgaaattggaaggtccattgtgtatgacctgttgatgaagggtgaaactggattggctgtagcaacactagaaaggctaggaaatgatgtagagtcggacctaagacaacttatgcaaggtactgtcaggaggtcactaaggctacaaattgctgacgagatgaagaagcgtgggtacataacaccagatgactggaagatgctagaaactataacactaattgagcgtctctaccctagcagcagcttctggaacacatacttttacagggagaatgtcattcgtgatgctgcaaaaattgttacactgccaggagacgataaacctgtattggctctaaatattcgcaaccaccccattattgaatgtggtgatgttgacggagcagtgcttggttcttgggtgaacattaatgattgcactaaggagttttctgggagcaacatttctgatggttattgggcctgtgctgctgtgtggtcggatgcttggggtccgagaactgtggaccgtatattgctggaccagccttatcatgtacatgctcatgtcccatgggaatctcagtttgaatattttgttgctcataatgatgtggggaaagtctgcgaactcctggacatgattcccaatagcatactttcagaagggattattagagtaaacgtgaacagtttacaagctcctgccaacactctttctgatttaacagtccctgattacaacatgtacatatgtgactcagaagagcttgaacctttctgtgtggagataccacatgttaaagtatttagatctttgtggaatcatgagtcaacattatatattcgaatggtaatgcagcaggaattggcaaagagacacatctttatgaaagagtattggcaaagtactactgaaattatacctttgcttgctcgtgctggcatacttataaaggttggtctaaaggaagaatgttctacaatattttctgcttcagagattccagatgatgcccatcaccagggccgtgaaggcgcactgcataagctaatcatacgtttctgtgtgcaatataacttgccatatctactggacctctatctggacacctgtaatttgactcctgataaggattgtatccgtttactcaaagaaaacacaggtgattgcaagtgggcacaatggttactcttctccaggatcaaaggttatgagtatgaggcatcattctctaatgcacgttggaatttgtcaaagaaaatggtcaataatagtaatcctacggctgttgagatagatgaaatgttgtatacagtagatgatatggcagaacgaattggtgaaatgtctgcattagctaccttgatgtatgcttcagcaccaattcagaaatccatatgtactggaagtgtgaacagaagtggttcgtcttcccagtgcacattggagaacctggctccttgtctccagcaatttccaacactatggaaaacccttttttcagcttgttttggccaagatgaatatgggtgtttaaactactctgctggtaatgcgtatggaaaaagatcaatttcagagtacttgagatggcgctatagcgttttttcctctgctggaggagacacttcgttgttgcaaatgcttccatgttgggtcccaaagtctgttagaagattaattcaactatttgaacagggcccttttggaatgcaacttctatcaactgccccatcatctgaagagttattcactcacggtgtctccaattatatatacaattctactggatataccgaagccaatgcactgtccttagaagcatcgatccaaaaaagtgttgaagaagaattatattcttcccttgaggagaaagatgtgagagtggaacaccatttgcaccgtggtcgagccttagctgctttcaggcatcttattgctaagagggcttcacagttgaaatcagctagtgcacgtcaagtgatatccgcacagtctaatgttcaagcagatgtacaattgatacttgctcctctaagtcaagttgaacgatcaattcttatatcggtggctccactagctattacaaactttgaggactcgactctagttgcttcctgtatattcttgttggaactttgtggcctgtgtgccaacatgcttcgtttagatattgctgcactacgacgcatctcttcctactacaagtcagttcaagaaaataaacatgttgatctatctccaccaaggggcccagagctccatgtgcagtcccatggagctggtatagctcctgctctagctcgagcgctagctgaagattatgtccagtctgatcatctgcatgttttggagcagactcaaacctcgatggctcccaagcgggaacagacacaatatcctcttatttctattctgcaacaccttgaaaaagcaagtttgccatcattggaggaaggtaaaacttgtgggttttggcttttgactggtgttggtgatgcatctctttaccggtcgcaacagaatgaagcaagtcaacactggaatttggttactgaattctgtcaggcacactatctcccactaagtacaaaatatcttgcattactggccaatgacaatgattgggttggttttttaacagaagctcagatagctggattttctattgaagctgttattgaagtggcagccaaagagatcagggattcaagactgagggcccacatactgactgttctaaaaaatatgatatcacttcgaaggaaatcatctggtaatgtaccttcaggaagcagtgatccatctttctcttctgttgatggcaataatcccatggaacttttctgcattcttggagtctgtgaaaagcaaaaaaaccctggggaggcactcctaattaaagcaaaacaaatgcagtggtctttgcttgccatgattgcctcatgctttccggatgtaactcctctcacatgcttaagtgtttggcttgagattacagccgcaagggagatgtcctcgatcaaggtggatgatgtttccttgaaaatagcaaagaatgttggatctgctgttgaagccacaaataaattgccaagcactagcagaaatgttgaatttcgttacaataggaagaatccaaagcgaagacggttcctggaagcgtcacatgaaaagttatgtttctcaatagatagcacatgtgggccagattctgctgcaacttccaatcctatcagtattgttgaccatcagggaataggaaagccaatctcaggagaaaccataatgtccgttgatattgatgaaaggcttgcatctttatcaaacatggtagcagtgctttgcgaacaacaactgtttctaccattacttagagcttttgaaatgtttttgccttcctgctcccttctttccttcattcgttctctccaggcattttctcaaatgcgtcttcccgaggcttctgcacgtttggcatccttttcagcaagaataaaagatgaagcctctcatactcaactaaactcttccaaagaagtgtcagtaatagcagaatgggtggccactacagctgtaaaagctgcagatgctgtcctttcaaactgttcatcaatttatgagaagaggtgtctactgcagcttctttcagcagtggattttgctgatggtggcacttcatcatcttactttagccgaagatattggaagattaatctgtctgaaccatctttgtgtaaagatactgatgtgtacaactggaatgatttgatggatgatgcttctcttttaacatcattagaaaaggacggtcaatgggagcaagctcgaacttgggcaagacatctggagtcaagtggcatagcttgggaatctactcttgatcatgtcactgaatcacaggcagaagccatggttgctgaatggaaggagtttctttgggatatcccacaagaacgtgcagccttgtggggtcactgtcaatctctctttatgagatattctttccctcctttaaaggctggattatttttccttaagcatgccgaagcagtaggaaaagagataccagcacaagagcttcatgaaatattattgctctctttacaatggctaagtggaactatgactaaatcctctccggtctatcctcttcatcttttgcgggaaattgagactagggtgtggctcctggctgttgagtcagagagtcaatccaaggttgatggtgaatttgccacttctgctgttgctcataacaaagctgttggaaacagtagcagtattatagaacatactgctgatatcatcacaaaaatagacagtaacatgagcttgccgcacatgaaaattacagaaaggaatagcacacgggacagtttatcataccaacatgtgcaactctttgagtctaacagtgaagcatcttcaacaacaataaataacacgcgagcaaagcgaaggatgaaaacaaattcaccacttaaacgaggtgtcaatgacaatattgaaagtagagctaatgagctggataacaattctaacactttacatagttcaaagattggtgaacaagctagaaatttgctctctgaagaggaatttgtaaagatggaagcatctttatctggttgggaacaaaatgttaggcctgtagatatggagaaggctgtgctctctttactggaatttgggcaaataactgctgctaagcaactccaacaaaagctgtctccatcatatattcctgaagaacttgtccttgttgatgttgctttaagaattgccaaaaacagcagtaatggagagatcaatttgtcatgctttgacacacaggctcttcggatacttcagtcactgagagtagcaaatagctgcgatatgattagcccatcacaggttatggagatactagctgcgaaatgtggtgagggtcgtgggcgagctcttattaggagaataataggagttgttcgaactgctagattattgggactcccattttccgaagcatttgagaaacaaccaattgaacttctacagttgctttccctgaaagctcaggattcttttgatgaagcgaaatttctagtggagacacacatcatgcctgcatctagcattgcaagaattctagctgattcgttcctaaaggggcttttggccgcacatcgtggaggctatttggattcccaaaaggaagagggtcctgcacctctattgtggagatcaagtgacttcttaaagtgggcaaaactatgtccatcagaatcagaaattggccatgctttgatgcgtttggtaatgactggacatgaagtaccacatgcttgtgaggttgaactcctaatattgtcgcaccacttctacatgtcatcttcttgtcttgatggagtggatgttctcgtcacatttgcagcaaatagagtggactcatatgttttagaggaggatttttcttgtttagctcgtttgatcactggagtgagcaatttccattccttgagcttcattctttcaatccttgtagagaatggccaattggagttgctgcttcaaaagtattctgccactgacacagccacagggacgcttgcatcggttcgaggatttaggatggctgttattacatcactgaaacagtttatcccgaatgatgacgacgctctctctatggtatacaagcactttgacatgaagcatgaagctgcttctctccttgaatcacgtgcagagcaatacatgaacagctggttatcacgatatgataaggaacggcgaaatgatgagcttctggacgctatgcatcatcttgtagagacagctgaggttctttcaactattgatgctggccaaagaacacatcgtgcttgtgcccgtgcttctcttctgtcacttcagatccgaataccagatcttttgtggattggtctttctgagaccaatgcccggcggatttttgtggaacaatctaggttccaggaagctcttattgttgctgaagcatacaacataaatcaacctatagaatgggccccagtcttttggaatcaaatgctaaaaccggatctaatcgagcaattcgtggctgagtttgtctcagtgctgcccctgcagccaccaatgcttctcgagcttgcaaggttttacagggcggaggttgcagccaggggggagcagtcacacttctctgtctggctttcacctggaggcttgcctgcagagtgggtgaaacatcttggtagatccttcaggagcctgctgcgtagaacaagggacatgaggctgaggctgcagttggcaactctggcgacaggcttcattgacgtccttgttatttgcaatagagttttggacaaagtcccggacaatgctggcccgctgatcctaaggaagggacatggtggagcataccttcctctcatgtagatatttcccttctctttttggtgcattggattcagaacttaattcttggcagttaggctatatattgaaaggcagatgaatcttgcaaatattatatgtatcagctttctttggttcagcatctttaaagtcaagcttggctgcagtcttggacatggattctcatcgatgatgccatgaaagacttttgtgattgtatgtgcagcattttgagcggaaaagctggcagaaatgggatttttgcagcttcatccggcaggtgttttcgcacccatgatatattgtatgttttgcatgtacgaagatccgccccgtatttgttttcctcttttttttttggttttgcaagtgtcatgtaggtcgatttgctgtctgtgatttggactgcaagtctgcaaccagacggcagatgcgtcgagacgtcgagtgtccagtccagcgaaagcgtaaatacaaagcacatggacgttaaccagacggcagatagcctttgtttgttgttctactggtaatgttcttattttctaaccatggttttacaacccaggggatcttgtcctggcaactgctgagatcaactcatcacaagttgaatctcagagctctatcggatacctgtactcaggcagtcttcaaaacgttttctactattccccgagtgaagtctttagcatggggatactgttctgatgcttttgatgactcaagttttaatgaaattctagtggtatcaagtgatgcttctatcacagtccatgcattctgccattctcgcaaaagcacactaacagttaattcaatgtctgatgctaaagagttgcatggggagtggaaagagtggcgccctactgaatgttcagtgttggaggatggtgagtcaggtccagataattggttttgttcttttcctaactacagtcactgcgtctgtttctaatggaaaaataccaagccagattgcccatgaaatctttattgcctaattcagcagaagttgtatcctttagcatatatgacattactctctctttcttgaaatattggtatagcaaatgttctctgaagactatggcggaaactgacagtgaatcaccacgacgttttcttagagcatcgtgcagttgtcagtgggagtgtctaaaagttttgtctagctcgtcatgttatttgatcggcttagttctgactcctaatgaatcagtacgttgtgaggcccatccatccaatgcggagtgtattttggttactgttctggagctaaaccactggggcatacagtggaactttgtggcagaccttcaggatgtatctgatggtattacgccaagtccaaaatgggttgattttcagttatcagatgtgtttcttgcctgccttaatacagcaggttttgttgccatttggaacgtgaaaactggtggtcttgtgacgtcattcagtgttcttcaacaatgcagaactgatctggagatgcctctgaggagctctatgtccattgtgacaaatttggacgagggaaatatccatgttgagaactttgttggcagaatgtttaagcggttagttttggcatcatattcttatcttcttgctgttgtagatgaggttggagtagtgtatgtgttctatgcggatgacatcttaaacttcaaagctaatgtgcacgaaaactttgatctgcctgttatgaatcagtttgctgattgtttttctatctgggaagctgctggtcatgagataggaagtctatcattttgtgctaatcagtccatacaacaagggtcacttagggggtgtttggtttcta

SEQ ID NO: 216946 - DNA, 11271 bp, Zea Mays
aacggaagaagagagcggagggaacaactgccgcacggcacggagacagacgcggacagaccgagcgattggtcggcgaccacctcacctccgccgccatccactcctcggctcgggctccacgcaatgttactcgttaccatcattagctgttgatgggcatatgaacgatgtccacatctcgtcagatagatgatgggcctgctgtactacagttatgcagatggacattgctacaaccccatctcaaactatcaaaatttcgagaggcttttatatctccaacaaggcgtctttttggactgctctcagaccatggggatcttgtcctggcaactgctgagatcaactcatcacaagttgaatctcatagagctctatcggatacctgtactcaggcagtcttcaaaacgttttctactattccccgagtgaagtctttagcatggggatactgttctgatgcttttgatgactcaagttttaatgaaattctagtggtatcaagtgatgcttctatcacagtccatgcattctgccattctcgcaaaagcacactaacagttaattcaatgtctgatgctaaagagttgcatggggagtggaaagagtggcgccctactgaatgttcagtgttggaggatggtgagtcaggtccagaaaattggttttgttctttcctaactacagtcactgcgtctgtttctaatggaaaataccaagccagattgcccatgaaatctttattgcctaattcagcagaagttgtatcctttagcatatatgacattactctctctttcttgaaatattggtatagcaaatgttctctgaagactatggcggaaactgacagtgaatcaccacgacgttttcttagagcatcgtgcagttgtcagtgggagtgtctaaaagttttgtctagctcgtcatgttatttgatcggcttagttctgactcctaatgaatcagtacgttgtgaggcccatccatccaatgcggagtgtattttggttactgttctggagctaaaccactggggcatacagtggaactttgtggcagaccttcaggatgtatctgatggtattacgccaagtccaaaatgggttgattttcagttatcagatgtgtttcttgcctgccttaatacagcaggttttgttgccatttggaacgtgaaaactggtggtcttgtgacgtcattcagtgttcttcaacaatgcagaactgatctggagatgcctctgaggagctctatgtccattgtgacaaatttggacgagggaaatatccatgttgagaactttgttggcagaatgtttaagcggttagttttggcatcatattcttatcttcttgctgttgtagatgaggttggagtagtgtatgtgttctatgcggatgacatcttaaacttcaaagctaatgtgcacgaaaactttgatctgcctgttatgaatcagtttgctgattgtttttctatctgggaagctgctggtcatgagataggaagtctatcattttgtgctaatcagtccatacaacaagggtcacttagtctaaccaaattggttcctgagttctcagggaaaagcgatgatattgtcaggcctagagaaagaagaaaatatagatgcgatgaaaatgaagtggacagctggccaagtggctttgtcactgcagggcagatgaaagttggggcaggttatcgtcgcacaaattcctcttgtttctttaggaggataattcttcctccatgcagatcacagcaggatgtaattagcctgtgtccacttggactaactagaatttttaaaggttctattgcggatggaaacgagcatgtcaaaatttttcattccgagttgcttatgtattcatcttttcttggcaaaggagatattgatattggttttatggacgaaatgcttccatttaaaaaggattccacttttgtcggagattctgttgtttgctcctgccagggatatttgtatttaattacccagtatggcctttctgtggtccttcctccagtttctatatcatccttttcatctcaatgtgacgctatcaaattctggcaaatgggtcctgctgctggtagcacatgcaatgctctgaacttactatctgttgacaaatcagacacaagctggaaaacctggcaaatagaagtcctggatagagctttgttgtatgaaggtcccgcactagcagacaggctctgttgggagaatggatgggatttgaaattctctaggttacgttggctgcaattagcccttcattactcaatgattggtgatctagagcagtcactgaatttactcgctgaggttaatcttgcggaagaaggtgtattgcaactgctattggcatctattcataggttatctagtaggactggaagtgataatgaagccacagtgtcatccaagttaatggttttagctgttcgctttgcaacaagaatgataaaatgttacgggttacagaagcaaaccacagacaataattcagtaaagcttcatgaaatggctctccttttgatggcaataagaagtatccagagccgagtctctgcaaagaatcagaattctgtttggatgggagatgataagagctcattgaaaataggtacagaagtatttcagcatgattcttcagttccagttgttgtactggatggtgtttcatcagggccatcgggtgggttagatactcatgacaggcaagagttggttcctgtgtgtgttcctgatagcaacagcatgttagctctaacaccagttgggtcatctcttagtgcttcaacttttcatgatattgatactaataaaaggactacccaagttggaagtcaaaattttcaaggaaatatcaaggagatgattaacagatgggaaatgaataactttgacttaaaaattgtagtcagagaagcactgcagtctggtcgcctacctttggcagttcttcagttgcagcttttgcgccagagggaattagtttccaatgattattctgaagatgctttctctgaagttcatgaaattggaaggtccattgtgtatgacctgttgatgaagggtgaaactggattggctgtagcaacactagaaaggctaggaaatgatgtagagtcggacctaagacaacttatgcaaggtactgtcaggaggtcactaaggctacaaattgctgacgagatgaagaagcgtgggtacataacaccagatgactggaagatgctagaaactataacactaattgagcgtctctaccctagcagcagcttctggaacacatacttttacagggagaatgtcattcgtgatgctgcaaaaattgttacactgccaggagacgataaacctgtattggctctaaatattcgcaaccaccccattattgaatgtggtgatgttgacggagcagtgcttggttcttgggtgaacattaatgattgcactaaggagttttctgggagcaacatttctgatggttattgggcctgtgctgctgtgtggtcggatgcttggggtccgagaactgtggaccgtatattgctggaccagccttatcatgtacatgctcatgtcccatgggaatctcagtttgaatattttgttgctcataatgatgtggggaaagtctgcgaactcctggacatgattcccaatagcatactttcagaagggattattagagtaaacgtgaacagtttacaagctcctgccaacactctttctgatttaacagtccctgattacaacatgtacatatgtgactcagaagagcttgaacctttctgtgtggagataccacatgttaaagtatttagatctttgtggaatcatgagtcaacattatatattcgaatggtaatgcagcaggaattggcaaagagacacatctttatgaaagagtattggcaaagtactactgaaattatacctttgcttgctcgtgctggcatacttataaaggttggtctaaaggaagaatgttctacaatattttctgcttcagagattccagatgatgcccatcaccagggccgtgaaggcgcactgcataagctaatcatacgtttctgtgtgcaatataacttgccatatctactggacctctatctggacacctgtaatttgactcctgataaggattgtatccgtttactcaaagaaaacacaggtgattgcaagtgggcacaatggttactcttctccaggatcaaaggttatgagtatgaggcatcattctctaatgcacgttggaatttgtcaaagaaaatggtcaataatagtaatcctacggctgttgagatagatgaaatgttgtatacagtagatgatatggcagaacgaattggtgaaatgtctgcattagctaccttgatgtatgcttcagcaccaattcagaaatccatatgtactggaagtgtgaacagaagtggttcgtcttcccagtgcacattggagaacctggctccttgtctccagcaatttccaacactatggaaaacccttttttcagcttgttttggccaagatgaatatgggtgtttaaactactctgctgcgtatggaaaaagatcaatttcagagtacttgagatggcgctatagcgttttttcctctgctggaggagacacttcgttgttgcaaatgcttccatgttgggtcccaaagtctgttagaagattaattcaactatttgaacagggcccttttggaatgcaacttctatcaactgccccatcatctgaagagttattcactcacggtgtctccaattatatatacaattctactggatataccgaagccaatgcactgtccttagaagcatcgatccaaaaaagtgttgaagaagaattatattcttcccttgaggagaaagatgtgagagtggaacaccatttgcaccgtggtcgagccttagctgctttcaggcatcttattgctaagagggcttcacagttgaaatcagctagtgcacgtcaagtgatatccgcacagtctaatgttcaagcagatgtacaattgatacttgctcctctaagtcaagttgaacgatcaattcttatatcggtggctccactagctattacaaactttgaggactcgactctagttgcttcctgtatattcttgttggaactttgtggcctgtgtgccaacatgcttcgtttagatattgctgcactacgacgcatctcttcctactacaagtcagttcaagaaaataaacatgttgatctatctccaccaaggggcccagagctccatgtgcagtcccatggagctggtatagctcctgctctagctcgagcgctagctgaagattatgtccagtctgatcatctgcatgttttggagcagactcaaacctcgatggctcccaagcgggaacagacacaatatcctcttatttctattctgcaacaccttgaaaaagcaagtttgccatcattggaggaaggtaaaacttgtgggttttggcttttgactggtgttggtgatgcatctctttaccggtcgcaacagaatgaagcaagtcaacactggaatttggttactgaattctgtcaggcacactatctcccactaagtacaaaatatcttgcattactggccaatgacaatgattgggttggttttttaacagaagctcagatagctggattttctattgaagctgttattgaagtggcagccaaagagatcagggattcaagactgagggcccacatactgactgttctaaaaaatatgatatcacttcgaaggaaatcatctggtaatgtaccttcaggaagcagtgatccatctttctcttctgttgatggcaataatcccatggaacttttctgcattcttggagtctgtgaaaagcaaaaaaaccctggggaggcactcctaattaaagcaaaacaaatgcagtggtctttgcttgccatgattgcctcatgctttccggatgtaactcctctcacatgcttaagtgtttggcttgagattacagccgcaagggagatgtcctcgatcaaggtggatgatgtttccttgaaaatagcaaagaatgttggatctgctgttgaagccacaaataaattgccaagcactagcagaaatgttgaatttcgttacaataggaagaatccaaagcgaagacggttcctggaagcgtcacatgaaaagttatgtttctcaatagatagcacatgtgggccagattctgctgcaacttccaatcctatcagtattgttgaccatcagggaataggaaagccaatctcaggagaaaccataatgtccgttgatattgatgaaaggcttgcatctttatcaaacatggtagcagtgctttgcgaacaacaactgtttctaccattacttagagcttttgaaatgtttttgccttcctgctcccttctttccttcattcgttctctccaggcattttctcaaatgcgtcttcccgaggcttctgcacgtttggcatccttttcagcaagaataaaagatgaagcctctcatactcaactaaactcttccaaagaagtgtcagtaatagcagaatgggtggccactacagctgtaaaagctgcagatgctgtcctttcaaactgttcatcaatttatgagaagaggtgtctactgcagcttctttcagcagtggattttgctgatggtggcacttcatcatcttactttagccgaagatattggaagattaatctgtctgaaccatctttgtgtaaagatactgatgtgtacaactggaatgatttgatggatgatgcttctcttttaacatcattagaaaaggacggtcaatgggagcaagctcgaacttgggcaagacatctggagtcaagtggcatagcttgggaatctactcttgatcatgtcactgaatcacaggcagaagccatggttgctgaatggaaggagtttctttgggatatcccacaagaacgtgcagccttgtggggtcactgtcaatctctctttatgagatattctttccctcctttaaaggctggattatttttccttaagcatgccgaagcagtaggaaaagagataccagcacaagagcttcatgaaatattattgctctctttacaatggctaagtggaactatgactaaatcctctccggtctatcctcttcatcttttgcgggaaattgagactagggtgtggctcctggctgttgagtcagagagtcaatccaaggttgatggtgaatttgccacttctgctgttgctcataacaaagctgttggaaacagtagcagtattatagaacatactgctgatatcatcacaaaaatagacagtaacatgagcttgccgcacatgaaaattacagaaaggaatagcacacgggacagtttatcataccaacatgtgcaactctttgagtctaacagtgaagcatcttcaacaacaataaataacacgcgagcaaagcgaaggatgaaaacaaattcaccacttaaacgaggtgtcaatgacaatattgaaagtagagctaatgagctggataacaattctaacactttacatagttcaaagattggtgaacaagctagaaatttgctctctgaagaggaatttgtaaagatggaagcatctttatctggttgggaacaaaatgttaggcctgtagatatggagaaggctgtgctctctttactggaatttgggcaaataactgctgctaagcaactccaacaaaagctgtctccatcatatattcctgaagaacttgtccttgttgatgttgctttaagaattgccaaaaacagcagtaatggagagatcaatttgtcatgctttgacacacaggctcttcggatacttcagtcactgagagtagcaaatagctgcgatatgattagcccatcacaggttatggagatactagctgcgaaatgtggtgagggtcgtgggcgagctcttattaggagaataataggagttgttcgaactgctagattattgggactcccattttccgaagcatttgagaaacaaccaattgaacttctacagttgctttccctgaaagctcaggattcttttgatgaagcgaaatttctagtggagacacacatcatgcctgcatctagcattgcaagaattctagctgattcgttcctaaaggggcttttggccgcacatcgtggaggctatttggattcccaaaaggaagagggtcctgcacctctattgtggagatcaagtgacttcttaaagtgggcaaaactatgtccatcagaatcagaaattggccatgctttgatgcgtttggtaatgactggacatgaagtaccacatgcttgtgaggttgaactcctaatattgtcgcaccacttctacatgtcatcttcttgtcttgatggagtggatgttctcgtcacatttgcagcaaatagagtggactcatatgttttagaggaggatttttcttgtttagctcgtttgatcactggagtgagcaatttccattccttgagcttcattctttcaatccttgtagagaatggccaattggagttgctgcttcaaaagtattctgccactgacacagccacagggacgcttgcatcggttcgaggatttaggatggctgttattacatcactgaaacagtttatcccgaatgatgacgacgctctctctatggtatacaagcactttgacatgaagcatgaagctgcttctctccttgaatcacgtgcagagcaatacatgaacagctggttatcacgatatgataaggaacggcgaaatgatgagcttctggacgctatgcatcatcttgtagagacagctgaggttctttcaactattgatgctggccaaagaacacatcgtgcttgtgcccgtgcttctcttctgtcacttcagatccgaataccagatcttttgtggattggtctttctgagaccaatgcccggcggatttttgtggaacaatctaggttccaggaagctcttattgttgctgaagcatacaacataaatcaacctatagaatgggccccagtcttttggaatcaaatgctaaaaccggatctaatcgagcaattcgtggctgagtttgtctcagtgctgcccctgcagccaccaatgcttctcgagcttgcaaggttttacagggcggaggttgcagccaggggggagcagtcacacttctctgtctggctttcacctggaggcttgcctgcagagtgggtgaaacatcttggtagatccttcaggagcctgctgcgtagaacaagggacatgaggctgaggctgcagttggcaactctggcgacaggcttcattgacgtccttgttatttgcaatagagttttggacaaagtcccggacaatgctggcccgctgatcctaaggaagggacatggtggagcataccttcctctcatgtagatatttcccttctctttttggtgcattggattcagaacttaattcttggcagttaggctatatattgaaaggcagatgaatcttgcaaatattatatgtatcagctttctttggttcagcatctttaaagtcaagcttggctgcagtcttggacatggattctcatcgatgatgccatgaaagacttttgtgattgtatgtgcagcattttgagcggaaaagctggcagaaatgggatttttgcagcttcatccggcaggtgttttcgcacccatgatatattgtatgttttgcatgtacgaagatccgccccgtatttgttttcctcttttttttttggttttgcaagtgtcatgtaggtcgatttgctgtctgtgatttggactgcaagtctgcaaccagacggcagatgcgtcgagacgtcgagtgtccagtccagcgaaagcgtaaatacaaagcacatggacgttaaccagacggcagatagcctttgtttgttgttctactggtaatgttcttattttctaaccatggttttacaacccaggggatcttgtcctggcaactgctgagatcaactcatcacaagttgaatctcagagctctatcggatacctgtactcaggcagtcttcaaaacgttttctactattccccgagtgaagtctttagcatggggatactgttctgatgcttttgatgactcaagttttaatgaaattctagtggtatcaagtgatgcttctatcacagtccatgcattctgccattctcgcaaaagcacactaacagttaattcaatgtctgatgctaaagagttgcatggggagtggaaagagtggcgccctactgaatgttcagtgttggaggatggtgagtcaggtccagataattggttttgttcttttcctaactacagtcactgcgtctgtttctaatggaaaaataccaagccagattgcccatgaaatctttattgcctaattcagcagaagttgtatcctttagcatatatgacattactctctctttcttgaaatattggtatagcaaatgttctctgaagactatggcggaaactgacagtgaatcaccacgacgttttcttagagcatcgtgcagttgtcagtgggagtgtctaaaagttttgtctagctcgtcatgttatttgatcggcttagttctgactcctaatgaatcagtacgttgtgaggcccatccatccaatgcggagtgtattttggttactgttctggagctaaaccactggggcatacagtggaactttgtggcagaccttcaggatgtatctgatggtattacgccaagtccaaaatgggttgattttcagttatcagatgtgtttcttgcctgccttaatacagcaggttttgttgccatttggaacgtgaaaactggtggtcttgtgacgtcattcagtgttcttcaacaatgcagaactgatctggagatgcctctgaggagctctatgtccattgtgacaaatttggacgagggaaatatccatgttgagaactttgttggcagaatgtttaagcggttagttttggcatcatattcttatcttcttgctgttgtagatgaggttggagtagtgtatgtgttctatgcggatgacatcttaaacttcaaagctaatgtgcacgaaaactttgatctgcctgttatgaatcagtttgctgattgtttttctatctgggaagctgctggtcatgagataggaagtctatcattttgtgctaatcagtccatacaacaagggtcacttagggggtgtttggtttcta

SEQ ID NO: 216947 - DNA, 11224 bp, Zea Mays
cgaaatgaacggaagaagagagcggagggaacaactgccgcacggcacggagacagacgcggacagaccgagcgattggtcggcgaccacctcacctccgccgccatccactcctcggctcgggctccacgcaatgttactcgttaccatcattagctgttgatgggcatatgaacgatgtccacatctcgtcagatagatgatgggcctgctgtactacagttatgcagatggacattgctacaaccccatctcaaactatcaaaatttcgagaggcttttatatctccaacaaggcgtctttttggactgctctcagaccatggggatcttgtcctggcaactgctgagatcaactcatcacaagttgaatctcatagagctctatcggatacctgtactcaggcagtcttcaaaacgttttctactattccccgagtgaagtctttagcatggggatactgttctgatgcttttgatgactcaagttttaatgaaattctagtggtatcaagtgatgcttctatcacagtccatgcattctgccattctcgcaaaagcacactaacagttaattcaatgtctgatgctaaagagttgcatggggagtggaaagagtggcgccctactgaatgttcagtgttggaggatggtgagtcaggtccagaaaattggttttgttctttcctaactacagtcactgcgtctgtttctaatggaaaataccaagccagattgcccatgaaatctttattgcctaattcagcagaagttgtatcctttagcatatatgacattactctctctttcttgaaatattggtatagcaaatgttctctgaagactatggcggaaactgacagtgaatcaccacgacgttttcttagagcatcgtgcagttgtcagtgggagtgtctaaaagttttgtctagctcgtcatgttatttgatcggcttagttctgactcctaatgaatcagtacgttgtgaggcccatccatccaatgcggagtgtattttggttactgttctggagctaaaccactggggcatacagtggaactttgtggcagaccttcaggatgtatctgatggtattacgccaagtccaaaatgggttgattttcagttatcagatgtgtttcttgcctgccttaatacagcaggttttgttgccatttggaacgtgaaaactggtggtcttgtgacgtcattcagtgttcttcaacaatgcagaactgatctggagatgcctctgaggagctctatgtccattgtgacaaatttggacgagggaaatatccatgttgagaactttgttggcagaatgtttaagcggttagttttggcatcatattcttatcttcttgctgttgtagatgaggttggagtagtgtatgtgttctatgcggatgacatcttaaacttcaaagctaatgtgcacgaaaactttgatctgcctgttatgaatcagtttgctgattgtttttctatctgggaagctgctggtcatgagataggaagtctatcattttgtgctaatcagtccatacaacaagggtcacttagtctaaccaaattggttcctgagttctcagggaaaagcgatgatattgtcaggcctagagaaagaagaaaatatagatgcgatgaaaatgaagtggacagctggccaagtggctttgtcactgcagggcagatgaaagttggggcaggttatcgtcgcacaaattcctcttgtttctttaggaggataattcttcctccatgcagatcacagcaggatgtaattagcctgtgtccacttggactaactagaatttttaaaggttctattgcggatggaaacgagcatgtcaaaatttttcattccgagttgcttatgtattcatcttttcttggcaaaggagatattgatattggttttatggacgaaatgcttccatttaaaaaggattccacttttgtcggagattctgttgtttgctcctgccagggatatttgtatttaattacccagtatggcctttctgtggtccttcctccagtttctatatcatccttttcatctcaatgtgacgctatcaaattctggcaaatgggtcctgctgctggtagcacatgcaatgctctgaacttactatctgttgacaaatcagacacaagctggaaaacctggcaaatagaagtcctggatagagctttgttgtatgaaggtcccgcactagcagacaggctctgttgggagaatggatgggatttgaaattctctaggttacgttggctgcaattagcccttcattactcaatgattggtgatctagagcagtcactgaatttactcgctgaggttaatcttgcggaagaaggtgtattgcaactgctattggcatctattcataggttatctagtaggactggaagtgataatgaagccacagtgtcatccaagttaatggttttagctgttcgctttgcaacaagaatgataaaatgttacgggttacagaagcaaaccacagacaataattcagtaaagcttcatgaaatggctctccttttgatggcaataagaagtatccagagccgagtctctgcaaagaatcagaattctgtttggatgcagggagatgataagagctcattgaaaatagggccatcgggtgggttagatactcatgacaggcaagagttggttcctgtgtgtgttcctgatagcaacagcatgttagctctaacaccagttgggtcatctcttagtgcttcaacttttcatgatattgatactaataaaaggactacccaagttggaagtcaaaattttcaaggaaatatcaaggagatgattaacagatgggaaatgaataactttgacttaaaaattgtagtcagagaagcactgcagtctggtcgcctacctttggcagttcttcagttgcagcttttgcgccagagggaattagtttccaatgattattctgaagatgctttctctgaagttcatgaaattggaaggtccattgtgtatgacctgttgatgaagggtgaaactggattggctgtagcaacactagaaaggctaggaaatgatgtagagtcggacctaagacaacttatgcaaggtactgtcaggaggtcactaaggctacaaattgctgacgagatgaagaagcgtgggtacataacaccagatgactggaagatgctagaaactataacactaattgagcgtctctaccctagcagcagcttctggaacacatacttttacagggagaatgtcattcgtgatgctgcaaaaattgttacactgccaggagacgataaacctgtattggctctaaatattcgcaaccaccccattattgaatgtggtgatgttgacggagcagtgcttggttcttgggtgaacattaatgattgcactaaggagttttctgggagcaacatttctgatggttattgggcctgtgctgctgtgtggtcggatgcttggggtccgagaactgtggaccgtatattgctggaccagccttatcatgtacatgctcatgtcccatgggaatctcagtttgaatattttgttgctcataatgatgtggggaaagtctgcgaactcctggacatgattcccaatagcatactttcagaagggattattagagtaaacgtgaacagtttacaagctcctgccaacactctttctgatttaacagtccctgattacaacatgtacatatgtgactcagaagagcttgaacctttctgtgtggagataccacatgttaaagtatttagatctttgtggaatcatgagtcaacattatatattcgaatggtaatgcagcaggaattggcaaagagacacatctttatgaaagagtattggcaaagtactactgaaattatacctttgcttgctcgtgctggcatacttataaaggttggtctaaaggaagaatgttctacaatattttctgcttcagagattccagatgatgcccatcaccagggccgtgaaggcgcactgcataagctaatcatacgtttctgtgtgcaatataacttgccatatctactggacctctatctggacacctgtaatttgactcctgataaggattgtatccgtttactcaaagaaaacacaggtgattgcaagtgggcacaatggttactcttctccaggatcaaaggttatgagtatgaggcatcattctctaatgcacgttggaatttgtcaaagaaaatggtcaataatagtaatcctacggctgttgagatagatgaaatgttgtatacagtagatgatatggcagaacgaattggtgaaatgtctgcattagctaccttgatgtatgcttcagcaccaattcagaaatccatatgtactggaagtgtgaacagaagtggttcgtcttcccagtgcacattggagaacctggctccttgtctccagcaatttccaacactatggaaaacccttttttcagcttgttttggccaagatgaatatgggtgtttaaactactctgctggtaatgcgtatggaaaaagatcaatttcagagtacttgagatggcgctatagcgttttttcctctgctggaggagacacttcgttgttgcaaatgcttccatgttgggtcccaaagtctgttagaagattaattcaactatttgaacagggcccttttggaatgcaacttctatcaactgccccatcatctgaagagttattcactcacggtgtctccaattatatatacaattctactggatataccgaagccaatgcactgtccttagaagcatcgatccaaaaaagtgttgaagaagaattatattcttcccttgaggagaaagatgtgagagtggaacaccatttgcaccgtggtcgagccttagctgctttcaggcatcttattgctaagagggcttcacagttgaaatcagctagtgcacgtcaagtgatatccgcacagtctaatgttcaagcagatgtacaattgatacttgctcctctaagtcaagttgaacgatcaattcttatatcggtggctccactagctattacaaactttgaggactcgactctagttgcttcctgtatattcttgttggaactttgtggcctgtgtgccaacatgcttcgtttagatattgctgcactacgacgcatctcttcctactacaagtcagttcaagaaaataaacatgttgatctatctccaccaaggggcccagagctccatgtgcagtcccatggagctggtatagctcctgctctagctcgagcgctagctgaagattatgtccagtctgatcatctgcatgttttggagcagactcaaacctcgatggctcccaagcgggaacagacacaatatcctcttatttctattctgcaacaccttgaaaaagcaagtttgccatcattggaggaaggtaaaacttgtgggttttggcttttgactggtgttggtgatgcatctctttaccggtcgcaacagaatgaagcaagtcaacactggaatttggttactgaattctgtcaggcacactatctcccactaagtacaaaatatcttgcattactggccaatgacaatgattgggttggttttttaacagaagctcagatagctggattttctattgaagctgttattgaagtggcagccaaagagatcagggattcaagactgagggcccacatactgactgttctaaaaaatatgatatcacttcgaaggaaatcatctggtaatgtaccttcaggaagcagtgatccatctttctcttctgttgatggcaataatcccatggaacttttctgcattcttggagtctgtgaaaagcaaaaaaaccctggggaggcactcctaattaaagcaaaacaaatgcagtggtctttgcttgccatgattgcctcatgctttccggatgtaactcctctcacatgcttaagtgtttggcttgagattacagccgcaagggagatgtcctcgatcaaggtggatgatgtttccttgaaaatagcaaagaatgttggatctgctgttgaagccacaaataaattgccaagcactagcagaaatgttgaatttcgttacaataggaagaatccaaagcgaagacggttcctggaagcgtcacatgaaaagttatgtttctcaatagatagcacatgtgggccagattctgctgcaacttccaatcctatcagtattgttgaccatcagggaataggaaagccaatctcaggagaaaccataatgtccgttgatattgatgaaaggcttgcatctttatcaaacatggtagcagtgctttgcgaacaacaactgtttctaccattacttagagcttttgaaatgtttttgccttcctgctcccttctttccttcattcgttctctccaggcattttctcaaatgcgtcttcccgaggcttctgcacgtttggcatccttttcagcaagaataaaagatgaagcctctcatactcaactaaactcttccaaagaagtgtcagtaatagcagaatgggtggccactacagctgtaaaagctgcagatgctgtcctttcaaactgttcatcaatttatgagaagaggtgtctactgcagcttctttcagcagtggattttgctgatggtggcacttcatcatcttactttagccgaagatattggaagattaatctgtctgaaccatctttgtgtaaagatactgatgtgtacaactggaatgatttgatggatgatgcttctcttttaacatcattagaaaaggacggtcaatgggagcaagctcgaacttgggcaagacatctggagtcaagtggcatagcttgggaatctactcttgatcatgtcactgaatcacaggcagaagccatggttgctgaatggaaggagtttctttgggatatcccacaagaacgtgcagccttgtggggtcactgtcaatctctctttatgagatattctttccctcctttaaaggctggattatttttccttaagcatgccgaagcagtaggaaaagagataccagcacaagagcttcatgaaatattattgctctctttacaatggctaagtggaactatgactaaatcctctccggtctatcctcttcatcttttgcgggaaattgagactagggtgtggctcctggctgttgagtcagagagtcaatccaaggttgatggtgaatttgccacttctgctgttgctcataacaaagctgttggaaacagtagcagtattatagaacatactgctgatatcatcacaaaaatagacagtaacatgagcttgccgcacatgaaaattacagaaaggaatagcacacgggacagtttatcataccaacatgtgcaactctttgagtctaacagtgaagcatcttcaacaacaataaataacacgcgagcaaagcgaaggatgaaaacaaattcaccacttaaacgaggtgtcaatgacaatattgaaagtagagctaatgagctggataacaattctaacactttacatagttcaaagattggtgaacaagctagaaatttgctctctgaagaggaatttgtaaagatggaagcatctttatctggttgggaacaaaatgttaggcctgtagatatggagaaggctgtgctctctttactggaatttgggcaaataactgctgctaagcaactccaacaaaagctgtctccatcatatattcctgaagaacttgtccttgttgatgttgctttaagaattgccaaaaacagcagtaatggagagatcaatttgtcatgctttgacacacaggctcttcggatacttcagtcactgagagtagcaaatagctgcgatatgattagcccatcacaggttatggagatactagctgcgaaatgtggtgagggtcgtgggcgagctcttattaggagaataataggagttgttcgaactgctagattattgggactcccattttccgaagcatttgagaaacaaccaattgaacttctacagttgctttccctgaaagctcaggattcttttgatgaagcgaaatttctagtggagacacacatcatgcctgcatctagcattgcaagaattctagctgattcgttcctaaaggggcttttggccgcacatcgtggaggctatttggattcccaaaaggaagagggtcctgcacctctattgtggagatcaagtgacttcttaaagtgggcaaaactatgtccatcagaatcagaaattggccatgctttgatgcgtttggtaatgactggacatgaagtaccacatgcttgtgaggttgaactcctaatattgtcgcaccacttctacatgtcatcttcttgtcttgatggagtggatgttctcgtcacatttgcagcaaatagagtggactcatatgttttagaggaggatttttcttgtttagctcgtttgatcactggagtgagcaatttccattccttgagcttcattctttcaatccttgtagagaatggccaattggagttgctgcttcaaaagtattctgccactgacacagccacagggacgcttgcatcggttcgaggatttaggatggctgttattacatcactgaaacagtttatcccgaatgatgacgacgctctctctatggtatacaagcactttgacatgaagcatgaagctgcttctctccttgaatcacgtgcagagcaatacatgaacagctggttatcacgatatgataaggaacggcgaaatgatgagcttctggacgctatgcatcatcttgtagagacagctgaggttctttcaactattgatgctggccaaagaacacatcgtgcttgtgcccgtgcttctcttctgtcacttcagatccgaataccagatcttttgtggattggtctttctgagaccaatgcccggcggatttttgtggaacaatctaggttccaggaagctcttattgttgctgaagcatacaacataaatcaacctatagaatgggccccagtcttttggaatcaaatgctaaaaccggatctaatcgagcaattcgtggctgagtttgtctcagtgctgcccctgcagccaccaatgcttctcgagcttgcaaggttttacagggcggaggttgcagccaggggggagcagtcacacttctctgtctggctttcacctggaggcttgcctgcagagtgggtgaaacatcttggtagatccttcaggagcctgctgcgtagaacaagggacatgaggctgaggctgcagttggcaactctggcgacaggcttcattgacgtccttgttatttgcaatagagttttggacaaagtcccggacaatgctggcccgctgatcctaaggaagggacatggtggagcataccttcctctcatgtagatatttcccttctctttttggtgcattggattcagaacttaattcttggcagttaggctatatattgaaaggcagatgaatcttgcaaatattatatgtatcagctttctttggttcagcatctttaaagtcaagcttggctgcagtcttggacatggattctcatcgatgatgccatgaaagacttttgtgattgtatgtgcagcattttgagcggaaaagctggcagaaatgggatttttgcagcttcatccggcaggtgttttcgcacccatgatatattgtatgttttgcatgtacgaagatccgccccgtatttgttttcctcttttttttttggttttgcaagtgtcatgtaggtcgatttgctgtctgtgatttggactgcaagtctgcaaccagacggcagatgcgtcgagacgtcgagtgtccagtccagcgaaagcgtaaatacaaagcacatggacgttaaccagacggcagatagcctttgtttgttgttctactggtaatgttcttattttctaaccatggttttacaacccaggggatcttgtcctggcaactgctgagatcaactcatcacaagttgaatctcagagctctatcggatacctgtactcaggcagtcttcaaaacgttttctactattccccgagtgaagtctttagcatggggatactgttctgatgcttttgatgactcaagttttaatgaaattctagtggtatcaagtgatgcttctatcacagtccatgcattctgccattctcgcaaaagcacactaacagttaattcaatgtctgatgctaaagagttgcatggggagtggaaagagtggcgccctactgaatgttcagtgttggaggatggtgagtcaggtccagataattggttttgttcttttcctaactacagtcactgcgtctgtttctaatggaaaaataccaagccagattgcccatgaaatctttattgcctaattcagcagaagttgtatcctttagcatatatgacattactctctctttcttgaaatattggtatagcaaatgttctctgaagactatggcggaaactgacagtgaatcaccacgacgttttcttagagcatcgtgcagttgtcagtgggagtgtctaaaagttttgtctagctcgtcatgttatttgatcggcttagttctgactcctaatgaatcagtacgttgtgaggcccatccatccaatgcggagtgtattttggttactgttctggagctaaaccactggggcatacagtggaactttgtggcagaccttcaggatgtatctgatggtattacgccaagtccaaaatgggttgattttcagttatcagatgtgtttcttgcctgccttaatacagcaggttttgttgccatttggaacgtgaaaactggtggtcttgtgacgtcattcagtgttcttcaacaatgcagaactgatctggagatgcctctgaggagctctatgtccattgtgacaaatttggacgagggaaatatccatgttgagaactttgttggcagaatgtttaagcggttagttttggcatcatattcttatcttcttgctgttgtagatgaggttggagtagtgtatgtgttctatgcggatgacatcttaaacttcaaagctaatgtgcacgaaaactttgatctgcctgttatgaatcagtttgctgattgtttttctatctgggaagctgctggtcatgagataggaagtctatcattttgtgctaatcagtccatacaacaagggtcacttagggggtgtttggtttcta

SEQ ID NO: 216948 - DNA, 3453 bp, Zea Mays
attttttccgaacaaatccaccgtccatacatgccttattgccttttgcacattcaagaccgctctagtccctgctctacagctctagtcgattacagaaatttggacaaagcagaaggttcaggtcgtaagatcgcctagtccctgctcttcctggtcagtggccgttaccactgccccctctcctctcctctcgctcgtgcagaggaggagacagactccccccgtcgccgccctcgcgcctcctccgcccgcagctcaagccgagcgtcaccccgtcggctaccttccattctcgccgcacttctcccactgggcacctcgcgccctcgtgacggtataaatagcccctagtcactcctcggcgctcctcaaacccaccaaaccctagcccacttagcggcggcggcgctagaggtggaacgagaccttggcggaggtagcgagggtagcgctgctcgctcgctcgttgggtttccatcccctactgcctagagcgagctctacgcgacgatgagcagccttgtcgagcggctgcgcgtgcggtcggagaggcggccgcggtacgcgctcgacgagtccgacgacgacctcccgctgcgcgttggggccggaaaggggaaggatcaacagaacgacgcgcccgccgagcggatcgagcgcgaggacgcgaaagaagaagcttgccagcgctgtggaaaaagtgataatctagtctcttgttcaacatgtacatacaaatttcacagaaaatgcttggttccttgcttaaacatcacatctgataaatggagctgcccagaatgtgtaagtccattaacagagatggagaggattctagatattgaagtgctggaagcacctcgtgaagattctagttccacagagcctcgatcaaagaagatggagcgatatcttatcaagtggaaaggattatcatacattcactgctcttgggtttcagaaaaagaatattcagaagccgcgaatatacaccctcgtctgaggactaggttgaataacttcagaaggcaaaaggaagccatgaaaatagaagcagaaagatctggtgaggacatcgttgcaattagaccggagtggacaactgttgacaggatccttgctagcagaaaaaacttagttggcgatcgggaatactatgttaaatggaatgaacttacatatgaggaatgtacatgggaaaatgagtctgacatcacggtgttccaacctgagattgaacgcttcaatgagatccagttcaggcgtaagaaatctggtgacaagggcaaggccactcgggagccacgccaattcaaggagagccctacgtttctttctggtggcacactacatccctatcagcttgaagggttaaactttttgcgatattcgtggtttcataacaaacgcgtaatccttggtgatgagatgggtcttgggaaaacgatacaaagtattgcttttcttgcctcactctttgaagacaagtttggtccgcatctggtcgttgctcccctctcaaccctgcggaattgggagcgtgaatttgcaacttgggcacctcaaatgaatgttgtaatgtattttggagctgctgcttctcgtgacattattaggaagtacgagttttactacccaaaagagaaactgaagaagctgaagaaaaagaaatcttctccatctaatgaagataagaagcagtcaaggataagatttgatgtcttattgacgtcttatgagatgatcaacatggactcgtctattctaaaaaatatagaatgggagtgcttggttgtggatgaggggcatcggttgaaaaacaaagattccaagttgtttggtcaacttaaagattataataccaaacatcgtgttctattaacggggaccccagtccagaataatcttgatgagcttttcatgcttatgcacttccttgagggtgaaagttttgggagtataactgatctccaagaagagttcaaggatataaaccaagacaagcaaattgagaagcttcatggaatgctgaagccacatcttcttcgaagattcaagaaggatgttatgaaagaacttcctccaaaaaaggaattgattctacgagttgaattgacaagaaaacagaaggagtactataaggcaattctcaccaagaattatgaagtgttagcccgtcgtaatggtggacatacatctctaataaacgttgtaatggagttgcgcaaactctgttgccatggattcatgattgatgaacctgatcttgaacctgccaatccagaagaaggtttaaggaggcttctagattcatcaggtaagatgcagctgctggacaagatgatggtgaaactgaaagagcagggtcatagagttctaatttattcacagttccagcacatgttggacttgctggaggactatttaagttacaggaaatggacttatgaacgcatcgatggcaagataagtggcgctgataggcagatacggatagatcgcttcaacgctaagaattcaactaggttttgctttcttctttctactagagctggtggtctgggaataaacttggcaactgcagatactgtaatcatctatgacagtgattggaacccacatgcggatttgcaagctatggcaagagctcatcgcttaggacagactagtaaggtgatgatatacaggcttgttagccgaggtacaattgaggagcgaatgatgcagcttacaaaaaagaagattttattggagcacttagttgttggtcgactcaccaaagctaataatgtcaatcaggaggagttggatgatattatacgctatggatcaaaggagctttttgaagacgagaatgatgaatctcgccaaattcattatgacgaagctgcaattgagaggttgttagaccgtgatcaagttgacggtgatgaatctgtggaagatgaagaagaagatggattcttaaaaggattcaaggttgcaaactttgaatatatcgatgaggcaaaggctcaggcagaaaaagaggaggcacggagaaaggctgcagctgaggctgaaaattctgaaagaaactactgggatgaactattgaaggatagatatgatgtacagaaagttgaagaacatactgctatgggaaaagggaaaagaagccgcaaacagatggctgccgctgatgaagatgacattcatgatttaagttccgaagatgaggattactcattggaggatgacatttcagataatgacacaagtttgcaaggaaatatttctgggaagaggggccaatattctaagagaaaatcacgtaatgttgattctattccattgatggagggcgaaggacgtaccttgagagttcttggattcaaccatgctcaacgagcaatgttcctacagacactcaatagatgttgagatgctattacattgcgtgataaagca

SEQ ID NO: 216949 - DNA, 4946 bp, Zea Mays
attttttccgaacaaatccaccgtccatacatgccttattgccttttgcacattcaagaccgctctagtccctgctctacagctctagtcgattacagaaatttggacaaagcagaaggttcaggtcgtaagatcgcctagtccctgctcttcctggtcagtggccgttaccactgccccctctcctctcctctcgctcgtgcagaggaggagacagactccccccgtcgccgccctcgcgcctcctccgcccgcagctcaagccgagcgtcaccccgtcggctaccttccattctcgccgcacttctcccactgggcacctcgcgccctcgtgacggtataaatagcccctagtcactcctcggcgctcctcaaacccaccaaaccctagcccacttagcggcggcggcgctagaggtggaacgagaccttggcggaggtagcgagggtagcgctgctcgctcgctcgttgggtttccatcccctactgcctagagcgagctctacgcgacgatgagcagccttgtcgagcggctgcgcgtgcggtcggagaggcggccgcggtacgcgctcgacgagtccgacgacgacctcccgctgcgcgttggggccggaaaggggaaggatcaacagaacgacgcgcccgccgagcggatcgagcgcgaggacgcgaaagaagaagcttgccagcgctgtggaaaaagtgataatctagtctcttgttcaacatgtacatacaaatttcacagaaaatgcttggttccttgcttaaacatcacatctgataaatggagctgcccagaatgtgtaagtccattaacagagatggagaggattctagatattgaagtgctggaagcacctcgtgaagattctagttccacagagcctcgatcaaagaagatggagcgatatcttatcaagtggaaaggattatcatacattcactgctcttgggtttcagaaaaagaatattcagaagccgcgaatatacaccctcgtctgaggactaggttgaataacttcagaaggcaaaaggaagccatgaaaatagaagcagaaagatctggtgaggacatcgttgcaattagaccggagtggacaactgttgacaggatccttgctagcagaaaaaacttagttggcgatcgggaatactatgttaaatggaatgaacttacatatgaggaatgtacatgggaaaatgagtctgacatcacggtgttccaacctgagattgaacgcttcaatgagatccagttcaggcgtaagaaatctggtgacaagggcaaggccactcgggagccacgccaattcaaggagagccctacgtttctttctggtggcacactacatccctatcagcttgaagggttaaactttttgcgatattcgtggtttcataacaaacgcgtaatccttggtgatgagatgggtcttgggaaaacgatacaaagtattgcttttcttgcctcactctttgaagacaagtttggtccgcatctggtcgttgctcccctctcaaccctgcggaattgggagcgtgaatttgcaacttgggcacctcaaatgaatgttgtaatgtattttggagctgctgcttctcgtgacattattaggaagtacgagttttactacccaaaagagaaactgaagaagctgaagaaaaagaaatcttctccatctaatgaagataagaagcagtcaaggataagatttgatgtcttattgacgtcttatgagatgatcaacatggactcgtctattctaaaaaatatagaatgggagtgcttggttgtggatgaggggcatcggttgaaaaacaaagattccaagttgtttggtcaacttaaagattataataccaaacatcgtgttctattaacggggaccccagtccagaataatcttgatgagcttttcatgcttatgcacttccttgagggtgaaagttttgggagtataactgatctccaagaagagttcaaggatataaaccaagacaagcaaattgagaagcttcatggaatgctgaagccacatcttcttcgaagattcaagaaggatgttatgaaagaacttcctccaaaaaaggaattgattctacgagttgaattgacaagaaaacagaaggagtactataaggcaattctcaccaagaattatgaagtgttagcccgtcgtaatggtggacatacatctctaataaacgttgtaatggagttgcgcaaactctgttgccatggattcatgattgatgaacctgatcttgaacctgccaatccagaagaaggtttaaggaggcttctagattcatcaggtaagatgcagctgctggacaagatgatggtgaaactgaaagagcagggtcatagagttctaatttattcacagttccagcacatgttggacttgctggaggactatttaagttacaggaaatggacttatgaacgcatcgatggcaagataagtggcgctgataggcagatacggatagatcgcttcaacgctaagaattcaactaggttttgctttcttctttctactagagctggtggtctgggaataaacttggcaactgcagatactgtaatcatctatgacagtgattggaacccacatgcggatttgcaagctatggcaagagctcatcgcttaggacagactagtaaggtgatgatatacaggcttgttagccgaggtacaattgaggagcgaatgatgcagcttacaaaaaagaagattttattggagcacttagttgttggtcgactcaccaaagctaataatgtcaatcaggaggagttggatgatattatacgctatggatcaaaggagctttttgaagacgagaatgatgaatctcgccaaattcattatgacgaagctgcaattgagaggttgttagaccgtgatcaagttgacggtgatgaatctgtggaagatgaagaagaagatggattcttaaaaggattcaaggttgcaaactttgaatatatcgatgaggcaaaggctcaggcagaaaaagaggaggcacggagaaaggctgcagctgaggctgaaaattctgaaagaaactactgggatgaactattgaaggatagatatgatgtacagaaagttgaagaacatactgctatgggaaaagggaaaagaagccgcaaacagatggctgccgctgatgaagatgacattcatgatttaagttccgaagatgaggattactcattggaggatgacatttcagataatgacacaagtttgcaaggaaatatttctgggaagaggggccaatattctaagagaaaatcacgtaatgttgattctattccattgatggagggcgaaggacgtaccttgagagttcttggattcaaccatgctcaacgagcaatgttcctacagacactcaatagattcggttttcagaattatgactggaaagagtatcttcctcgtcttaaaggaaaaagtgtcgaggaaatccagagatatgctgaacttgtcatggcacatcttgttgaagaaattaatgattctgactatttttcagatggcgttccaaaggaaatgatgcgtgttgatgatgtactagtcaggatagcaaacatatcccttattgaggagaagatggctgccacaggaccaggaaaaattacaaacatttttcctaattacttgctctatgagttccaaggcttatctggtggaagaatatggaaagcggagcatgatctactgttactgagaggcatactgaagcatggatatgcaaggtggcagtatatatcagatgacagagagaatgggctttttgaggctgcacgacgagagcttcatctcccttcggttaatgaaataattggtgctcagttgaacgaggcaaatgggaatttggaaggtgcacaggaaggccaagcgaacacaacaagcatgtcgcattacaaggagatccagagaaagatagttgagttcttgagaaagagatatcatcttatggagagagccttgaatatggaatatgctgtggtacggtactaggcttttttccctgaacagataaagaaaaaaattcctgttcctgatgatattactgaacaaggtgttccagcaggacatgctccttttattccagatatcagtgaactgttgcgggaattgcccaatcttgagccaatttctaccaatgaattggtttctgagggcacagctggtcagttacaagttccccatctctacaataagatgtgtggagtgcttgaagagagtggtgcttatgcgctcagttccttctttggagacaagtccgcatcttctagtttggccaatagccttcgacagtttgaaactgtgtgcgagaatgtcgtcgaggccttgcgaccacaccaaaatggtactggcagtgccatcaaagaggaattggtagatgcagccaccaaagcagcagcagcagcagctcctcaacaagattcaggccatgatgcaccgcatgggcagtcttcgacagccaaggcggacatggaaatcgatggttgatttgtaggttccagagtggtaagaaagggaatccccctctaatcattatgtatactgtggtcagaatgtgcgctatatattgtaacatcaaagaaagcacctccaggcctgagggtgttactgctaatgcgtttggtttacttgttgtccttgtaatatgcatacacatttagaactcatgcagccattttgtgtgctcgaaccggtggatcgctgccctgttgtcttgtactgtgtttagggcctgtttggatacgaatggttaattataagacggggctaaagataagtacggataagtacggattagctatagttggctagcttgttggttaacaattagctaaactttggctagctagatggtaaacaattagttaaaagtttagcaaaagaattagttcacc

SEQ ID NO: 216950 - DNA, 3103 bp, Zea Mays
ctctcgctcgccctgctacctccgcccgcggcttcctctcccacaagagccaactgtcgccgtcgccggtgcctgcctagtgccgccagccagccagtgctgttcccgcgtcctgggcagcttgcgttgccgttgcgtgcgttcccggccaccaccacctggactggactggacggtcgctgtcgcctctcgcctcgcctggccccgtccccacgtcccgttttcggtgtcgctgtcttttgggctctacccgggcccgtcgctctctccctacctcccttttcgctttcccaactcctgcctgccccggcgctcagcaccgaagcaatcatggaggcgcgctgggttcgttcctgacctccgcccgccgctgccctcccccgcctcgtcgacaaatcacgccgcgccttttcttttcttttcttttctttctcagtttcaggtgttgttttgccactagctgctgcctgcctgctgccgccgccttttttccggctttcgcttttccgctctctgcaccagcctcaccctcccaaccgcgtctccgtccgctttctcttccgtcggggccggccgcacctcggacccatcaggtgctgctgtgctgggcgagttctcccccccttccttgcttttgtctggcattcgctcgctctagtttcgcgcaacccggccgccgccgcctcgggtttctcgcctgtggctttgagccgagaggttggggactcggtttccttcctgctctgagttgggtttcgcgcggctcggactttggccggcgggcgaataaaccggccggatgcttctgggcgctgcggccgcgaggatggaggagaagcgtgtgatcacggggagggagcgggaccagttccccgtcgggatgcgggtcctcgcggtcgacgacgaccccgtctgcctcaaggttctcgagaccctgctgcggcgctgccagtatcatgtaataacgaccaaccaggccatcaccgcgctgaagctgctaagggagaacagggacatgttcgatctggtcatcagcgacgtgcacatgcccgacatggacggattcaagctccttgagcttgtagggcttgagatggacctacctgtcatcatgttgtcagtgaacggggagacgaaatccgtgatgaaggggataacccatggcgcctgcgactatctcctgaaacccgtccgcatcgaagagctaaggaacatatggcagcacgtcgtcaggaggaagttcagcaagcgagagcgcagcaaccttgacgtctacaaagatttcaacaggctgccaggcgcggatccatgccacagccacggccacggccacggccagaccactgccggggcttccgaccagagcgggaggatcggcaggaagaggaaggaaatgcacagcgacgaggaggacgacggcgaggagaacgatttccaggagggcgacgagccctccgcggctaagaagccgagagtcgtctggtcgattgagctgcaccggaaattcgtcgcggccgtcaaccagcttgggattgatactgttccgaaaaggattcttgagcttatgaatgtggagaaactcaccagggaaaatgtcgcgagccatctacagaaatacaggctctatctgaaacggttaagtgctgtggcatcacagcaagctagcattgtcgccgcatttggaggtagagacccctttctccacatgggagcctttgaaggccttcagagctaccaacctttcgccccctgtgctgctctatcgtccttcatcccacaccacggctcgcttggtagaactaccgcggcagcattcggggtcccggagcttgctcctgccatcacagttcaagctgctgccagcaatggcatgataagccactgtgctggcgacgcaagcaagtttcagctctccggtatacaagaaaaccagcaaccaaatctgggacaaggctcggccacctctcttgggctgccccagctccaacagaagtggatccagcaagaaactggcgacttgtctgctgtcttctctgggagtgcactggctaacactctgtctggtgcactccagagagttgcgagcagtccattgccaccgcaagaacttttggagggcgtacaaaccaaagttagtgcccagccaccaataacaatggcatctgtgagttcagaacttgttgagaggactgttggagtttcggctaatttgcaggactccggtatatccccgcagggcactcttccaataaatgatggatttactgctgacaagttacagctgcaagatccattcgacagcaatggtggaacaaatttttcagtaaacatgcctgtttgtccctctggtagccttacagcatccagcaacgccaagggtggtgctagttcgtgcagtccagtgctgctcgctcctgatactgggagacattcaaactacttgcagtttggagttgcaggcaactctggacatgacatgaacgatattaaacaggaccatctgcatcaaggattgagcactggaggtttcaatcacgattttggcacctgtatgactgaacaaacagatccaaatgtgccgtatcttatgccacaaatgaagcctaacaccttgtcatcagaggataaactgaagcagaggaatatttatgatttggggattccaaagctccatggtggttttagctctagtagctgcaattttgatggtcttctcaattccatgatcaaagcggaaaaggatgatctctcattcacggatagcgacctggggtgcgacttctttccactcggtgcttgcatatgagacctcttaacaacccctcgtgcagattggccctcgacgggatgggatgggactacggcctacgggagaggttgtaaagtacactgcttaggagcattggccagtttatgctgcctaatgtgttactatgcttggtactgtgcacactagaaatgctagggatacaggtagctacggacatgccttgtaatctacatttcctcctcttcgaatgggaaatgaaagtgattatggttaggtaaaaaggagcaagtataatgctccaaattaacatcatcttcatcttaaaattttacc

SEQ ID NO: 216951 - DNA, 1296 bp, Zea Mays
ggaagacttcatcgccgtgcgcgcccgccataccgcgcaccgccacctccatcgcgcgccggccagcccccgctcctccacctccactacacgcgccggccagcccccactcctccacctccactgcacgcgccggccagcccccacttctccacctccaccgcgcgccggaagcccccgctcctccacctccactgtgcgcgccggccagcccgctcctccaccgcatcaggaaggcgagccagagatcgagcggcccgagaaaaggaggaaacacaagcttaatcagaagccgaagcccagggagctcaatccaatggagtggatcgctgaagcccggcaccagtcggcgcggccgcgggcgctgccgcattggcaggcagtgctgatgggaatcgggatggactgcatccgctaggcctctccatcgaccagtgggttcccctgctcaagttgtattgatttgcgtgcgcgcggtttctgccaatctggcgacctgcttcagaatctgatcttcaagacacattcagtgaagatttgttctcaggttgatctgtgcaattttgaaggcactcatggtgtcaagtgaggactggcaatttccaccagcgcgagacgttgatggtgtccatcttactgtatttagttgggttttagtacctcgtacctccaaaaggtttcagttaaaggacatgtcctggagatcaaagattcagctctgatgatgctaaggatgtagtccattaccaaacaatctcaccaaagagcttagctaaatctgttctcgaggaaggtggctggtcaaacttcatgttctcaagggaggatactcagaataatattgatgttgccattgtttttattggctcaaagctgcaatcgtcagacatatctaaagataagcaagttgatccagctttagcagacacactgaagccttggagtctggagcaaaaaaaagtggtggctgtattctcaaggaacatgagaccactgagctctggagtgaatgaaggacgtcgtctttggaagtcagacatcacctagagctagggtgtccattcttgacatgtttctcttagtgataggtggatactgtctagctaggaataaagtcttgagggattgatggacgcatgcatctccaattcctgtgtgttgtattactactggtacaatctccaattcctgtgaacttatgtatttggactgtgaatttgtgatatgaacatatatcaatgtgtttgaaatctgtattgtatgtgatattctgtattggatgtgatattatctgtg

SEQ ID NO: 216952 - DNA, 2241 bp, Zea Mays
aagacttcatcgccgtgcgcgcccgccataccgcgcaccgccacctccatcgcgcgccggccagcccccgctcctccacctccactacacgcgccggccagcccccactcctccacctccactgcacgcgccggccagcccccacttctccacctccaccgcgcgccggaagcccccgctcctccacctccactgtgcgcgccggccagcccgctcctccaccgcatcaggaaggcgagccagagatcgagcggcccgagaaaaggaggaaacacaagcttaatcagaagccgaagcccagggagctcaatccaatggagtggatcgctgaagcccggcaccagtcggcgcggccgcgggcgctgccgcattggcaggcagtgctgatgggaatcgggatggactgcatccgctaggcctctccatcgaccagtgggttcccctgctcaagttgtattgatttgcgtgcgcgcggtttctgccaatctggcgacctgcttcagaatctgatcttcaagacacattcagtgaagatttgttctcaggttgatctgtgcaattttgaaggcactcatggtgtcaagtgaggactggcaatttccaccagcgcgagacgttgatggtgtccatcttactgtatttagttgggttttagtacctcgtacctccaaaaggtttcagttaaaggacatgtcctggagatcaaaggtgactgagctaactgcaatctcttatttccttgcattttaggattttggttgcctggattctgcagctcttcattttgcaatatttgaaaaatagtcgagtagcctctagggcttaccatgcctaaaatggtgaggtaagtctattgcgcttctactgacatgaccatttaatcactgggacttcacactcaatacttttcttgaatatatagagatgataggaacattgctgcccatcagtaataatcttgtgccttgtttctatgggttgagcatccactgagattttacaaataaagttgataggccacattttgcacattcacatctgctagtaagattgttttctttccaaacagtaaatactttaaatcaggtaatggtatttattctggtgcagggtaatgtacaattgtgttcccttaaacacactttatgcttttcccctcaccttctatagaatttacccatgattccatggtgtacgattatgtgcagtgcagttgttgttagttctttagaaaacctcttgttgttagggccaagcgtaattagttcaaatatcgccacaatggttttcaagttgtcggtgcaggatatgactcatgtgctcttgtaatggtctgtactttaagaacagggtcgagaaatagtgaatgtttcagaacttttttttcattttctaccataggaaacttaatgtgttttgtgacaggatactactgtcaatgggaaagagaaccatgatcaagagataagttgcatcgtagacacaatgttactctgttcaatattgatgtcttttctgtttgcatagtgttaaccttagtcgaaatttctagctcatgacaaatatttattgtacctttaaatggttatttaagcaagaatatatgagcttactgtcatagaatgacctacattccatccaccttggtcatccagattcagctctgatgatgctaaggatgtagtccattaccaaacaatctcaccaaagagcttagctaaatctgttctcgaggaaggtggctggtcaaacttcatgttctcaagggaggatactcagaataatattgatgttgccattgtttttattggctcaaagctgcaatcgtcagacatatctaaagataagcaagttgatccagctttagcagacacactgaagccttggagtctggagcaaaaaaaagtggtggctgtattctcaaggaacatgagaccactgagctctggagtgaatgaaggacgtcgtctttggaagtcagacatcacctagagctagggtgtccattcttgacatgtttctcttagtgataggtggatactgtctagctaggaataaagtcttgagggattgatggacgcatgcatctccaattcctgtgtgttgtattactactggtacaatctccaattcctgtgaacttatgtatttggactgtgaatttgtgatatgaacatatatcaatgtgtttgaaatctgtattgtatgtgatattctgtattggatgtgatattatctgtg

SEQ ID NO: 216953 - DNA, 1558 bp, Zea Mays
tttttttattctgtactcactgaatggctttctgattacatttcaggttcatatggcctgtgtaatgcaagggcgtagagttggagtggcatactatgattcagatacacgccaactttttgtgttagaaatctgggaagacagcgttggggaatttcctctgattgatcttgtgaaatttcagtcaaaagcgagcacaatatacacaagcacaaaaacagaagaagcacttttgtcggctttacaaaggaatgatggtaacggtgaggctcctgttgtgaagctcacgaaaagctcaacattcagctatgagcaagcctggcacggaataagcataacaaggtcactagaacaaagtggtggaagcttaaaggggatgtggctcaaactttcaaggagagagatatcgaggagggcccttgggcagaagagggagacacaaacatcatgtggaggaagatggcgacatgcatccaaaagatagcttcagaagagtttgggttgagtcaaggaaacagaaggaaagttaaagacacttggtggtggaacgaagatgtccaaaaggctatcaaggagaagatagattgctacaaacgcttacatcatgacaagtgtgcagacaaaatagagaagtacaggatagcgaagaagtctgcaaagcgagcggttagtagagctcggggtcaagcctatgacgacctttatcaacggttgaacacaaagcagggagaaaaggatatctataggatggccaagatacgtgaaaggaagacaagggatgtcaaccaagtcaaatgcatcaaggatgaagcaaaccaactattagtgaagaatgaggagatgaagaacagatggaaggagtacttcaacaaattgttcaatggagggaatgagagttccacaatagaattggacgaaccattcgatgacaacaacaggggttttgtacgaaggatacaagaatatgaagttaaggaggcgctaaaaaggatgaaggtaggaaaggcgatgggccctgatggtatccctatcgaggtatggagatgccttggagacatagcgatagtatgggtgactaagcttttcaacaccatctttcggacaaacagaatgcccgacgagtggtggtggagtacgttagtaccaatcttcaagaacaaaggagatgttcaaagttgtactaattaatcttattaattagtgtaatgtggtgggccttggaaaaacacaaagcatcaacaaagtacattaatcttattaaagatatgtacactaatgttgtgacaagtgtccgaacaagtgatggagacaccgatgactttccaattaacataggactacatcaagggtcggctttgagcccttatcttttcgctttggtgatagatgtggtcacaagggacatacaaggagatataccgtggtgtatgctttttgccgatgatgtggtacttattgaggagattaggagtggtgtttcgcaaaagttggaattgtggaggcagacgctggaagcaaaaggttttaggcttagtaggtctaaaacagagtatatgaa

SEQ ID NO: 216954 - DNA, 870 bp, Zea Mays
tttttttattctgtactcactgaatggctttctgattacatttcaggttcatatggcctgtgtaatgcaagggcgtagaaatctgggaagacagcgttggggaatttcctctgattgatcttgaaaatgaacctttgggattcgtggaaaatgaaaccatatagctgacactttgtgatcctggttttacatcagtgaaatttcagtcaaaagcgagcacaatatacacaagcacaaaaacagaagaagcacttttgtcggctttacaaaggaatgatggtaacggtgaggctcctgttgtgaagctcacgaaaagctcaacattcagctatgagcaagcctggcacatattgatctacttgaaagttgcagctatggatgatggactaagtgcaaaagaaaggatatgctttcttaattccatgatggatcttggaagcgatgttcaagttcgtgctgctggaggtctcctagcaatattagacaatgagagacttcttgacaccattgagcagatggaaggtggagcatccattgcgatcgattctgtggtacagatctcattttatcctctgatggagataaattgaacacactgatgtgttgagatttaattatatcttctgtcatgggctgggcttatggccccagatggcagtatgccagatcagatccgaccttatatactgctgctgccctggccggccgcccgtacccaacagattgcccatgacaactttcagtggcagtctagtttgtaatcaacaaaattatatacataatttatttcctactttcaaggatatagttactctcacgtgtgtatctctagatttatggtgtatatggtccgacgaagtgtatatagac

SEQ ID NO: 216955 - DNA, 767 bp, Zea Mays
tttttttattctgtactcactgaatggctttctgattacatttcaggttcatatggcctgtgtaatgcaagggcgtagagttggagtggcatactatgattcagatacacgccaactttttgtgttagaaatctgggaagacagcgttggggaatttcctctgattgatcttgatggtaacggtgaggctcctgttgtgaagctcacgaaaagctcaacattcagctatgagcaagcctggcacatattgatctacttgaaagttgcagctatggatgatggactaagtgcaaaagaaaggatatgctttcttaattccatgatggatcttggaagcgatgttcaagttcgtgctgctggaggtctcctagcaatattagacaatgagagacttcttgacaccattgagcagatggaaggtggagcatccattgcgatcgattctgtggtacagatctcattttatcctctgatggagataaattgaacacactgatgtgttgagatttaattatatcttctgtcatgggctgggcttatggccccagatggcagtatgccagatcagatccgaccttatatactgctgctgccctggccggccgcccgtacccaacagattgcccatgacaactttcagtggcagtctagtttgtaatcaacaaaattatatacataatttatttcctactttcaaggatatagttactctcacgtgtgtatctctagatttatggtgtatatggtccgacgaagtgtatatagac

SEQ ID NO: 216956 - DNA, 848 bp, Zea Mays
tttttttattctgtactcactgaatggctttctgattacatttcaggttcatatggcctgtgtaatgcaagggcgtagagttggagtggcatactatgattcagatacacgccaactttttgtgttagaaatctgggaagacagcgttggggaatttcctctgattgatcttgtgaaatttcagtcaaaagcgagcacaatatacacaagcacaaaaacagaagaagcacttttgtcggctttacaaaggaatgatggtaacggtgaggctcctgttgtgaagctcacgaaaagctcaacattcagctatgagcaagcctggcacatattgatctacttgaaagttgcagctatggatgatggactaagtgcaaaagaaaggatatgctttcttaattccatgatggatcttggaagcgatgttcaagttcgtgctgctggaggtctcctagcaatattagacaatgagagacttcttgacaccattgagcagatggaaggtggagcatccattgcgatcgattctgtggtacagatctcattttatcctctgatggagataaattgaacacactgatgtgttgagatttaattatatcttctgtcatgggctgggcttatggccccagatggcagtatgccagatcagatccgaccttatatactgctgctgccctggccggccgcccgtacccaacagattgcccatgacaactttcagtggcagtctagtttgtaatcaacaaaattatatacataatttatttcctactttcaaggatatagttactctcacgtgtgtatctctagatttatggtgtatatggtccgacgaagtgtatatagac

SEQ ID NO: 216957 - DNA, 856 bp, Zea Mays
tttttttattctgtactcactgaatggctttctgattacatttcaggttcatatggcctgtgtaatgcaagggcgtagagttggagtggcatactatgattcagatacacgccaactttttgtgttagaaatctgggaagacagcgttggggaatttcctctgattgatcttgaaaatgaacctttgggattcgtggaaaatgaaaccatatagctgacactttgtgatcctggttttacatcagtgaaatttcagtcaaaagcgagcacaatatacacaagcacaaaaacagaagaagcacttttgtcggctttacaaaggaatgatggtaacggtgaggctcctgttgtgaagctcacgaaaagctcaacattcagctatgagcaagcctggcacatcttaattccatgatggatcttggaagcgatgttcaagttcgtgctgctggaggtctcctagcaatattagacaatgagagacttcttgacaccattgagcagatggaaggtggagcatccattgcgatcgattctgtggtacagatctcattttatcctctgatggagataaattgaacacactgatgtgttgagatttaattatatcttctgtcatgggctgggcttatggccccagatggcagtatgccagatcagatccgaccttatatactgctgctgccctggccggccgcccgtacccaacagattgcccatgacaactttcagtggcagtctagtttgtaatcaacaaaattatatacataatttatttcctactttcaaggatatagttactctcacgtgtgtatctctagatttatggtgtatatggtccgacgaagtgtatatagac

SEQ ID NO: 216958 - DNA, 798 bp, Zea Mays
tttttttattctgtactcactgaatggctttctgattacatttcaggttcatatggcctgtgtaatgcaagggcgtagaaatctgggaagacagcgttggggaatttcctctgattgatcttgtgaaatttcagtcaaaagcgagcacaatatacacaagcacaaaaacagaagaagcacttttgtcggctttacaaaggaatgatggtaacggtgaggctcctgttgtgaagctcacgaaaagctcaacattcagctatgagcaagcctggcacatattgatctacttgaaagttgcagctatggatgatggactaagtgcaaaagaaaggatatgctttcttaattccatgatggatcttggaagcgatgttcaagttcgtgctgctggaggtctcctagcaatattagacaatgagagacttcttgacaccattgagcagatggaaggtggagcatccattgcgatcgattctgtggtacagatctcattttatcctctgatggagataaattgaacacactgatgtgttgagatttaattatatcttctgtcatgggctgggcttatggccccagatggcagtatgccagatcagatccgaccttatatactgctgctgccctggccggccgcccgtacccaacagattgcccatgacaactttcagtggcagtctagtttgtaatcaacaaaattatatacataatttatttcctactttcaaggatatagttactctcacgtgtgtatctctagatttatggtgtatatggtccgacgaagtgtatatagac

SEQ ID NO: 216959 - DNA, 920 bp, Zea Mays
tttttttattctgtactcactgaatggctttctgattacatttcaggttcatatggcctgtgtaatgcaagggcgtagagttggagtggcatactatgattcagatacacgccaactttttgtgttagaaatctgggaagacagcgttggggaatttcctctgattgatcttgaaaatgaacctttgggattcgtggaaaatgaaaccatatagctgacactttgtgatcctggttttacatcagtgaaatttcagtcaaaagcgagcacaatatacacaagcacaaaaacagaagaagcacttttgtcggctttacaaaggaatgatggtaacggtgaggctcctgttgtgaagctcacgaaaagctcaacattcagctatgagcaagcctggcacatattgatctacttgaaagttgcagctatggatgatggactaagtgcaaaagaaaggatatgctttcttaattccatgatggatcttggaagcgatgttcaagttcgtgctgctggaggtctcctagcaatattagacaatgagagacttcttgacaccattgagcagatggaaggtggagcatccattgcgatcgattctgtggtacagatctcattttatcctctgatggagataaattgaacacactgatgtgttgagatttaattatatcttctgtcatgggctgggcttatggccccagatggcagtatgccagatcagatccgaccttatatactgctgctgccctggccggccgcccgtacccaacagattgcccatgacaactttcagtggcagtctagtttgtaatcaacaaaattatatacataatttatttcctactttcaaggatatagttactctcacgtgtgtatctctagatttatggtgtatatggtccgacgaagtgtatatagac

SEQ ID NO: 216960 - DNA, 3810 bp, Zea Mays
gcctccggctcccctctcgaaattcggttccgattcggttcccacaccagaccgaaccaaatacgcgctctcgtgctcgtgcgcgcgcgtcgcctcccaccccttcgtccgccgttgccgcccgcactctcccttccgccgtcgtgggcgcgcggcgacggggagagaggcaggtgaggtcggaagcggcggcggaggcgggcccccctccgtctactcttactcacgcacaccacggcgcccgcgagctagcgccctagcggagcggaggtcgaggcgggagaaaggcggttggggctccccggtgggcaggggggggggggggggggtcggaggcggggatggggctcgacggcacggtctcgggggtggtgtcgaggaaggtgctgccggcgtgtggtgggctctgctgcctctgcccttcgctgcgtccccgctccaggcagcccgtcaagcgctacaagaagatcctcatcgacatctttcccgcggagcaggaagacggaccaaatgtgaggaggattgggaggctttgcgagtatgttgctagaaatcctcatcgcgtgccaaagatcacagcttacttggagaggaggtgttacagggagttgagaaatgagcagtatgacattgtgaaagttgttgtgctaatataccgcaggctattggtctcttgtaatgaacaaatgccgttactggcaaatagtttattaagcatcatacaaacacttttggatcaatcaaggcaggatgacatgtgcatcattggctgtgaaaccttgtttgatttcatagtcactcaggtggatggtacatatcagttcaatttggaagagtttattccaagactctgcaaactttctcaaatagtaagggacaaagagaaggctaatgcactccgtgcagcagctctgcaatcactctctgctatgatctggtttatgggtgagctctctcatatctcctcagagtttgatagcgttgtccaagtagtattggaaagctatgagcctcgacaggtgcaaagtgacaatagtgccactgaaaatccaggttgtcagttggttgaagaggtccttaaacccgagggtcatgcctctccatcgacatttatattttctgtgataccttcttgggacagcatagttagtgactatggaggaattcaactgcttatggatgatgccaaggatccttatttttggtcaagggtctgtgtgcataacatggccaagctgtccagggaagcaactacattccgccgtgttatggagtccctattttgccacttcgataatactaattcatggtcatccaaaaatggtcttgcactttgtgttctattggacatgcaaatgttcatggaaaagtcagggacaaacattaatttgatgatatcagtactagttaagcatctcgaacacaaggccatactgaaacaacctgagatgcaactcagcattgtcgaagtgataactgctcttgcagaacaatcaagagctcaggcttcagcagcaaccatagttgctataagtgaccttgtgaggcatatgaaaaagacactgcatttagctcttggcagcaacgatttggaggtggtaaagtggaatgacaaactccgcatggcttttgatgaatgcatagtccagctgtcaaagaaggtaggtgatgctggaccagttcttgacatgatgtctgtgatgctagagaacatatcacacactcctcttattgctatagcaactacttctgctgtttatcgcacagctcaaataattgcttcaataccaaatttgtcatataagaacaaggtatttccagaagcactttttcatcaattgctgttagcgatggttcaccctgatcatgaaacacgtgttggtgcacaccgcatattttctgttgtccttgtcccatcttctgtttctccttttcccaatttgaaatccctagatcagtgtagaaagcatgatgtccagaggacactctcgagggttgtatctgtcttctcatcttcagctgctttatttgataagctgagaagggacagaaactcctttagagaatatttacatgaaggaagcatgaacagaattttgcatggtattgatgatgaaattgctacccctaatgacttgccaggctcgcaaagcttgagacaaagcctcagactttcttcagtgtctcacaaacattcttatacttctttaaaggaaggtcaaagtcccttgacagagtcaatcaacgaaatggaaacaattgtgttaagactaagcagccagcaggccactcttctgctctcatctatttggcgtcaagcactttctccaaaaaatgctcctcaaaactacgaagctattgctcatacatatagtttgcttctattgtttttgggatcaaagacaccaatttttgaggttcttgctcccagctttcagattgcattttctttaatgagccattcacttggaggaacagattcattgccaccatctcgccgccggtcattatttactctggctacatctatgattgtttttgcctcaagagctttcaatgtggcacctcttctcccaatttgtaaattaatgctcaatgatggaacgatggatccattccttcatctggtacatgagaacaaacttcaggctgtgaaggactatacggaagatccatcaacatcctatggctcacccgaggacaatcagaatgccttgaaatctctttcagtggtggaactaacaaatagttgctcccgagaatccatgattttaaccattatgaactccataagagatttaccagacttggagttagagaatataaggagtcaactgctgcgtgatttctcccctgatgacgtgtgcccaagtagcgctcactttcttgaatcacctggcaagattgcaccgccatgttctgatgatgacaccgactacgactatcaagaggtacacggaaattttgagcaggctgaacttatcgatctgagaaatgacaacaatacttatttggaagcctctgcaactacactggcggctatagctattcctgtgcccacaacaaatcttctcagtatcgatgaacttctagaaacagtcgtgaatgatgtgtcatctcagaccggagggcaatgtttggtgtcaatggccggagacatcccattccaggagatgactagccactgtgaggccttttcgatgggaaagcaccacaagatgtccctgctcatgagcttcaagcaaaacaagcaagcggccatggtcgtcgtgcctgacaatcagagcacaaacccgttcctcctgcagagcatcagtgccggcgaggcacaggttgctggcgacgtccagcagccgttcctgaggctgccaccgtcgagcccctacgacaacttcctcaaggctgctggctgctgatttccacttgcagaaaccctgccgtgtaaccaaccgaatgtatcgtgtgtgtacagtggccgtctgcctcaatcttattacaaactaaacaagggtttggatattacatgctgacttgttttcggatcatgccagggtcaatccaaaattcatttaattgtaggattccaaagcaaagggaatgatagatatataaggagaaaatgttgaaatctaacttagatcgtctccaacggcttatctatatggccgtactaacactgttttacattgtatactgtatcgttggtagagtgaaggttaaatataagaataaagaagatagtggtagtgtgagatcagttgtttttcattaagtagaaaaatatatgcacttaaatttcatcagataaac

SEQ ID NO: 216961 - DNA, 3814 bp, Zea Mays
cccacaccagaccgaaccaaatacgcgctctcgtgctcgtgcgcgcgcgtcgcctcccaccccttcgtccgccgttgccgcccgcactctcccttccgccgtcgtgggcgcgcggcgacggggagagaggcaggtgaggtcggaagcggcggcggaggcgggcccccctccgtctactcttactcacgcacaccacggcgcccgcgagctagcgccctagcggagcggaggtcgaggcgggagaaaggcggttggggctccccggtgggcaggggggggggggggggggtcggaggcggggatggggctcgacggcacggtctcgggggtggtgtcgaggaaggtgctgccggcgtgtggtgggctctgctgcctctgcccttcgctgcgtccccgctccaggcagcccgtcaagcgctacaagaagatcctcatcgacatctttcccgcggagcaggaagacggaccaaatgtgaggaggattgggaggctttgcgagtatgttgctagaaatcctcatcgcgtgccaaagatcacagcttacttggagaggaggtgttacagggagttgagaaatgagcagtatgacattgtgaaagttgttgtgctaatataccgcaggctattggtctcttgtaatgaacaaattgcaggccgttactggcaaatagtttattaagcatcatacaaacacttttggatcaatcaaggcaggatgacatgtgcatcattggctgtgaaaccttgtttgatttcatagtcactcaggtggatggtacatatcagttcaatttggaagagtttattccaagactctgcaaactttctcaaatagtaagggacaaagagaaggctaatgcactccgtgcagcagctctgcaatcactctctgctatgatctggtttatgggtgagctctctcatatctcctcagagtttgatagcgttgtccaagtagtattggaaagctatgagcctcgacaggtgcaaagtgacaatagtgccactgaaaatccaggttgtcagttggttgaagaggtccttaaacccgagggtcatgcctctccatcgacatttatattttctgtgataccttcttgggacagcatagttagtgactatggaggaattcaactgcttatggatgatgccaaggatccttatttttggtcaagggtctgtgtgcataacatggccaagctgtccagggaagcaactacattccgccgtgttatggagtccctattttgccacttcgataatactaattcatggtcatccaaaaatggtcttgcactttgtgttctattggacatgcaaatgttcatggaaaagtcagggacaaacattaatttgatgatatcagtactagttaagcatctcgaacacaaggccatactgaaacaacctgagatgcaactcagcattgtcgaagtgataactgctcttgcagaacaatcaagagctcaggcttcagcagcaaccatagttgctataagtgaccttgtgaggcatatgaaaaagacactgcatttagctcttggcagcaacgatttggaggtggtaaagtggaatgacaaactccgcatggcttttgatgaatgcatagtccagctgtcaaagaaggtaggtgatgctggaccagttcttgacatgatgtctgtgatgctagagaacatatcacacactcctcttattgctatagcaactacttctgctgtttatcgcacagctcaaataattgcttcaataccaaatttgtcatataagaacaaggtatttccagaagcactttttcatcaattgctgttagcgatggttcaccctgatcatgaaacacgtgttggtgcacaccgcatattttctgttgtccttgtcccatcttctgtttctccttttcccaatttgaaatccctagatcagtgtagaaagcatgatgtccagaggacactctcgagggttgtatctgtcttctcatcttcagctgctttatttgataagctgagaagggacagaaactcctttagagaatatttacatgaaggaagcatgaacagaattttgcatggtattgatgatgaaattgctacccctaatgacttgccaggctcgcaaagcttgagacaaagcctcagactttcttcagtgtctcacaaacattcttatacttctttaaaggaaggtcaaagtcccttgacagagtcaatcaacgaaatggaaacaattgtgttaagactaagcagccagcaggccactcttctgctctcatctatttggcgtcaagcactttctccaaaaaatgctcctcaaaactacgaagctattgctcatacatatagtttgcttctattgtttttgggatcaaagacaccaatttttgaggttcttgctcccagctttcagattgcattttctttaatgagccattcacttggaggaacagattcattgccaccatctcgccgccggtcattatttactctggctacatctatgattgtttttgcctcaagagctttcaatgtggcacctcttctcccaatttgtaaattaatgctcaatgatggaacgatggatccattccttcatctggtacatgagaacaaacttcaggctgtgaaggactatacggaagatccatcaacatcctatggctcacccgaggacaatcagaatgccttgaaatctctttcagtggtggaactaacaaatagttgctcccgagaatccatgattttaaccattatgaactccataagagatttaccagacttggagttagagaatataaggagtcaactgctgcgtgatttctcccctgatgacgtgtgcccaagtagcgctcactttcttgaatcacctggcaagattgcaccgccatgttctgatgatgacaccgactacgactatcaagaggtacacggaaattttgagcaggctgaacttatcgatctgagaaatgacaacaatacttatttggaagcctctgcaactacactggcggctatagctattcctgtgcccacaacaaatcttctcagtatcgatgaacttctagaaacagtcgtgaatgatgtgtcatctcagaccggagggcaatgtttggtgtcaatggccggagacatcccattccaggagatgactagccactgtgaggccttttcgatgggaaagcaccacaagatgtccctgctcatgagcttcaagcaaaacaagcaagcggccatggtcgtcgtgcctgacaatcaggttagccacgctgaagcagcacatacctccgacaagcagagcacaaacccgttcctcctgcagagcatcagtgccggcgaggcacaggttgctggcgacgtccagcagccgttcctgaggctgccaccgtcgagcccctacgacaacttcctcaaggctgctggctgctgatttccacttgcagaaaccctgccgtgtaaccaaccgaatgtatcgtgtgtgtacagtggccgtctgcctcaatcttattacaaactaaacaagggtttggatattacatgctgacttgttttcggatcatgccagggtcaatccaaaattcatttaattgtaggattccaaagcaaagggaatgatagatatataaggagaaaatgttgaaatctaacttagatcgtctccaacggcttatctatatggccgtactaacactgttttacattgtatactgtatcgttggtagagtgaaggttaaatataagaataaagaagatagtggtagtgtgagatcagttgtttttcattaagtagaaaaatatatgcacttaaatttcatcagataaac

SEQ ID NO: 216962 - DNA, 3423 bp, Zea Mays
ccaaatacgcgctctcgtgctcgtgcgcgcgcgtcgcctcccaccccttcgtccgccgttgccgcccgcactctcccttccgccgtcgtgggcgcgcggcgacggggagagaggcaggtgaggtcggaagcggcggcggaggcgggcccccctccgtctactcttactcacgcacaccacggcgcccgcgagctagcgccctagcggagcggaggtcgaggcgggagaaaggcggttggggctccccggtgggcaggggggggggggggggggtcggaggcggggatggggctcgacggcacggtctcgggggtggtgtcgaggaaggtgctgccggcgtgtggtgggctctgctgcctctgcccttcgctgcgtccccgctccaggcagcccgtcaagcgctacaagaagatcctcatcgacatctttcccgcggagcaggaagacggaccaaatgtgaggaggattgggaggctttgcgagtatgttgctagaaatcctcatcgcgtgccaaagatcacagcttacttggagaggaggtgttacagggagttgagaaatgagcagtatgacattgtgaaagttgttgtgctaatataccgcaggctattggtctcttgtaatgaacaaatgccgttactggcaaatagtttattaagcatcatacaaacacttttggatcaatcaaggcaggatgacatgtgcatcattggctgtgaaaccttgtttgatttcatagtcactcaggtggatggtacatatcagttcaatttggaagagtttattccaagactctgcaaactttctcaaatagtaagggacaaagagaaggctaatgcactccgtgcagcagctctgcaatcactctctgctatgatctggtttatgggtgagctctctcatatctcctcagagtttgatagcgttgtccaagtagtattggaaagctatgagcctcgacaggtgcaaagtgacaatagtgccactgaaaatccaggttgtcagttggttgaagaggtccttaaacccgagggtcatgcctctccatcgacatttatattttctgtgataccttcttgggacagcatagttagtgactatggaggaattcaactgcttatggatgatgccaaggatccttatttttggtcaagggtctgtgtgcataacatggccaagctgtccagggaagcaactacattccgccgtgttatggagtccctattttgccacttcgataatactaattcatggtcatccaaaaatggtcttgcactttgtgttctattggacatgcaaatgttcatggaaaagtcagggacaaacattaatttgatgatatcagtactagttaagcatctcgaacacaaggccatactgaaacaacctgagatgcaactcagcattgtcgaagtgataactgctcttgcagaacaatcaagagctcaggcttcagcagcaaccatagttgctataagtgaccttgtgaggcatatgaaaaagacactgcatttagctcttggcagcaacgatttggaggtggtaaagtggaatgacaaactccgcatggcttttgatgaatgcatagtccagctgtcaaagaaggtaggtgatgctggaccagttcttgacatgatgtctgtgatgctagagaacatatcacacactcctcttattgctatagcaactacttctgctgtttatcgcacagctcaaataattgcttcaataccaaatttgtcatataagaacaaggctcgcaaagcttgagacaaagcctcagactttcttcagtgtctcacaaacattcttatacttctttaaaggaaggtcaaagtcccttgacagagtcaatcaacgaaatggaaacaattgtgttaagactaagcagccagcaggccactcttctgctctcatctatttggcgtcaagcactttctccaaaaaatgctcctcaaaactacgaagctattgctcatacatatagtttgcttctattgtttttgggatcaaagacaccaatttttgaggttcttgctcccagctttcagattgcattttctttaatgagccattcacttggaggaacagattcattgccaccatctcgccgccggtcattatttactctggctacatctatgattgtttttgcctcaagagctttcaatgtggcacctcttctcccaatttgtaaattaatgctcaatgatggaacgatggatccattccttcatctggtacatgagaacaaacttcaggctgtgaaggactatacggaagatccatcaacatcctatggctcacccgaggacaatcagaatgccttgaaatctctttcagtggtggaactaacaaatagttgctcccgagaatccatgattttaaccattatgaactccataagagatttaccagacttggagttagagaatataaggagtcaactgctgcgtgatttctcccctgatgacgtgtgcccaagtagcgctcactttcttgaatcacctggcaagattgcaccgccatgttctgatgatgacaccgactacgactatcaagaggtacacggaaattttgagcaggctgaacttatcgatctgagaaatgacaacaatacttatttggaagcctctgcaactacactggcggctatagctattcctgtgcccacaacaaatcttctcagtatcgatgaacttctagaaacagtcgtgaatgatgtgtcatctcagaccggagggcaatgtttggtgtcaatggccggagacatcccattccaggagatgactagccactgtgaggccttttcgatgggaaagcaccacaagatgtccctgctcatgagcttcaagcaaaacaagcaagcggccatggtcgtcgtgcctgacaatcagagcacaaacccgttcctcctgcagagcatcagtgccggcgaggcacaggttgctggcgacgtccagcagccgttcctgaggctgccaccgtcgagcccctacgacaacttcctcaaggctgctggctgctgatttccacttgcagaaaccctgccgtgtaaccaaccgaatgtatcgtgtgtgtacagtggccgtctgcctcaatcttattacaaactaaacaagggtttggatattacatgctgacttgttttcggatcatgccagggtcaatccaaaattcatttaattgtaggattccaaagcaaagggaatgatagatatataaggagaaaatgttgaaatctaacttagatcgtctccaacggcttatctatatggccgtactaacactgttttacattgtatactgtatcgttggtagagtgaaggttaaatataagaataaagaagatagtggtagtgtgagatcagttgtttttcattaagtagaaaaatatatgcacttaaatttcatcagataaac

SEQ ID NO: 216963 - DNA, 3493 bp, Zea Mays
ccaaatacgcgctctcgtgctcgtgcgcgcgcgtcgcctcccaccccttcgtccgccgttgccgcccgcactctcccttccgccgtcgtgggcgcgcggcgacggggagagaggcaggtgaggtcggaagcggcggcggaggcgggcccccctccgtctactcttactcacgcacaccacggcgcccgcgagctagcgccctagcggagcggaggtcgaggcgggagaaaggcggttggggctccccggtgggcaggggggggggggggggggtcggaggcggggatggggctcgacggcacggtctcgggggtggtgtcgaggaaggtgctgccggcgtgtggtgggctctgctgcctctgcccttcgctgcgtccccgctccaggcagcccgtcaagcgctacaagaagatcctcatcgacatctttcccgcggagcaggaagacggaccaaatgtgaggaggattgggaggctttgcgagtatgttgctagaaatcctcatcgcgtgccaaagatcacagcttacttggagaggaggtgttacagggagttgagaaatgagcagtatgacattgtgaaagttgttgtgctaatataccgcaggctattggtctcttgtaatgaacaaatgccgttactggcaaatagtttattaagcatcatacaaacacttttggatcaatcaaggcaggatgacatgtgcatcattggctgtgaaaccttgtttgatttcatagtcactcaggtggatggtacatatcagttcaatttggaagagtttattccaagactctgcaaactttctcaaatagtaagggacaaagagaaggctaatgcactccgtgcagcagctctgcaatcactctctgctatgatctggtttatgggtgagctctctcatatctcctcagagtttgatagcgttgtccaagtagtattggaaagctatgagcctcgacaggtgcaaagtgacaatagtgccactgaaaatccaggttgtcagttggttgaagaggtccttaaacccgagggtcatgcctctccatcgacatttatattttctgtgataccttcttgggacagcatagttagtgactatggaggaattcaactgcttatggatgatgccaaggatccttatttttggtcaagggtctgtgtgcataacatggccaagctgtccagggaagcaactacattccgccgtgttatggagtccctattttgccacttcgataatactaattcatggtcatccaaaaatggtcttgcactttgtgttctattggacatgcaaatgttcatggaaaagtcagggacaaacattaatttgatgatatcagtactagttaagcatctcgaacacaaggccatactgaaacaacctgagatgcaactcagcattgtcgaagtgataactgctcttgcagaacaatcaagagctcaggcttcagcagcaaccatagttgctataagtgaccttgtgaggcatatgaaaaagacactgcatttagctcttggcagcaacgatttggaggtggtaaagtggaatgacaaactccgcatggcttttgatgaatgcatagtccagctgtcaaagaaggtaggtgatgctggaccagttcttgacatgatgtctgtgatgctagagaacatatcacacactcctcttattgctatagcaactacttctgctgtttatcgcacagctcaaataattgcttcaataccaaatttgtcatataagaacaaggtatttccagaagcactttttcatcaattgctgttagcgatggttcaccctgatcatgaaacacgtgttggctcgcaaagcttgagacaaagcctcagactttcttcagtgtctcacaaacattcttatacttctttaaaggaaggtcaaagtcccttgacagagtcaatcaacgaaatggaaacaattgtgttaagactaagcagccagcaggccactcttctgctctcatctatttggcgtcaagcactttctccaaaaaatgctcctcaaaactacgaagctattgctcatacatatagtttgcttctattgtttttgggatcaaagacaccaatttttgaggttcttgctcccagctttcagattgcattttctttaatgagccattcacttggaggaacagattcattgccaccatctcgccgccggtcattatttactctggctacatctatgattgtttttgcctcaagagctttcaatgtggcacctcttctcccaatttgtaaattaatgctcaatgatggaacgatggatccattccttcatctggtacatgagaacaaacttcaggctgtgaaggactatacggaagatccatcaacatcctatggctcacccgaggacaatcagaatgccttgaaatctctttcagtggtggaactaacaaatagttgctcccgagaatccatgattttaaccattatgaactccataagagatttaccagacttggagttagagaatataaggagtcaactgctgcgtgatttctcccctgatgacgtgtgcccaagtagcgctcactttcttgaatcacctggcaagattgcaccgccatgttctgatgatgacaccgactacgactatcaagaggtacacggaaattttgagcaggctgaacttatcgatctgagaaatgacaacaatacttatttggaagcctctgcaactacactggcggctatagctattcctgtgcccacaacaaatcttctcagtatcgatgaacttctagaaacagtcgtgaatgatgtgtcatctcagaccggagggcaatgtttggtgtcaatggccggagacatcccattccaggagatgactagccactgtgaggccttttcgatgggaaagcaccacaagatgtccctgctcatgagcttcaagcaaaacaagcaagcggccatggtcgtcgtgcctgacaatcagagcacaaacccgttcctcctgcagagcatcagtgccggcgaggcacaggttgctggcgacgtccagcagccgttcctgaggctgccaccgtcgagcccctacgacaacttcctcaaggctgctggctgctgatttccacttgcagaaaccctgccgtgtaaccaaccgaatgtatcgtgtgtgtacagtggccgtctgcctcaatcttattacaaactaaacaagggtttggatattacatgctgacttgttttcggatcatgccagggtcaatccaaaattcatttaattgtaggattccaaagcaaagggaatgatagatatataaggagaaaatgttgaaatctaacttagatcgtctccaacggcttatctatatggccgtactaacactgttttacattgtatactgtatcgttggtagagtgaaggttaaatataagaataaagaagatagtggtagtgtgagatcagttgtttttcattaagtagaaaaatatatgcacttaaatttcatcagataaac

SEQ ID NO: 216964 - DNA, 2817 bp, Zea Mays
aacctcttgattgatgtttggattatgccgttactggcaaatagtttattaagcatcatacaaacacttttggatcaatcaaggcaggatgacatgtgcatcattggctgtgaaaccttgtttgatttcatagtcactcaggtggatggtacatatcagttcaatttggaagagtttattccaagactctgcaaactttctcaaatagtaagggacaaagagaaggctaatgcactccgtgcagcagctctgcaatcactctctgctatgatctggtttatgggtgagctctctcatatctcctcagagtttgatagcgttgtccaagtagtattggaaagctatgagcctcgacaggtgcaaagtgacaatagtgccactgaaaatccaggttgtcagttggttgaagaggtccttaaacccgagggtcatgcctctccatcgacatttatattttctgtgataccttcttgggacagcatagttagtgactatggaggaattcaactgcttatggatgatgccaaggatccttatttttggtcaagggtctgtgtgcataacatggccaagctgtccagggaagcaactacattccgccgtgttatggagtccctattttgccacttcgataatactaattcatggtcatccaaaaatggtcttgcactttgtgttctattggacatgcaaatgttcatggaaaagtcagggacaaacattaatttgatgatatcagtactagttaagcatctcgaacacaaggccatactgaaacaacctgagatgcaactcagcattgtcgaagtgataactgctcttgcagaacaatcaagagctcaggcttcagcagcaaccatagttgctataagtgaccttgtgaggcatatgaaaaagacactgcatttagctcttggcagcaacgatttggaggtggtaaagtggaatgacaaactccgcatggcttttgatgaatgcatagtccagctgtcaaagaaggtaggtgatgctggaccagttcttgacatgatgtctgtgatgctagagaacatatcacacactcctcttattgctatagcaactacttctgctgtttatcgcacagctcaaataattgcttcaataccaaatttgtcatataagaacaaggctcgcaaagcttgagacaaagcctcagactttcttcagtgtctcacaaacattcttatacttctttaaaggaaggtcaaagtcccttgacagagtcaatcaacgaaatggaaacaattgtgttaagactaagcagccagcaggccactcttctgctctcatctatttggcgtcaagcactttctccaaaaaatgctcctcaaaactacgaagctattgctcatacatatagtttgcttctattgtttttgggatcaaagacaccaatttttgaggttcttgctcccagctttcagattgcattttctttaatgagccattcacttggaggaacagattcattgccaccatctcgccgccggtcattatttactctggctacatctatgattgtttttgcctcaagagctttcaatgtggcacctcttctcccaatttgtaaattaatgctcaatgatggaacgatggatccattccttcatctggtacatgagaacaaacttcaggctgtgaaggactatacggaagatccatcaacatcctatggctcacccgaggacaatcagaatgccttgaaatctctttcagtggtggaactaacaaatagttgctcccgagaatccatgattttaaccattatgaactccataagagatttaccagacttggagttagagaatataaggagtcaactgctgcgtgatttctcccctgatgacgtgtgcccaagtagcgctcactttcttgaatcacctggcaagattgcaccgccatgttctgatgatgacaccgactacgactatcaagaggtacacggaaattttgagcaggctgaacttatcgatctgagaaatgacaacaatacttatttggaagcctctgcaactacactggcggctatagctattcctgtgcccacaacaaatcttctcagtatcgatgaacttctagaaacagtcgtgaatgatgtgtcatctcagaccggagggcaatgtttggtgtcaatggccggagacatcccattccaggagatgactagccactgtgaggccttttcgatgggaaagcaccacaagatgtccctgctcatgagcttcaagcaaaacaagcaagcggccatggtcgtcgtgcctgacaatcagagcacaaacccgttcctcctgcagagcatcagtgccggcgaggcacaggttgctggcgacgtccagcagccgttcctgaggctgccaccgtcgagcccctacgacaacttcctcaaggctgctggctgctgatttccacttgcagaaaccctgccgtgtaaccaaccgaatgtatcgtgtgtgtacagtggccgtctgcctcaatcttattacaaactaaacaagggtttggatattacatgctgacttgttttcggatcatgccagggtcaatccaaaattcatttaattgtaggattccaaagcaaagggaatgatagatatataaggagaaaatgttgaaatctaacttagatcgtctccaacggcttatctatatggccgtactaacactgttttacattgtatactgtatcgttggtagagtgaaggttaaatataagaataaagaagatagtggtagtgtgagatcagttgtttttcattaagtagaaaaatatatgcacttaaatttcatcagataaac

SEQ ID NO: 216965 - DNA, 2229 bp, Zea Mays
aatccttcacttgatcagccacttcctttttcgggaataaggtaggtgatgctggaccagttcttgacatgatgtctgtgatgctagagaacatatcacacactcctcttattgctatagcaactacttctgctgtttatcgcacagctcaaataattgcttcaataccaaatttgtcatataagaacaaggtatttccagaagcactttttcatcaattgctgttagcgatggttcaccctgatcatgaaacacgtgttggtgcacaccgcatattttctgttgtccttgtcccatcttctgtttctccttttcccaatttgaaatccctagatcagtgtagaaagcatgatgtccagaggacactctcgagggttgtatctgtcttctcatcttcagctgctttatttgataagctgagaagggacagaaactcctttagagaatatttacatgaaggaagcatgaacagaattttgcatggtattgatgatgaaattgctacccctaatgacttgccaggctcgcaaagcttgagacaaagcctcagactttcttcagtgtctcacaaacattcttatacttctttaaaggaaggtcaaagtcccttgacagagtcaatcaacgaaatggaaacaattgtgttaagactaagcagccagcaggccactcttctgctctcatctatttggcgtcaagcactttctccaaaaaatgctcctcaaaactacgaagctattgctcatacatatagtttgcttctattgtttttgggatcaaagacaccaatttttgaggttcttgctcccagctttcagattgcattttctttaatgagccattcacttggaggaacagattcattgccaccatctcgccgccggtcattatttactctggctacatctatgattgtttttgcctcaagagctttcaatgtggcacctcttctcccaatttgtaaattaatgctcaatgatggaacgatggatccattccttcatctggtacatgagaacaaacttcaggctgtgaaggactatacggaagatccatcaacatcctatggctcacccgaggacaatcagaatgccttgaaatctctttcagtggtggaactaacaaatagttgctcccgagaatccatgattttaaccattatgaactccataagagatttaccagacttggagttagagaatataaggagtcaactgctgcgtgatttctcccctgatgacgtgtgcccaagtagcgctcactttcttgaatcacctggcaagattgcaccgccatgttctgatgatgacaccgactacgactatcaagaggtacacggaaattttgagcaggctgaacttatcgatctgagaaatgacaacaatacttatttggaagcctctgcaactacactggcggctatagctattcctgtgcccacaacaaatcttctcagtatcgatgaacttctagaaacagtcgtgaatgatgtgtcatctcagaccggagggcaatgtttggtgtcaatggccggagacatcccattccaggagatgactagccactgtgaggccttttcgatgggaaagcaccacaagatgtccctgctcatgagcttcaagcaaaacaagcaagcggccatggtcgtcgtgcctgacaatcaggttagccacgctgaagcagcacatacctccgacaagcagagcacaaacccgttcctcctgcagagcatcagtgccggcgaggcacaggttgctggcgacgtccagcagccgttcctgaggctgccaccgtcgagcccctacgacaacttcctcaaggctgctggctgctgatttccacttgcagaaaccctgccgtgtaaccaaccgaatgtatcgtgtgtgtacagtggccgtctgcctcaatcttattacaaactaaacaagggtttggatattacatgctgacttgttttcggatcatgccagggtcaatccaaaattcatttaattgtaggattccaaagcaaagggaatgatagatatataaggagaaaatgttgaaatctaacttagatcgtctccaacggcttatctatatggccgtactaacactgttttacattgtatactgtatcgttggtagagtgaaggttaaatataagaataaagaagatagtggtagtgtgagatcagttgtttttcattaagtagaaaaatatatgcacttaaatttcatcagataaac

SEQ ID NO: 216966 - DNA, 1604 bp, Zea Mays
gaacaacttgtttgttcccctccatagaaaaaaatccaacatgctgagccttgtgctcagaaatttacaggaaacaattgtgttaagactaagcagccagcaggccactcttctgctctcatctatttggcgtcaagcactttctccaaaaaatgctcctcaaaactacgaagctattgctcatacatatagtttgcttctattgtttttgggatcaaagacaccaatttttgaggttcttgctcccagctttcagattgcattttctttaatgagccattcacttggaggaacagattcattgccaccatctcgccgccggtcattatttactctggctacatctatgattgtttttgcctcaagagctttcaatgtggcacctcttctcccaatttgtaaattaatgctcaatgatggaacgatggatccattccttcatctggtacatgagaacaaacttcaggctgtgaaggactatacggaagatccatcaacatcctatggctcacccgaggacaatcagaatgccttgaaatctctttcagtggtggaactaacaaatagttgctcccgagaatccatgattttaaccattatgaactccataagagatttaccagacttggagttagagaatataaggagtcaactgctgcgtgatttctcccctgatgacgtgtgcccaagtagcgctcactttcttgaatcacctggcaagattgcaccgccatgttctgatgatgacaccgactacgactatcaagaggtacacggaaattttgagcaggctgaacttatcgatctgagaaatgacaacaatacttatttggaagcctctgcaactacactggcggctatagctattcctgtgcccacaacaaatcttctcagtatcgatgaacttctagaaacaaccggagggcaatgtttggtgtcaatggccggagacatcccattccaggagatgactagccactgtgaggccttttcgatgggaaagcaccacaagatgtccctgctcatgagcttcaagcaaaacaagcaagcggccatggtcgtcgtgcctgacaatcagagcacaaacccgttcctcctgcagagcatcagtgccggcgaggcacaggttgctggcgacgtccagcagccgttcctgaggctgccaccgtcgagcccctacgacaacttcctcaaggctgctggctgctgatttccacttgcagaaaccctgccgtgtaaccaaccgaatgtatcgtgtgtgtacagtggccgtctgcctcaatcttattacaaactaaacaagggtttggatattacatgctgacttgttttcggatcatgccagggtcaatccaaaattcatttaattgtaggattccaaagcaaagggaatgatagatatataaggagaaaatgttgaaatctaacttagatcgtctccaacggcttatctatatggccgtactaacactgttttacattgtatactgtatcgttggtagagtgaaggttaaatataagaataaagaagatagtggtagtgtgagatcagttgtttttcattaagtagaaaaatatatgcacttaaatttcatcagataaac

SEQ ID NO: 216967 - DNA, 1617 bp, Zea Mays
aaaaatccaacatgctgagccttgtgctcagaaatttacaggaaacaattgtgttaagactaagcagccagcaggccactcttctgctctcatctatttggcgtcaagcactttctccaaaaaatgctcctcaaaactacgaagctattgctcatacatatagtttgcttctattgtttttgggatcaaagacaccaatttttgaggttcttgctcccagctttcagattgcattttctttaatgagccattcacttggaggaacagattcattgccaccatctcgccgccggtcattatttactctggctacatctatgattgtttttgcctcaagagctttcaatgtggcacctcttctcccaatttgtaaattaatgctcaatgatggaacgatggatccattccttcatctggtacatgagaacaaacttcaggctgtgaaggactatacggaagatccatcaacatcctatggctcacccgaggacaatcagaatgccttgaaatctctttcagtggtggaactaacaaatagttgctcccgagaatccatgattttaaccattatgaactccataagagatttaccagacttggagttagagaatataaggagtcaactgctgcgtgatttctcccctgatgacgtgtgcccaagtagcgctcactttcttgaatcacctggcaagattgcaccgccatgttctgatgatgacaccgactacgactatcaagaggctgaacttatcgatctgagaaatgacaacaatacttatttggaagcctctgcaactacactggcggctatagctattcctgtgcccacaacaaatcttctcagtatcgatgaacttctagaaacagtcgtgaatgatgtgtcatctcagaccggagggcaatgtttggtgtcaatggccggagacatcccattccaggagatgactagccactgtgaggccttttcgatgggaaagcaccacaagatgtccctgctcatgagcttcaagcaaaacaagcaagcggccatggtcgtcgtgcctgacaatcaggttagccacgctgaagcagcacatacctccgacaagcagagcacaaacccgttcctcctgcagagcatcagtgccggcgaggcacaggttgctggcgacgtccagcagccgttcctgaggctgccaccgtcgagcccctacgacaacttcctcaaggctgctggctgctgatttccacttgcagaaaccctgccgtgtaaccaaccgaatgtatcgtgtgtgtacagtggccgtctgcctcaatcttattacaaactaaacaagggtttggatattacatgctgacttgttttcggatcatgccagggtcaatccaaaattcatttaattgtaggattccaaagcaaagggaatgatagatatataaggagaaaatgttgaaatctaacttagatcgtctccaacggcttatctatatggccgtactaacactgttttacattgtatactgtatcgttggtagagtgaaggttaaatataagaataaagaagatagtggtagtgtgagatcagttgtttttcattaagtagaaaaatatatgcacttaaatttcatcagataaac

SEQ ID NO: 216968 - DNA, 1276 bp, Zea Mays
gtcttctataagaaggaaatacttcaatcaagcctccttgaacattttgtttttttgttgggggtggaggagatggatccattccttcatctggtacatgagaacaaacttcaggctgtgaaggactatacggaagatccatcaacatcctatggctcacccgaggacaatcagaatgccttgaaatctctttcagtggtggaactaacaaatagttgctcccgagaatccatgattttaaccattatgaactccataagagatttaccagacttggagttagagaatataaggagtcaactgctgcgtgatttctcccctgatgacgtgtgcccaagtagcgctcactttcttgaatcacctggcaagattgcaccgccatgttctgatgatgacaccgactacgactatcaagaggtacacggaaattttgagcaggctgaacttatcgatctgagaaatgacaacaatacttatttggaagcctctgcaactacactggcggctatagctattcctgtgcccacaacaaatcttctcagtatcgatgaacttctagaaacagtcgtgaatgatgtgtcatctcagaccggagggcaatgtttggtgtcaatggccggagacatcccattccaggagatgactagccactgtgaggccttttcgatgggaaagcaccacaagatgtccctgctcatgagcttcaagcaaaacaagcaagcggccatggtcgtcgtgcctgacaatcagagcacaaacccgttcctcctgcagagcatcagtgccggcgaggcacaggttgctggcgacgtccagcagccgttcctgaggctgccaccgtcgagcccctacgacaacttcctcaaggctgctggctgctgatttccacttgcagaaaccctgccgtgtaaccaaccgaatgtatcgtgtgtgtacagtggccgtctgcctcaatcttattacaaactaaacaagggtttggatattacatgctgacttgttttcggatcatgccagggtcaatccaaaattcatttaattgtaggattccaaagcaaagggaatgatagatatataaggagaaaatgttgaaatctaacttagatcgtctccaacggcttatctatatggccgtactaacactgttttacattgtatactgtatcgttggtagagtgaaggttaaatataagaataaagaagatagtggtagtgtgagatcagttgtttttcattaagtagaaaaatatatgcacttaaatttcatcagataaac

SEQ ID NO: 216969 - DNA, 4171 bp, Zea Mays
cttaggttaagttttctagcttctacatcttgtcccccttgtgaatgaggctgaaatttgatgagcttaagttaatctcagagaaagatccatgcagtgaaagacgcgattttcttattgaagtcctagttgctttttttgagaagcggcaatcccaaaaagatgcagtaaatgcacttcctttgtatccaaatgagcagatcatgtgggatgaaagccttgttcctagcattaattactctggagaaggctgtcttgccctcccaaaactcaatctccaattcctgacgcttcatgattatttgttaagaaatttcaatctgtttcgtcttgaatcaacctatgaaattcgtgaagacattcaggaagctgttcctcatctacatgcttatatcaataatgagggagagacagccttccgtggatggtcaagaatggctgttccgatcaagggatttaagattacagaagtgaagcagccaaacattggagaagttaagccttctgctgtaactgctgatgttactttcagcatatcaagctacaggtatcagataaaatctgaatgggatgctctgaaggagcatgatgttctatttttgctgtcaatccgcccttcatttgaacctcttagccctgaagaggctgaaaaatcaactgtgccagaaaggttaggattgcaatatgtacgtggatgtgaggttattgaaattcgtgatgaggaaggagcactcatgaatgatttcacaggaaggataaaacgagaagagtggaaaccacccaaaggtgaaattcgtactgtccgagttgccttagatacagcgcagtaccacattgatgttaccgagacagcagagaagggcacagaaaatgtgtatggaacatttaatattctaatgagaaggaaacccaaggagaataatttcaaagcaatcctggaatctatacgtgatctaatgaatgaaacatgtgtagttccagaatggttgcataacatattcttgggttatggaaatccttcggccgcacagtggatgaatatgcctgatcttctggaagttatagatttcaaggacacttttcttgatgccaaccatgttcagcaaagttttccagattaccaggttacatttatcaattctgatggtacaaaaaacctgcatccaagtcccccttttaaaatcaggctatccaagaaaatgagggaaagcagtcatgctttacctggcaacatgaactccaatttgactgttaagagcagaaataatatggctgatggggagcctcagaaagagaaactaattgttgaaacttacattccagctgatcctgggccgtatcctcaagataaacctaaacagaactcagtgaggttcacaccaactcagatcggtgctataatatctggtattcaacctgggttgacgatggttgttggtcctcctggtacgggaaaaacagatactgctgtgcagatattaaatgttctatatcacaactgtccttcacaaagaacactgattataacccactccaatcaggctttgaatgatttatttgagaagataatgcagagggatgtgcctgctaggtaccttctccgccttggtcagggtgagcaagaattggccactgatcttgattttagtcgtcaaggtcgtgtcaacgctatgctggtccggcggctagagctgctcggtgaagtttctaaattggcgagatctcttcgtcttccagaagatgtgggctacacatgtgaaactgctgcatatttttggctattacatgtttatgcccgttgggaacaattcttagctgcctgtgctcaaaatcaagacaaaccctcttttgtcaaagaccgcttccccttttcagagttcttttcagatactccgcagcctatttttaccggcgagtcatttgagatggatatgcatgcagcgaaaggttgtttcaaacatctttctacaatattccaagagttggaggagtgtagggcttttgagctacttaagtcaacagtggagcgagcaaactatctaatgactaaacaggccaagatagttgctatgacttgtactcatgcagcattgaagaggagggactttcttcaattaggtttcaaatttgacaatttgctgatggaagaaagtgcacaaatattggagatagaaacttttataccgatgctgctgcagcggcaggaagatggccatgctcgtcttaaacgttgcattttaattggtgaccaccatcagttaccccctgttgttaagaacatggcttttcagaagtatagccacatggaccagagtctctttacaaggtttgttcgacttggtgtcccttatattgagctcaatgcccagggtcgtgcaagacctagtattgctgaactttataactggagatacagggagctgggagatctgccttatgtccgtgagcaagcaatcttccataaagctaacgccggattctcttttgagtatcagttagttgatgttcctgattataagggaaaaggtgagtcagcgccttctccttggttttaccagaatgaaggggaggctgagtatattgttagtgtgtatatctatatgcgcctgattggctaccctgccaataagatttcaatattgaccacctacaatggtcagaagcttcttattcgtgatgttatcaacaaaagatgcaaaccatggaatattgagccccctaacaaggttaccactgtggacaagttccagggccagcaaaatgatttcattttactttctcttgtccgtacccgttttgtgggtcatcttcgtgatgtcagaagacttattgtagctatgtcccgtgctcgtctgggcttgtacgtgttctgccgtcgttcactgtttgaacaatgttacaaattgcaaccaacattccagctgctcctccaaagatctgataagcttgccttgaatcttgaggagtgcactccttttaccgagcgacctttggaggaaactggaaacatccattacattactggtattgaagacattaattcatctagtaaagttcaggctggaacatcttcgtcaagtgcaatacatgcagtattatgctcctccggcaaatgaactgcctcaagcagcaccagaaaatattgctgatgcaatcccttctgaaaatggcaatgctggaagggctctgaatgatggaaacgaggacatgacccgggaagaaaatggtggtgcaactgacacagtgatcagtaataggatagaggaagacagcgttgaggcaaaggatgacatgacacaggaaggggacaagggtgaagtgagtggcaagggtcacatggctacagaggataggaaaggggaagcacaaggtggcgcagatggcaagctggaggaagcaaatgtgatgtcggcggacaagatgatggaggaagcaaatgcgacgtcggcagacaagatggaggaagcaaatgccacgtcggcggataagatggaagaagcagatgccacgtcgtcggacaagatggaagaagcagatgccacattgccggacaagatggaggaagcaaatgccatgtcgccggacaggatggaggagaaaaattctgatccgaaggacaagatggatgaggagtgacgtggtggtgtaaccagttttgaaatagcggtagacttgttctgtcagccgcatatcttgatttggaacatcatgtattcacctgtgttaccgcagatgaagactgatacgtgctccccaagaggtgtagccttgtgggcagaatcaagatcgacatatgatgaccatgttcctgcggttaatggtggtgaaggctgttttccctaccatcttggccaggctatgctggaaaatgttccttctcttccagccaagggtatccatgtttccgcatgtgtttaatcgtgtaaactgtagaggattttttgggtagttttttctgaaacacccgttccatctatcgttgtctccgtaacataacacagctggaacgttgcttttgtatacttgactgactactataattttggcacaagcattagatttttgcagatttgataggccttatcggccattcaaaattttgatttgacagaccaactcacccagcctataaaagagaagcaaatgggagtaagaaataaatgtatgacac

SEQ ID NO: 216970 - DNA, 5814 bp, Zea Mays
gtatgataggaagcaagatgtgcataccgagcgagaaccgactatcctcgaagtcgaatgatcttcgacaggggtggtccatgcgtttgagctaaacgatacaggactggctgtagcggactcctgcagcttgagccgaaaaaatggtgtctgccggctaaatccactgtcctcttgcaaatcccatctccctctcgccgccgccgctgcctccgctccgctcccctccccgtcctactcccgctcccactgtcccacccaccacccgaaccttaaacccccacgaacttcgcccaaaccctaaacctcgtcgagccgcagccccgccatgccgaaggtctttggcaccggcgtcttcgagttccggcacccccgagcggccgagtacccactacccgcggacgccgcccccgctacggctgcggcgcccgacaaagttcccgcatccaccggcggcggctccatcacgctcctcgacatccagcgggaccgcctcacccgcgtcgccaccgagcattggggcacggccgccgctgcggcggccttcgacgcggaccttgtcaggaagatctatggcactgagctccgcgtcgaggggaggggccggaaaactgtgccgctgcagcgtgttatgatcctcgaggtcagccagtaccttgagaactacctgtggccgcacttcgacccggttgacgcttccttcgagcacgtaatgtccatcatcctcatggtcaacgagaagtttcgggagaatgtggcggcttggacatgtttccatgaccggaaggatgcattcaaggggttcctgtggcgggttctcaagctcaaggaagaggaaagggctcttaatatggcagagaaaacaaattacctcctgtttatgataaattcatttcagagtttggaggacgagcttgtccgggaaacaatacttcagttagtaagcctaaagctgtggaataccctttcgtttggacgacttcagatggaactctgcctaaaccctgaattgattaagaagtggaccaaaatcagaagaagagaggcaaaggaagcgaaaaaggctgaccaacctatcaacccttctgaaatgctcgagaataagttccttaggaatttaattgaagaattcgtggagattctcaattcaaaggtcatactatccaatcaagatggtgctgaagaatctgtattgaatgagtctttcagtgggcaaattgacgattcttgcgttctatattgtgagagatttatggaatttttgattgacatgttaagccagcttcctactagacgatttttgaggcccctggttgctgatgttgctgttgttgccaagtgccacttaagtgcactctacactcatgaaaagggacggctttttgcacagttggtcgacttgctgcagttttatgaaggttttgagattaatgatcactctgggacacagctcggtgatgatgatgtcctgcaggcgcattattcccgtttccaagcttttcagttgctagcatttaaacaagtgcctaagctgcgagattttgccttgtccagtattggttcactccataagcgagctgacttaacaaaaaagttgcttgtcttgtcagatgtggagctgcaagatctggtttgtaacaagcttaagttaatctcagagaaagatccatgcagtgaaagacgcgattttcttattgaagtcctagttgctttttttgagaagcggcaatcccaaaaagatgcagtaaatgcacttcctttgtatccaaatgagcagatcatgtgggatgaaagccttgttcctagcattaattactctggagaaggctgtcttgccctcccaaaactcaatctccaattcctgacgcttcatgattatttgttaagaaatttcaatctgtttcgtcttgaatcaacctatgaaattcgtgaagacattcaggaagctgttcctcatctacatgcttatatcaataatgagggagagacagccttccgtggatggtcaagaatggctgttccgatcaagggatttaagattacagaagtgaagcagccaaacattggagaagttaagccttctgctgtaactgctgatgttactttcagcatatcaagctacaggtatcagataaaatctgaatgggatgctctgaaggagcatgatgttctatttttgctgtcaatccgcccttcatttgaacctcttagccctgaagaggctgaaaaatcaactgtgccagaaaggttaggattgcaatatgtacgtggatgtgaggttattgaaattcgtgatgaggaaggagcactcatgaatgatttcacaggaaggataaaacgagaagagtggaaaccacccaaaggtgaaattcgtactgtccgagttgccttagatacagcgcagtaccacattgatgttaccgagacagcagagaagggcacagaaaatgtgtatggaacatttaatattctaatgagaaggaaacccaaggagaataatttcaaagcaatcctggaatctatacgtgatctaatgaatgaaacatgtgtagttccagaatggttgcataacatattcttgggttatggaaatccttcggccgcacagtggatgaatatgcctgatcttctggaagttatagatttcaaggacacttttcttgatgccaaccatgttcagcaaagttttccagattaccaggttacatttatcaattctgatggtacaaaaaacctgcatccaagtcccccttttaaaatcaggctatccaagaaaatgagggaaagcagtcatgctttacctggcaacatgaactccaatttgactgttaagagcagaaataatatggctgatggggagcctcagaaagagaaactaattgttgaaacttacattccagctgatcctgggccgtatcctcaagataaacctaaacagaactcagtgaggttcacaccaactcagatcggtgctataatatctggtattcaacctgggttgacgatggttgttggtcctcctggtacgggaaaaacagatactgctgtgcagatattaaatgttctatatcacaactgtccttcacaaagaacactgattataacccactccaatcaggctttgaatgatttatttgagaagataatgcagagggatgtgcctgctaggtaccttctccgccttggtcagggtgagcaagaattggccactgatcttgattttagtcgtcaaggtcgtgtcaacgctatgctggtccggcggctagagctgctcggtgaagtttctaaattggcgagatctcttcgtcttccagaagatgtgggctacacatgtgaaactgctgcatatttttggctattacatgtttatgcccgttgggaacaattcttagctgcctgtgctcaaaatcaagacaaaccctcttttgtcaaagaccgcttccccttttcagagttcttttcagatactccgcagcctatttttaccggcgagtcatttgagatggatatgcatgcagcgaaaggttgtttcaaacatctttctacaatattccaagagttggaggagtgtagggcttttgagctacttaagtcaacagtggagcgagcaaactatctaatgactaaacaggccaagatagttgctatgacttgtactcatgcagcattgaagaggagggactttcttcaattaggtttcaaatttgacaatttgctgatggaagaaagtgcacaaatattggagatagaaacttttataccgatgctgctgcagcggcaggaagatggccatgctcgtcttaaacgttgcattttaattggtgaccaccatcagttaccccctgttgttaagaacatggcttttcagaagtatagccacatggaccagagtctctttacaaggtttgttcgacttggtgtcccttatattgagctcaatgcccagggtcgtgcaagacctagtattgctgaactttataactggagatacagggagctgggagatctgccttatgtccgtgagcaagcaatcttccataaagctaacgccggattctcttttgagtatcagttagttgatgttcctgattataagggaaaaggtgagtcagcgccttctccttggttttaccagaatgaaggggaggctgagtatattgttagtgtgtatatctatatgcgcctgattggctaccctgccaataagatttcaatattgaccacctacaatggtcagaagcttcttattcgtgatgttatcaacaaaagatgcaaaccatggaatattgagccccctaacaaggttaccactgtggacaagttccagggccagcaaaatgatttcattttactttctcttgtccgtacccgttttgtgggtcatcttcgtgatgtcagaagacttattgtagctatgtcccgtgctcgtctgggcttgtacgtgttctgccgtcgttcactgtttgaacaatgttacaaattgcaaccaacattccagctgctcctccaaagatctgataagcttgccttgaatcttgaggagtgcactccttttaccgagcgacctttggaggaaactggaaacatccattacattactggtattgaagacattaattcatctagtaaagttcaggctggaacatcttcgtcaagtgcaatacatgcagtattatgctcctccggcaaatgaactgcctcaagcagcaccagaaaatattgctgatgcaatcccttctgaaaatggcaatgctggaagggctctgaatgatggaaacgaggacatgacccgggaagaaaatggtggtgcaactgacacagtgatcagtaataggatagaggaagacagcgttgaggcaaaggatgacatgacacaggaaggggacaagggtgaagtgagtggcaagggtcacatggctacagaggataggaaaggggaagcacaaggtggcgcagatggcaagctggaggaagcaaatgtgatgtcggcggacaagatgatggaggaagcaaatgcgacgtcggcagacaagatggaggaagcaaatgccacgtcggcggataagatggaagaagcagatgccacgtcgtcggacaagatggaagaagcagatgccacattgccggacaagatggaagaagcagatgccacattgccggacaagatggaagaagcagatgccacattgccggacaagatggaggaagcaaatgccatgtcgccggacaggatggaggagaaaaattctgatccgaaggacaagatggatgaggagtgacgtggtggtgtaaccagttttgaaatagcggtagacttgttctgtcagccgcatatcttgatttggaacatcatgtattcacctgtgttaccgcagatgaagactgatacgtgctccccaagaggtgtagccttgtgggcagaatcaagatcgacatatgatgaccatgttcctgcggttaatggtggtgaaggctgttttccctaccatcttggccaggctatgctggaaaatgttccttctcttccagccaagggtatccatgtttccgcatgtgtttaatcgtgtaaactgtagaggattttttgggtagttttttctgaaacacccgttccatctatcgttgtctccgtaacataacacagctggaacgttgcttttgtatacttgactgactactataattttggcacaagcattagatttttgcagatttgataggccttatcggccattcaaaattttgatttgacagaccaactcacccagcctataaaagagaagcaaatgggagtaagaaataaatgtatgacac

SEQ ID NO: 216971 - DNA, 2469 bp, Zea Mays
cgcacatcttcctcatcccggtctcgtcgtgcgcttgtccctttctacggctccaaacaaatgcggaggtctccactcttctctcttcctccatcttatcatcgcccacgtacacacccaattcctcgcaactgggctcccccgcctccacgacactgccccccgcctcaagtccgccgcctccattcttcagctctcctatcctccgtagtctgcctgtacctattggctgaagcagagctgacccccactttatcaagagttgctcaacaatggacactggctgcctgtcatctatgaatattactggagctagccagacaagatcttttgcggggcaacttcctcctcagagatgttttgcgagtagtcactatacaagctttgccgtgaaaaaacttgtctcaaggaataaaggaaggagatcacaccgtagacatcctgccttgcaggttgtctgcaaggattttccaagacctccactagaaagcacaataaactatttggaagctggacagctctcttcattttttagaaacagcgaacgccccagtaagccgttgcaggtcgtggttgctggtgcaggattggctggtctatcaacagcgaagtatctggcagatgctggacataaacccatattgcttgaggcaagagatgttttgggtggaaaggtagctgcttggaaggatgaagatggagattggtacgagactgggcttcatatcttttttggagcttatcccaacatacagaatctgtttggcgagcttaggattgaggatcgtttacagtggaaagaacactctatgatattcgccatgccaaacaagccaggagaattcagccggtttgatttcccagaaactttgccagcacctataaatgggatatgggccatattgagaaacaatgaaatgcttacctggcccgagaaggtgaagtttgcaatcggacttctgccagcaatggttggtggtcaaccttatgttgaagctcaagatggcttaaccgtttcagaatggatgaaaaagcagcacagggtgttcctgatcgggtgaacgatgaggtttttattgcaatgtccaaggcactcaatttcataaatcctgatgagctatctatgcagtgcattttgattgctttgaaccgatttcttcaggagaagcatggttctaaaatggcattcttggatggtaatccgcctgaaaggctatgcatgcctattgttgatcacattcggtctaggggtggagaggtccgcctgaattctcgtattaaaaagatagagctgaatcctgatggaactgtaaaacacttcgcacttagtgatggaactcagataactggagatgcttatgtttgtgcaacaccagtcgatatcttcaagcttcttgtacctcaagagtggagtgaaattacttatttcaagaaactggagaagttggtgggagttcctgttatcaatgttcatatatggtttgacagaaaactgaacaacacatatgaccaccttcttttcagcaggagttcacttttaagtgtctatgcagacatgtcagtaacctgcaaggaatactatgacccaaaccgttcaatgctggagttggtctttgctcctgcagacgaatggattggtcgaagtgacactgaaatcatcgatgcaactatggaagagctagccaagttatttcctgatgaaattgctgctgatcagagtaaagcaaagattcttaagtatcatattgtgaagacaccgagatcggtttacaaaactgtcccaaactgtgagccttgccggcctctccaaaggtcacctatcgaaggtttctatctagctggtgattacacaaagcagaaatacctggcttccatggaaggtgcagtcctatccgggaagctttgcgcccagtccattgtgcaggattatagcaggctcacactcaggagccagaaaagcctacaatcaggagaagttcccgtcccatcttagttgtagttggctttagctatcgtcatccccactgggtgctatcttatctcctatttcaatgggaacccacccaatggtcatgttggagacaacacctgttatggtcctttgaccatctcgtggtgactgtagttgatgtcatattcggatatatatgtaaaaggatctgcatagcaattgttagacctttgggaaagcaaaagcgataaagagatctcagatagatattgtgttctttcagacggtggttcctattcctatcaatcggttaatccatcccacatgggaggatttgtggtaagcttagtcagcaaacctctggtggtccctgctccctgaactttatcgggagagctgctgtagcaatccccgaagccgtgtgccgtttatcttgtcgggcatactttatttgccgagttgcagttattaagcacagggaggtgcggaatgcacttcgggcgtcgaagatatttttg

SEQ ID NO: 216972 - DNA, 2441 bp, Zea Mays
cgcacatcttcctcatcccggtctcgtcgtgcgcttgtccctttctacggctccaaacaaatgcggaggtctccactcttctctcttcctccatcttatcatcgcccacgtacacacccaattcctcgcaactgggctcccccgcctccacgacactgccccccgcctcaagtccgccgcctccattcttcagctctcctatcctccgtagtctgcctgtacctattggctgaagcagagctgacccccactttatcaagagttgctcaacaatggacactggctgcctgtcatctatgaatattactggagctagccagacaagatcttttgcggggcaacttcctcctcagagatgttttgcgagtagtcactatacaagctttgccgtgaaaaaacttgtctcaaggaataaaggaaggagatcacaccgtagacatcctgccttgcaggttgtctgcaaggattttccaagacctccactagaaagcacaataaactatttggaagctggacagctctcttcattttttagaaacagcgaacgccccagtaagccgttgcaggtcgtggttgctggtgcaggattggctggtctatcaacagcgaagtatctggcagatgctggacataaacccatattgcttgaggcaagagatgttttgggtggaaaggtagctgcttggaaggatgaagatggagattggtacgagactgggcttcatatcttttaatctgtttggcgagcttaggattgaggatcgtttacagtggaaagaacactctatgatattcgccatgccaaacaagccaggagaattcagccggtttgatttcccagaaactttgccagcacctataaatgggatatgggccatattgagaaacaatgaaatgcttacctggcccgagaaggtgaagtttgcaatcggacttctgccagcaatggttggtggtcaaccttatgttgaagctcaagatggcttaaccgtttcagaatggatgaaaaagcagggtgttcctgatcgggtgaacgatgaggtttttattgcaatgtccaaggcactcaatttcataaatcctgatgagctatctatgcagtgcattttgattgctttgaaccgatttcttcaggagaagcatggttctaaaatggcattcttggatggtaatccgcctgaaaggctatgcatgcctattgttgatcacattcggtctaggggtggagaggtccgcctgaattctcgtattaaaaagatagagctgaatcctgatggaactgtaaaacacttcgcacttagtgatggaactcagataactggagatgcttatgtttgtgcaacaccagtcgatatcttcaagcttcttgtacctcaagagtggagtgaaattacttatttcaagaaactggagaagttggtgggagttcctgttatcaatgttcatatatggtttgacagaaaactgaacaacacatatgaccaccttcttttcagcaggagttcacttttaagtgtctatgcagacatgtcagtaacctgcaaggaatactatgacccaaaccgttcaatgctggagttggtctttgctcctgcagacgaatggattggtcgaagtgacactgaaatcatcgatgcaactatggaagagctagccaagttatttcctgatgaaattgctgctgatcagagtaaagcaaagattcttaagtatcatattgtgaagacaccgagatcggtttacaaaactgtcccaaactgtgagccttgccggcctctccaaaggtcacctatcgaaggtttctatctagctggtgattacacaaagcagaaatacctggcttccatggaaggtgcagtcctatccgggaagctttgcgcccagtccattgtgcaggattatagcaggctcacactcaggagccagaaaagcctacaatcaggagaagttcccgtcccatcttagttgtagttggctttagctatcgtcatccccactgggtgctatcttatctcctatttcaatgggaacccacccaatggtcatgttggagacaacacctgttatggtcctttgaccatctcgtggtgactgtagttgatgtcatattcggatatatatgtaaaaggatctgcatagcaattgttagacctttgggaaagcaaaagcgataaagagatctcagatagatattgtgttctttcagacggtggttcctattcctatcaatcggttaatccatcccacatgggaggatttgtggtaagcttagtcagcaaacctctggtggtccctgctccctgaactttatcgggagagctgctgtagcaatccccgaagccgtgtgccgtttatcttgtcgggcatactttatttgccgagttgcagttattaagcacagggaggtgcggaatgcacttcgggcgtcgaagatatttttg

SEQ ID NO: 216973 - DNA, 2428 bp, Zea Mays
cctcatcccggtctcgtcgtgcgcttgtccctttctacggctccaaacaaatgcggaggtctccactcttctctcttcctccatcttatcatcgcccacgtacacacccaattcctcgcaactgggctcccccgcctccacgacactgccccccgcctcaagtccgccgcctccattcttcagctctcctatcctccgtctgcctgtacctattggctgaagcagagctgacccccactttatcaagagttgctcaacaatggacactggctgcctgtcatctatgaatattactggagctagccagacaagatcttttgcggggcaacttcctcctcagagatgttttgcgagtagtcactatacaagctttgccgtgaaaaaacttgtctcaaggaataaaggaaggagatcacaccgtagacatcctgccttgcaggttgtctgcaaggattttccaagacctccactagaaagcacaataaactatttggaagctggacagctctcttcattttttagaaacagcgaacgccccagtaagccgttgcaggtcgtggttgctggtgcaggattggctggtctatcaacagcgaagtatctggcagatgctggacataaacccatattgcttgaggcaagagatgttttgggtggaaaggtagctgcttggaaggatgaagatggagattggtacgagactgggcttcatatcttttaatctgtttggcgagcttaggattgaggatcgtttacagtggaaagaacactctatgatattcgccatgccaaacaagccaggagaattcagccggtttgatttcccagaaactttgccagcacctataaatgggatatgggccatattgagaaacaatgaaatgcttacctggcccgagaaggtgaagtttgcaatcggacttctgccagcaatggttggtggtcaaccttatgttgaagctcaagatggcttaaccgtttcagaatggatgaaaaagcagggtgttcctgatcgggtgaacgatgaggtttttattgcaatgtccaaggcactcaatttcataaatcctgatgagctatctatgcagtgcattttgattgctttgaaccgatttcttcaggagaagcatggttctaaaatggcattcttggatggtaatccgcctgaaaggctatgcatgcctattgttgatcacattcggtctaggggtggagaggtccgcctgaattctcgtattaaaaagatagagctgaatcctgatggaactgtaaaacacttcgcacttagtgatggaactcagataactggagatgcttatgtttgtgcaacaccagtcgatatcttcaagcttcttgtacctcaagagtggagtgaaattacttatttcaagaaactggagaagttggtgggagttcctgttatcaatgttcatatatggtttgacagaaaactgaacaacacatatgaccaccttcttttcagcaggagttcacttttaagtgtctatgcagacatgtcagtaacctgcaaggaatactatgacccaaaccgttcaatgctggagttggtctttgctcctgcagacgaatggattggtcgaagtgacactgaaatcatcgatgcaactatggaagagctagccaagttatttcctgatgaaattgctgctgatcagagtaaagcaaagattcttaagtatcatattgtgaagacaccgagatcggtttacaaaactgtcccaaactgtgagccttgccggcctctccaaaggtcacctatcgaaggtttctatctagctggtgattacacaaagcagaaatacctggcttccatggaaggtgcagtcctatccgggaagctttgcgcccagtccattgtgcaggattatagcaggctcacactcaggagccagaaaagcctacaatcaggagaagttcccgtcccatcttagttgtagttggctttagctatcgtcatccccactgggtgctatcttatctcctatttcaatgggaacccacccaatggtcatgttggagacaacacctgttatggtcctttgaccatctcgtggtgactgtagttgatgtcatattcggatatatatgtaaaaggatctgcatagcaattgttagacctttgggaaagcaaaagcgataaagagatctcagatagatattgtgttctttcagacggtggttcctattcctatcaatcggttaatccatcccacatgggaggatttgtggtaagcttagtcagcaaacctctggtggtccctgctccctgaactttatcgggagagctgctgtagcaatccccgaagccgtgtgccgtttatcttgtcgggcatactttatttgccgagttgcagttattaagcacagggaggtgcggaatgcacttcgggcgtcgaagatatttttg

SEQ ID NO: 216974 - DNA, 2912 bp, Zea Mays
ctttctacggctccaaacaaatgcggaggtctccactcttctctcttcctccatcttatcatcgcccacgtacacacccaattcctcgcaactgggctcccccgcctccacgacactgccccccgcctcaagtccgccgcctccattcttcagctctcctatcctccgtagtctgcctgtacctattggctgaagcagagctgacccccactttatcaagagttgctcaacaatggacactggctgcctgtcatctatgaatattactggagctagccagacaagatcttttgcggggcaacttcctcctcagagatgttttgcgagtagtcactatacaagctttgccgtgaaaaaacttgtctcaaggaataaaggaaggagatcacaccgtagacatcctgccttgcaggttgtctgcaaggattttccaagacctccactagaaagcacaataaactatttggaagctggacagctctcttcattttttagaaacagcgaacgccccagtaagccgttgcaggtcgtggttgctggtgcaggattggctggtctatcaacagcgaagtatctggcagatgctggacataaacccatattgcttgaggcaagagatgttttgggtggaaaggtagctgcttggaaggatgaagatggagattggtacgagactgggcttcatatcttttgtaagttacagttctggtccttgaggtcctcttcatcatatttcatgttcttgattatttcttttagaaaaattacagttaaaatgatggtttctacacatattaacaaactgttcagacacaccatcacacaaacttctaaggcactctttccttgtatcatgcctttatttttcctaatggcacaggactttctttcaaggacaatctttaaatatctgtgcaaagtcattattgtgaaaagaaattttgttaacttacagtagttacagaatagcctgaaaagtttgcagacaccttaaacatacagcagcacatgtttcaattcacataaaccatgttgatgatagaccatcatatccataattccacagtcgaatatgtccttatgttcacatatcactggattgctaccattcccttcctagcatatatgacacttattatctatgtgtatgtaaccatgtattttggatttttggtttaagttggagcttatcccaacatacagaatctgtttggcgagcttaggattgaggatcgtttacagtggaaagaacactctatgatattcgccatgccaaacaagccaggagaattcagccggtttgatttcccagaaactttgccagcacctataaatgggatatgggccatattgagaaacaatgaaatgcttacctggcccgagaaggtgaagtttgcaatcggacttctgccagcaatggttggtggtcaaccttatgttgaagctcaagatggcttaaccgtttcagaatggatgaaaaagcagggtgttcctgatcgggtgaacgatgaggtttttattgcaatgtccaaggcactcaatttcataaatcctgatgagctatctatgcagtgcattttgattgctttgaaccgatttcttcaggagaagcatggttctaaaatggcattcttggatggtaatccgcctgaaaggctatgcatgcctattgttgatcacattcggtctaggggtggagaggtccgcctgaattctcgtattaaaaagatagagctgaatcctgatggaactgtaaaacacttcgcacttagtgatggaactcagataactggagatgcttatgtttgtgcaacaccagtcgatatcttcaagcttcttgtacctcaagagtggagtgaaattacttatttcaagaaactggagaagttggtgggagttcctgttatcaatgttcatatatggtttgacagaaaactgaacaacacatatgaccaccttcttttcagcaggagttcacttttaagtgtctatgcagacatgtcagtaacctgcaaggaatactatgacccaaaccgttcaatgctggagttggtctttgctcctgcagacgaatggattggtcgaagtgacactgaaatcatcgatgcaactatggaagagctagccaagttatttcctgatgaaattgctgctgatcagagtaaagcaaagattcttaagtatcatattgtgaagacaccgagatcggtttacaaaactgtcccaaactgtgagccttgccggcctctccaaaggtcacctatcgaaggtttctatctagctggtgattacacaaagcagaaatacctggcttccatggaaggtgcagtcctatccgggaagctttgcgcccagtccattgtgcaggattatagcaggctcacactcaggagccagaaaagcctacaatcaggagaagttcccgtcccatcttagttgtagttggctttagctatcgtcatccccactgggtgctatcttatctcctatttcaatgggaacccacccaatggtcatgttggagacaacacctgttatggtcctttgaccatctcgtggtgactgtagttgatgtcatattcggatatatatgtaaaaggatctgcatagcaattgttagacctttgggaaagcaaaagcgataaagagatctcagatagatattgtgttctttcagacggtggttcctattcctatcaatcggttaatccatcccacatgggaggatttgtggtaagcttagtcagcaaacctctggtggtccctgctccctgaactttatcgggagagctgctgtagcaatccccgaagccgtgtgccgtttatcttgtcgggcatactttatttgccgagttgcagttattaagcacagggaggtgcggaatgcacttcgggcgtcgaagatatttttg

SEQ ID NO: 216975 - DNA, 2384 bp, Zea Mays
ccaaacaaatgcggaggtctccactcttctctcttcctccatcttatcatcgcccacgtacacacccaattcctcgcaactgggctcccccgcctccacgacactgccccccgcctcaagtccgccgcctccattcttcagctctcctatcctccgtagtctgcctgtacctattggctgaagcagagctgacccccactttatcaagagttgctcaacaatggacactggctgcctgtcatctatgaatattactggagctagccagacaagatcttttgcggggcaacttcctcctcagagatgttttgcgagtagtcactatacaagctttgccgtgaaaaaacttgtctcaaggaataaaggaaggagatcacaccgtagacatcctgccttgcaggttgtctgcaaggattttccaagacctccactagaaagcacaataaactatttggaagctggacagctctcttcattttttagaaacagcgaacgccccagattggctggtctatcaacagcgaagtatctggcagatgctggacataaacccatattgcttgaggcaagagatgttttgggtggaaaggtagctgcttggaaggatgaagatggagattggtacgagactgggcttcatatcttttttggagcttatcccaacatacagaatctgtttggcgagcttaggattgaggatcgtttacagtggaaagaacactctatgatattcgccatgccaaacaagccaggagaattcagccggtttgatttcccagaaactttgccagcacctataaatgggatatgggccatattgagaaacaatgaaatgcttacctggcccgagaaggtgaagtttgcaatcggacttctgccagcaatggttggtggtcaaccttatgttgaagctcaagatggcttaaccgtttcagaatggatgaaaaagcagcacagggtgttcctgatcgggtgaacgatgaggtttttattgcaatgtccaaggcactcaatttcataaatcctgatgagctatctatgcagtgcattttgattgctttgaaccgatttcttcaggagaagcatggttctaaaatggcattcttggatggtaatccgcctgaaaggctatgcatgcctattgttgatcacattcggtctaggggtggagaggtccgcctgaattctcgtattaaaaagatagagctgaatcctgatggaactgtaaaacacttcgcacttagtgatggaactcagataactggagatgcttatgtttgtgcaacaccagtcgatatcttcaagcttcttgtacctcaagagtggagtgaaattacttatttcaagaaactggagaagttggtgggagttcctgttatcaatgttcatatatggtttgacagaaaactgaacaacacatatgaccaccttcttttcagcaggagttcacttttaagtgtctatgcagacatgtcagtaacctgcaaggaatactatgacccaaaccgttcaatgctggagttggtctttgctcctgcagacgaatggattggtcgaagtgacactgaaatcatcgatgcaactatggaagagctagccaagttatttcctgatgaaattgctgctgatcagagtaaagcaaagattcttaagtatcatattgtgaagacaccgagatcggtttacaaaactgtcccaaactgtgagccttgccggcctctccaaaggtcacctatcgaaggtttctatctagctggtgattacacaaagcagaaatacctggcttccatggaaggtgcagtcctatccgggaagctttgcgcccagtccattgtgcaggattatagcaggctcacactcaggagccagaaaagcctacaatcaggagaagttcccgtcccatcttagttgtagttggctttagctatcgtcatccccactgggtgctatcttatctcctatttcaatgggaacccacccaatggtcatgttggagacaacacctgttatggtcctttgaccatctcgtggtgactgtagttgatgtcatattcggatatatatgtaaaaggatctgcatagcaattgttagacctttgggaaagcaaaagcgataaagagatctcagatagatattgtgttctttcagacggtggttcctattcctatcaatcggttaatccatcccacatgggaggatttgtggtaagcttagtcagcaaacctctggtggtccctgctccctgaactttatcgggagagctgctgtagcaatccccgaagccgtgtgccgtttatcttgtcgggcatactttatttgccgagttgcagttattaagcacagggaggtgcggaatgcacttcgggcgtcgaagatatttttg

SEQ ID NO: 216976 - DNA, 2356 bp, Zea Mays
acaaatgcggaggtctccactcttctctcttcctccatcttatcatcgcccacgtacacacccaattcctcgcaactgggctcccccgcctccacgacactgccccccgcctcaagtccgccgcctccattcttcagctctcctatcctccgtagtctgcctgtacctattggctgaagcagagctgacccccactttatcaagagttgctcaacaatggacactggctgcctgtcatctatgaatattactggagctagccagacaagatcttttgcggggcaacttcctcctcagagatgttttgcgagtagtcactatacaagctttgccgtgaaaaaacttgtctcaaggaataaaggaaggagatcacaccgtagacatcctgccttgcaggttgtctgcaaggattttccaagacctccactagaaagcacaataaactatttggaagctggacagctctcttcattttttagaaacagcgaacgccccagtaagccgttgcaggtcgtggttgctggtgcaggattggctggtctatcaacagcgaagtatctggcagatgctggacataaacccatattgcttgaggcaagagatgttttgggtggaaaggtagctgcttggaaggatgaagatggagattggtacgagactgggcttcatatcttttttggagcttatcccaacatacagaatctgtttggcgagcttaggattgaggatcgtttacagtggaaagaacactctatgatattcgccatgccaaacaagccaggagaattcagccggtttgatttcccagaaactttgccagcacctataaatgggatatgggccatattgagaaacaatgaaatgcttacctggcccgagaaggtgaagtttgcaatcggacttctgccagcaatggttggtggtcaaccttatgttgaagctcaagatggcttaaccgtttcagaatggatgaaaaagcagggtgttcctgatcgggtgaacgatgaggtttttattgcaatgtccaaggcactcaatttcataaatcctgatgagctatctatgcagtgcattttgattgctttgaaccgatttcttcaggagaagcatggttctaaaatggcattcttggatggtaatccgcctgaaaggctatgcatgcctattgttgatcacattcggtctaggggtggagaggtccgcctgaattctcgtattaaaaagatagagctgaatcctgatggaactgtaaaacacttcgcacttagtgatggaactcagataactggagatgcttatgtttgtgcaacaccagtcgatatcttcaagcttcttgtacctcaagagtggagtgaaattacttatttcaagaaactggagaagttggtgggagttcctgttatcaatgttcatatatggtttgacagaaaactgaacaacacatatgaccaccttcttttcagcaggagttcacttttaagtgtctatgcagacatgtcagtaacctgcaagacgaatggattggtcgaagtgacactgaaatcatcgatgcaactatggaagagctagccaagttatttcctgatgaaattgctgctgatcagagtaaagcaaagattcttaagtatcatattgtgaagacaccgagatcggtttacaaaactgtcccaaactgtgagccttgccggcctctccaaaggtcacctatcgaaggtttctatctagctggtgattacacaaagcagaaatacctggcttccatggaaggtgcagtcctatccgggaagctttgcgcccagtccattgtgcaggattatagcaggctcacactcaggagccagaaaagcctacaatcaggagaagttcccgtcccatcttagttgtagttggctttagctatcgtcatccccactgggtgctatcttatctcctatttcaatgggaacccacccaatggtcatgttggagacaacacctgttatggtcctttgaccatctcgtggtgactgtagttgatgtcatattcggatatatatgtaaaaggatctgcatagcaattgttagacctttgggaaagcaaaagcgataaagagatctcagatagatattgtgttctttcagacggtggttcctattcctatcaatcggttaatccatcccacatgggaggatttgtggtaagcttagtcagcaaacctctggtggtccctgctccctgaactttatcgggagagctgctgtagcaatccccgaagccgtgtgccgtttatcttgtcgggcatactttatttgccgagttgcagttattaagcacagggaggtgcggaatgcacttcgggcgtcgaagatatttttg

SEQ ID NO: 216977 - DNA, 2402 bp, Zea Mays
acaaatgcggaggtctccactcttctctcttcctccatcttatcatcgcccacgtacacacccaattcctcgcaactgggctcccccgcctccacgacactgccccccgcctcaagtccgccgcctccattcttcagctctcctatcctccgtagtctgcctgtacctattggctgaagcagagctgacccccactttatcaagagttgctcaacaatggacactggctgcctgtcatctatgaatattactggagctagccagacaagatcttttgcggggcaacttcctcctcagagatgttttgcgagtagtcactatacaagctttgccgtgaaaaaacttgtctcaaggaataaaggaaggagatcacaccgtagacatcctgccttgcaggttgtctgcaaggattttccaagacctccactagaaagcacaataaactatttggaagctggacagctctcttcattttttagaaacagcgaacgccccagtaagccgttgcaggtcgtggttgctggtgcaggattggctggtctatcaacagcgaagtatctggcagatgctggacataaacccatattgcttgaggcaagagatgttttgggtggaaaggtagctgcttggaaggatgaagatggagattggtacgagactgggcttcatatcttttttggagcttatcccaacatacagaatctgtttggcgagcttaggattgaggatcgtttacagtggaaagaacactctatgatattcgccatgccaaacaagccaggagaattcagccggtttgatttcccagaaactttgccagcacctataaatgggatatgggccatattgagaaacaatgaaatgcttacctggcccgagaaggtgaagtttgcaatcggacttctgccagcaatggttggtggtcaaccttatgttgaagctcaagatggcttaaccgtttcagaatggatgaaaaagcagggtgttcctgatcgggtgaacgatgaggtttttattgcaatgtccaaggcactcaatttcataaatcctgatgagctatctatgcagtgcattttgattgctttgaaccgatttcttcagcatggttctaaaatggcattcttggatggtaatccgcctgaaaggctatgcatgcctattgttgatcacattcggtctaggggtggagaggtccgcctgaattctcgtattaaaaagatagagctgaatcctgatggaactgtaaaacacttcgcacttagtgatggaactcagataactggagatgcttatgtttgtgcaacaccagtcgatatcttcaagcttcttgtacctcaagagtggagtgaaattacttatttcaagaaactggagaagttggtgggagttcctgttatcaatgttcatatatggtttgacagaaaactgaacaacacatatgaccaccttcttttcagcaggagttcacttttaagtgtctatgcagacatgtcagtaacctgcaaggaatactatgacccaaaccgttcaatgctggagttggtctttgctcctgcagacgaatggattggtcgaagtgacactgaaatcatcgatgcaactatggaagagctagccaagttatttcctgatgaaattgctgctgatcagagtaaagcaaagattcttaagtatcatattgtgaagacaccgagatcggtttacaaaactgtcccaaactgtgagccttgccggcctctccaaaggtcacctatcgaaggtttctatctagctggtgattacacaaagcagaaatacctggcttccatggaaggtgcagtcctatccgggaagctttgcgcccagtccattgtgcaggattatagcaggctcacactcaggagccagaaaagcctacaatcaggagaagttcccgtcccatcttagttgtagttggctttagctatcgtcatccccactgggtgctatcttatctcctatttcaatgggaacccacccaatggtcatgttggagacaacacctgttatggtcctttgaccatctcgtggtgactgtagttgatgtcatattcggatatatatgtaaaaggatctgcatagcaattgttagacctttgggaaagcaaaagcgataaagagatctcagatagatattgtgttctttcagacggtggttcctattcctatcaatcggttaatccatcccacatgggaggatttgtggtaagcttagtcagcaaacctctggtggtccctgctccctgaactttatcgggagagctgctgtagcaatccccgaagccgtgtgccgtttatcttgtcgggcatactttatttgccgagttgcagttattaagcacagggaggtgcggaatgcacttcgggcgtcgaagatatttttg

SEQ ID NO: 216978 - DNA, 2253 bp, Zea Mays
caagaacaaaacagcagcagaagcctcgctctccatgccctggcacagagagtgtaagcagcatgcatggatctaacaatgtcaaccacgacgatgtccacgtccccagcgctcgaccatgaccatgaccatggtcaccacctcctctcctcagcctcacccacctccacagactcgccggcaacggcaatgcggccgcggccgccgtctctcccgcctacgatcccggcctgcgacccgcacgacgggccagcaagcctgcagctcatcgaggacctgaccacccacgccggcgccatccagcagcgcgtcctcggcgagatcctcgccatgaacgccggcacggactacgtccgcggcttccttggcgccaacgacgacgacgactccgccgagggacgccacgccgacgagctcgcggccacgttcaaggagcgcgtgccggtcgtggagtacgaggacgtgaagccgtacatcgagcgcatcgccaacggtgccccctcgtcgctcatctcctccaagaccatcaccgagctcctcactagctccggcacatctggcgggcaaccgaagctgatgccatccacagaggaggagctcgaccgcaagaccttcctctacaacctcctcgtccccgtgatgaacaagtacgtggaaggcctggacgaagggaggtgcatgtacctgctgttcgtgaagccggagatgaagacgccgtcggggcttgtggcgcggccggtgctcacgagctactacaagagccggcacttccgggagcggccggacagcccgtacacgcggtacacgagccccaacgaggccatcctgtgcgcggacagcgcgcagagcatgtacgcgcagctgctctgcggcctggcccgccgcggcgaggtgctgcgcgtgggcgccgtcttcgcctccgccttcctgcgcgcgctcaagttcctcgagggccactggcgcgcgctgtgcgacgacatccgcgccggccgcgtggacgcggcgcgcgtcaccgaccgcgcctgccgggacgccgtcgccagggtcgtggcgcggccggacgcggcgctggccgacgccatcgccgcggagtgcgaggccggggccgcgtcgtggcggggcatcgtgcggcggctctggccgcggaccaagtacatcgacgtcatcgtcacggggtccatggcgcagtacgtgcccctgctggagttctacggcggcggcctgccgctggtgtccaccatgtacgcctcctcggagtgctacttcggcatcaacctccgcccgctggaccggccggaggacgtggcctacacgctgctgcccaacatgtgctactacgagttcatcaaggtggagaaggacggcgaggaggtccgggacggggaggtggtggaccttgtcgacgtcgaggtcggagcctactacgagctcgtggtcaccacgttcacaggtctgtaccggtaccgcgtgggcgacatcctacaggtgtcaggcttccacaacgcggcgccgcagttccggttcgtgcaccgccgcaacgtggtgctgagcgtggacaccgacaagacctccgaggacgacctcctccgcgccgtcaccgccgccaagcgcctcctggcgccgctgggcgccatcctctccgagtacaccgcctacgccgggctggactccgtgtaccggcggtgccggagtcgcgaccgctccgtggggccgctggagatccgcgtggtgtccccgggcgccttcgacgagctcatggatctctgcgtctcccacgggtcctcggtcaaccagtacaagacgccccgctgcatcaagcaccccgacgccatcgccgtgctggaggcgcgcgtcgtcggcaggttcttcagcgacaccgtgccgcactgggagccgttcaatgtcgtcgacgctaacgccgccacggaagcggacgcccacggcgccgccaccgccagctgaaacgaaggcgcaagggtgcgctatgcccaacaacggtttagttggtttataatatatatatgatgatataattaattacgtagataattattgtgcatgtctagtgcgatgttcagttcacaggagggtgaatcgtggcgcgtgcgtatgtgtttgttgctgtagtgtgtatgttgtccaattgcattcgagattgatcatttgcttgtcaactggtcattcactcgttgtccctgttatctattatcaacaattcttcagcatttttaagataatggaaaaagttgactt

SEQ ID NO: 216979 - DNA, 3543 bp, Zea Mays
gtacgaaacccgcgggtatccatacccacgggtcaaacagccatccctagttaaactttatattctgtgctcctcgccggcaaccaagaaacaaacagaaacagcggttacgtttcaattcccgcctagggataagaccacgcttctctccgtctccatggcatggccatccaccgcagcaatctctctagacgcttcaagatctcaaggatctggcatcaatcggagcaatatcgcgccaaatccttcgcctcctcatctccaacgagcgagactacacccctcaaggtcctaaccgggctcctgcgcgacgcctattcgctgaaatgcctcagggagttgcacgcgcatctcgccgtcgcgggtgcgatccaggacacattcgtcgtcacaggtcttgtcgaaagttagtatcaaatttgttgagctgtggcttgagaagatgccagacaagaagatcgaaggggctgattcatctcacattgtctcttcaacaaaatctttggaaagttcagtagggcctaatctaattgaaagtactgatggagattattgtaataaccttcacaagacagcagttgccaattttgtggcatcaatgctgcaagaacatcctatgagccttatattggctgagaacaaaagcaatttgcaagaaatttcagttgaacagaagattcctatctttgtttctatcaacctttcaccaaaagtggatggcagtgaattgccatgccccattgaagttcatgatggtattacatcttcctctagcaaaactaacgaaccaatggaagcccaagattattcgaacacaatgaaatcaaacacagctagttgcatgttcgaggcatcaaagcggcaagaatgccctataagcctcatattggcagacaagaaaggcagtttgcaagaagtttcagttgaacaaaatgttccttgtggtgattatgttgccctttcacaaaaagcagacggtagtgaattgacatcaacccgtgaagctcctgaaggctttctaacttcctctagcaaagtttatgtattaaaggaagcccaagatggttctatcacaacggaagcttctaaagtaaatgtttgtgcagcttcacactccatgcttaggttaattgaaggagtccaggatgaggcttcttgtattgattctgataaggttacttgtgaaacaccacctgccatcctgaaaaagttgaaagaagataagccactggtcgtccatagatttcataagcaccaaatgagcctaggagacacacatcaaaaggtgcctgcacctgtgagcagatcaaacaccagcaaatacttaagaatggataaaaacattgttgatactacgactcccattgaatcagtaaaggctgttgcatcaaaatttggtggcagcatgaactggaaaactcgcaagacacagacagcacaggtgagtgaccgtatcgtacttgagcttgataagctgaagaacgaaatttcagaatgtaaacatcaagcagaagctgcagaggctgcaaagttatcagtattaaaagagctggagagaacaaagaagcttatcgacgaaatgaaacacgtcctggagagggaacaagctgaggaggtggatgccaaggatgacttggagttatttcaaattatattacaagcgatggagggagttgactgtaatgatagtgttgtggttagagagaagctgaataatattcaagaacgacacaaagcattggatgccaaagtgatttcagtgaaatatgtgttgggaaaagtgcaggaggattatgattctttgttgatcggaactgatatttccattaacaaagctcaggcagccttcacaatgtccaaaggtgcagagaaagaagtagaggagctcaccatagagctccaaagactaaaggaagtgtttgatttggctaacgccaaattccaggacgtggaagaacgcaagaacacgttgatggcacgtgatgaggatcgtcttgcatgggaagaggatctcaggcaatcagacaaagagctgaatcagatcagcatggacctttgttcttttcaagaattgcaatcaaagcatgatacgtcagccaccatgttgctcaatctgaagaatgaggtagccaattatttggaggcaaagcgaatcgaggaagcacgagaacaagaaagtggaactcataaacccgtgcaagaagtcatcattatgttaaagagcgagctcgtggagcagaggaagagcatagcgagggtgacggatgaattatgtgttctgaaagccacagctgaattgctaaaatcgcaattgaagaaagagaaagcagcacttgctgccgctcagcagatggaagtgatggcatccatgtccactcagtctctcaagatggacatcaaactgtcacagcaggaacttgaagcacttcatgccaaggcaaaggagtgccgagatagatcgggcaaggctctgcaagatgcgtcccatgaagctgacgaggcgaaggttattgctaccaaggctcagggggagctaaaaaagacagaggaagaagtggcgcaagcgaaggctgctctgagcactgtggaatccaagctcgaagcagttctgagggacatacaggcagcgaaagcgtccgagaggctggcgctcgatactctgacgacgacgacactggaggagcacagcaaggtcggcgctcgatactctgagacggtcacgcttgacctggatgagtacacgtctctggttcagaggtcacgtcaggcagaagaggctgcgcacgagaagacaacagctgcttccaccgcagaggttgaggcggcaaaggagtccgcggcgcgcaccatatccagactgaacgagatcttgcaggccttggaagagcagaagcaggcactggcagccgccaccgagcgggcgggcagggcgagcgaaggcaagctggccatggagcaggagctgaggcaacggagagaggaggagaacgggaagcgccgccgcatggccagtgaagctccaaagcctgtaaccgggcctcggagcgctgcagagatcgcgggtagagtcgacatgacgttgacgtgcacgggcaaaggagatagtagctgtcccgccgcgtcggtccatccggtgtcggacgcgtccgggaccgggaccgggaggagcagccccagcgatgcggccctgccagtgccagtgccagcgaagacgaagaaggcaaagaagctgccgttcttcactcgcgtcgtcatgttcctggggggcaggaggaggaggaggctcagagctgccaggtgattttccgtttccttgtgttccttatctgtgtgcccgtgtcgcgtgtggtgtttgtcagtgctgggagcgtgtaaacttcactggtttttactcgattgcacgttgttcgtgctggatgtgttcgaagattgtgtgagattgcatggggtgttcggtttgctggacaagacaagatggttctgtaacacggttggcttgggtttttttttctcatgctcatgtcccggttttgtgaacgctag

SEQ ID NO: 216980 - DNA, 6144 bp, Zea Mays
gtttcaattcccgcctagggataagaccacgcttctctccgtctccatggcatggccatccaccgcagcaatctctctagacgcttcaagatctcaaggatctggcatcaatcggagcaatatcgcgccaaatccttcgcctcctcatctccaacgagcgagactacacccctcaaggtcctaaccgggctcctgcgcgacgcctattcgctgaaatgcctcagggagttgcacgcgcatctcgccgtcgcgggtgcgatccaggacacattcgtcgtcacaggtcttgtcgaaaggtatgtttattttgggaaggccgcgtctgcggcgttgctatttgccgaaacctaccgcagccgccccgctgtgtactcactgaatctcgcggtccggtgcttctcggaccatggcttccaccgggagcttcttcatctttaccgggagctatgttgctttggctcggacaacttcaccttccctccggtcatcagggcgtgcacagctgtctcttgccttcggctggggagggagatgcactgcagggttcttcgtacaggtcatggtggcaatgttggcgtgcagactgcgctccttgacctgtatgctaaggctggccagattgatgtgtcaaggagagtctttgactgcatggtgctgagggacttgatttcttggaatgctatggtctcagggtactcactcaatgaatgcttccgagaagctgttgagatgttgcaggagatgcagcagggtggcatgaggccgaatgcaagcacttttgttggcatagttggcatgtgcggaagtgtcggagacagggatgttggtgattcgctgcatgcatttgcactgaaaggtggagtgattaatgacgaatctcttacatccgcattaatcacaatgtatgctgcatttgatgatctttcctcatctcgaatggtattcgatctgcatcctgtgaaagatttggtatctttcaattccatgatatcagcatacatgcagcaccacatttggaaggaagcttttgagatctttcgattgatgcattgtgtagctgtacggcctaacctggtcacagtggtgtctgtccttccttcttgcagtgatttctttggtataaaccatggggagtctgtgcacggcatgattatcaaacttggccttgcagagcacgtttctgttgctagcgctcttgtgtccatgtattcgaagcttgggaaattggactcatcgttgctccttttctgctgttgtgttgctccagatgctacaactatcatgaatgtaatatctggatgtagatacacaaaagatttacacatggcaaagtcaatacatgcatatgctgttagaaataaatttgaatcatatcatagcgttatgaatgcactcctagccatgtacgcagactgcagagatatatcaacatcccatacattattccagaaaatggaagtgcggatgttgatatcttggaacactatgatatctggttttgctgaaattggagattcagatacttgtctaatattattctgccagatgttccacgaagaagtgcaatttgatctagttactctgattggtcttatcagtagcttttcagtacccggggatgccatagttggagaatcagttcattctttagcaatcaaaagtggatgtaattcagatgtttctcttactaatgccctcattaccatgtacgccaactgtggtattgttgaagcaggtcagcaactttttgacagttgctgttctaggaatacaattacttacaatgctttgatgagtggatatcgcaaaaacaacatatctgcgaagatattgccattgttttaccaaatggtcgagaatgacgagaaaccgaaccttgtaaccttactgaatttattgcctgtttgtcagagccagttgcaggggaagtgtatacacagctatgcagtacgtaatttcaccaggttggaaacacccctcttcacatcagccatgggtatgtatagtaggttcaataatatagaatactgcagcaaaattttcagtttgatcggtgcaagaaaccttatagtatggaatgccttcttatctgcatgtgttcaatgcaagcaagctgatatggtagttgattgctttaagcatatgctcttccttaatgtcagacctgatgcagtaactatgctggcactcatctcagcatgttcacaacttggaaatgcatattttgctgcatgtattatggctgtcatacttcagaagggctttagcacgaatattttggttcttaatgctcttattgacacacattcgaggtgcggaagcatatcacttgcaagggagctctttgatagctcagtggagaaagattcagtcacttggggtgcaatgatcaacgcatacagtatgcatgggaatggtgaggctgcccttgatcttttctcaatgatgatagattcaggagtggatccagatgatataacttttgttagtatattatcggcctgcgctcataatggactcgtagagcaaggaagaacattgttcaaatcgctacaggcagactatggcattacaccgcgaatggagcattatgcatgtatggtggatctattgggccgaactggccacttggatgaagcatatgatgttgttaggtcaatgccattcaggccatcagataacttgcttgaatcattgcttggagcatgcagattccatggtaattataaaattggcgagtctataggaaaattactcatcaaatctgagtatggcaagtcaaggtcttatgttatgctctcgaacatatatgcttcagctggcaaatggagtgattgcgagcagctaagattagacatggaagcaaaaggattgcggaaaaatgtgggggttagctctattgggatgacatagccctgatgcaacaatgttatagagtttttcagaagttttttcccccacacattacagtttcgggaaatgccttcagagtaatttgaacttcaaaattagtatcaaatttgttgagctgtggcttgagaagatgccagacaagaagatcgaaggggctgattcatctcacattgtctcttcaacaaaatctttggaaagttcagtagggcctaatctaattgaaagtactgatggagattattgtaataaccttcacaagacagcagttgccaattttgtggcatcaatgctgcaagaacatcctatgagccttatattggctgagaacaaaagcaatttgcaagaaatttcagttgaacagaagattcctatctttgtttctatcaacctttcaccaaaagtggatggcagtgaattgccatgccccattgaagttcatgatggtattacatcttcctctagcaaaactaacgaaccaatggaagcccaagattattcgaacacaatgaaatcaaacacagctagttgcatgttcgaggcatcaaagcggcaagaatgccctataagcctcatattggcagacaagaaaggcagtttgcaagaagtttcagttgaacaaaatgttccttgtggtgattatgttgccctttcacaaaaagcagacggtagtgaattgacatcaacccgtgaagctcctgaaggctttctaacttcctctagcaaagtttatgtattaaaggaagcccaagatggttctatcacaacggaagcttctaaagtaaatgtttgtgcagcttcacactccatgcttaggttaattgaaggagtccaggatgaggcttcttgtattgattctgataaggttacttgtgaaacaccacctgccatcctgaaaaagttgaaagaagataagccactggtcgtccatagatttcataagcaccaaatgagcctaggagacacacatcaaaaggtgcctgcacctgtgagcagatcaaacaccagcaaatacttaagaatggataaaaacattgttgatactacgactcccattgaatcagtaaaggctgttgcatcaaaatttggtggcagcatgaactggaaaactcgcaagacacagacagcacaggtgagtgaccgtatcgtacttgagcttgataagctgaagaacgaaatttcagaatgtaaacatcaagcagaagctgcagaggctgcaaagttatcagtattaaaagagctggagagaacaaagaagcttatcgacgaaatgaaacacgtcctggagagggaacaagctgaggaggtggatgccaaggatgacttggagttatttcaaattatattacaagcgatggagggagttgactgtaatgatagtgttgtggttagagagaagctgaataatattcaagaacgacacaaagcattggatgccaaagtgatttcagtgaaatatgtgttgggaaaagtgcaggaggattatgattctttgttgatcggaactgatatttccattaacaaagctcaggcagccttcacaatgtccaaaggtgcagagaaagaagtagaggagctcaccatagagctccaaagactaaaggaagtgtttgatttggctaacgccaaattccaggacgtggaagaacgcaagaacacgttgatggcacgtgatgaggatcgtcttgcatgggaagaggatctcaggcaatcagacaaagagctgaatcagatcagcatggacctttgttcttttcaagaattgcaatcaaagcatgatacgtcagccaccatgttgctcaatctgaagaatgaggtagccaattatttggaggcaaagcgaatcgaggaagcacgagaacaagaaagtggaactcataaacccgtgcaagaagtcatcattatgttaaagagcgagctcgtggagcagaggaagagcatagcgagggtgacggatgaattatgtgttctgaaagccacagctgaattgctaaaatcgcaattgaagaaagagaaagcagcacttgctgccgctcagcagatggaagtgatggcatccatgtccactcagtctctcaagatggacatcaaactgtcacagcaggaacttgaagcacttcatgccaaggcaaaggagtgccgagatagatcgggcaaggctctgcaagatgcgtcccatgaagctgacgaggcgaaggttattgctaccaaggctcagggggagctaaaaaagacagaggaagaagtggcgcaagcgaaggctgctctgagcactgtggaatccaagctcgaagcagttctgagggacatacaggcagcgaaagcgtccgagaggctggcgctcgatactctgacgacgacgacactggaggagcacagcaaggtcggcgctcgatactctgagacggtcacgcttgacctggatgagtacacgtctctggttcagaggtcacgtcaggcagaagaggctgcgcacgagaagacaacagctgcttccaccgcagaggttgaggcggcaaaggagtccgcggcgcgcaccatatccagactgaacgagatcttgcaggccttggaagagcagaagcaggcactggcagccgccaccgagcgggcgggcagggcgagcgaaggcaagctggccatggagcaggagctgaggcaacggagagaggaggagaacgggaagcgccgccgcatggccagtgaagctccaaagcctgtaaccgggcctcggagcgctgcagagatcgcgggtagagtcgacatgacgttgacgtgcacgggcaaaggagatagtagctgtcccgccgcgtcggtccatccggtgtcggacgcgtccgggaccgggaccgggaggagcagccccagcgatgcggccctgccagtgccagtgccagcgaagacgaagaaggcaaagaagctgccgttcttcactcgcgtcgtcatgttcctggggggcaggaggaggaggaggctcagagctgccaggtgattttccgtttccttgtgttccttatctgtgtgcccgtgtcgcgtgtggtgtttgtcagtgctgggagcgtgtaaacttcactggtttttactcgattgcacgttgttcgtgctggatgtgttcgaagattgtgtgagattgcatggggtgttcggtttgctggacaagacaagatggttctgtaacacggttggcttgggtttttttttctcatgctcatgtcccggttttgtgaacgctag

SEQ ID NO: 216981 - DNA, 6140 bp, Zea Mays
gtttcaattcccgcctagggataagaccacgcttctctccgtctccatggcatggccatccaccgcagcaatctctctagacgcttcaagatctcaaggatctggcatcaatcggagcaatatcgcgccaaatccttcgcctcctcatctccaacgagcgagactacacccctcaaggtcctaaccgggctcctgcgcgacgcctattcgctgaaatgcctcagggagttgcacgcgcatctcgccgtcgcgggtgcgatccaggacacattcgtcgtcacaggtcttgtcgaaaggtatgtttattttgggaaggccgcgtctgcggcgttgctatttgccgaaacctaccgcagccgccccgctgtgtactcactgaatctcgcggtccggtgcttctcggaccatggcttccaccgggagcttcttcatctttaccgggagctatgttgctttggctcggacaacttcaccttccctccggtcatcagggcgtgcacagctgtctcttgccttcggctggggagggagatgcactgcagggttcttcgtacaggtcatggtggcaatgttggcgtgcagactgcgctccttgacctgtatgctaaggctggccagattgatgtgtcaaggagagtctttgactgcatggtgctgagggacttgatttcttggaatgctatggtctcagggtactcactcaatgaatgcttccgagaagctgttgagatgttgcaggagatgcagcagggtggcatgaggccgaatgcaagcacttttgttggcatagttggcatgtgcggaagtgtcggagacagggatgttggtgattcgctgcatgcatttgcactgaaaggtggagtgattaatgacgaatctcttacatccgcattaatcacaatgtatgctgcatttgatgatctttcctcatctcgaatggtattcgatctgcatcctgtgaaagatttggtatctttcaattccatgatatcagcatacatgcagcaccacatttggaaggaagcttttgagatctttcgattgatgcattgtgtagctgtacggcctaacctggtcacagtggtgtctgtccttccttcttgcagtgatttctttggtataaaccatggggagtctgtgcacggcatgattatcaaacttggccttgcagagcacgtttctgttgctagcgctcttgtgtccatgtattcgaagcttgggaaattggactcatcgttgctccttttctgctgttgtgttgctccagatgctacaactatcatgaatgtaatatctggatgtagatacacaaaagatttacacatggcaaagtcaatacatgcatatgctgttagaaataaatttgaatcatatcatagcgttatgaatgcactcctagccatgtacgcagactgcagagatatatcaacatcccatacattattccagaaaatggaagtgcggatgttgatatcttggaacactatgatatctggttttgctgaaattggagattcagatacttgtctaatattattctgccagatgttccacgaagaagtgcaatttgatctagttactctgattggtcttatcagtagcttttcagtacccggggatgccatagttggagaatcagttcattctttagcaatcaaaagtggatgtaattcagatgtttctcttactaatgccctcattaccatgtacgccaactgtggtattgttgaagcaggtcagcaactttttgacagttgctgttctaggaatacaattacttacaatgctttgatgagtggatatcgcaaaaacaacatatctgcgaagatattgccattgttttaccaaatggtcgagaatgacgagaaaccgaaccttgtaaccttactgaatttattgcctgtttgtcagagccagttgcaggggaagtgtatacacagctatgcagtacgtaatttcaccaggttggaaacacccctcttcacatcagccatgggtatgtatagtaggttcaataatatagaatactgcagcaaaattttcagtttgatcggtgcaagaaaccttatagtatggaatgccttcttatctgcatgtgttcaatgcaagcaagctgatatggtagttgattgctttaagcatatgctcttccttaatgtcagacctgatgcagtaactatgctggcactcatctcagcatgttcacaacttggaaatgcatattttgctgcatgtattatggctgtcatacttcagaagggctttagcacgaatattttggttcttaatgctcttattgacacacattcgaggtgcggaagcatatcacttgcaagggagctctttgatagctcagtggagaaagattcagtcacttggggtgcaatgatcaacgcatacagtatgcatgggaatggtgaggctgcccttgatcttttctcaatgatgatagattcaggagtggatccagatgatataacttttgttagtatattatcggcctgcgctcataatggactcgtagagcaaggaagaacattgttcaaatcgctacaggcagactatggcattacaccgcgaatggagcattatgcatgtatggtggatctattgggccgaactggccacttggatgaagcatatgatgttgttaggtcaatgccattcaggccatcagataacttgcttgaatcattgcttggagcatgcagattccatggtaattataaaattggcgagtctataggaaaattactcatcaaatctgagtatggcaagtcaaggtcttatgttatgctctcgaacatatatgcttcagctggcaaatggagtgattgcgagcagctaagattagacatggaagcaaaaggattgcggaaaaatgtgggggttagctctattgggatgacatagccctgatgcaacaatgttatagagtttttcagaagttttttcccccacacattacagtttcgggaaatgccttcagagtaatttgaacttcaaaatatcaaatttgttgagctgtggcttgagaagatgccagacaagaagatcgaaggggctgattcatctcacattgtctcttcaacaaaatctttggaaagttcagtagggcctaatctaattgaaagtactgatggagattattgtaataaccttcacaagacagcagttgccaattttgtggcatcaatgctgcaagaacatcctatgagccttatattggctgagaacaaaagcaatttgcaagaaatttcagttgaacagaagattcctatctttgtttctatcaacctttcaccaaaagtggatggcagtgaattgccatgccccattgaagttcatgatggtattacatcttcctctagcaaaactaacgaaccaatggaagcccaagattattcgaacacaatgaaatcaaacacagctagttgcatgttcgaggcatcaaagcggcaagaatgccctataagcctcatattggcagacaagaaaggcagtttgcaagaagtttcagttgaacaaaatgttccttgtggtgattatgttgccctttcacaaaaagcagacggtagtgaattgacatcaacccgtgaagctcctgaaggctttctaacttcctctagcaaagtttatgtattaaaggaagcccaagatggttctatcacaacggaagcttctaaagtaaatgtttgtgcagcttcacactccatgcttaggttaattgaaggagtccaggatgaggcttcttgtattgattctgataaggttacttgtgaaacaccacctgccatcctgaaaaagttgaaagaagataagccactggtcgtccatagatttcataagcaccaaatgagcctaggagacacacatcaaaaggtgcctgcacctgtgagcagatcaaacaccagcaaatacttaagaatggataaaaacattgttgatactacgactcccattgaatcagtaaaggctgttgcatcaaaatttggtggcagcatgaactggaaaactcgcaagacacagacagcacaggtgagtgaccgtatcgtacttgagcttgataagctgaagaacgaaatttcagaatgtaaacatcaagcagaagctgcagaggctgcaaagttatcagtattaaaagagctggagagaacaaagaagcttatcgacgaaatgaaacacgtcctggagagggaacaagctgaggaggtggatgccaaggatgacttggagttatttcaaattatattacaagcgatggagggagttgactgtaatgatagtgttgtggttagagagaagctgaataatattcaagaacgacacaaagcattggatgccaaagtgatttcagtgaaatatgtgttgggaaaagtgcaggaggattatgattctttgttgatcggaactgatatttccattaacaaagctcaggcagccttcacaatgtccaaaggtgcagagaaagaagtagaggagctcaccatagagctccaaagactaaaggaagtgtttgatttggctaacgccaaattccaggacgtggaagaacgcaagaacacgttgatggcacgtgatgaggatcgtcttgcatgggaagaggatctcaggcaatcagacaaagagctgaatcagatcagcatggacctttgttcttttcaagaattgcaatcaaagcatgatacgtcagccaccatgttgctcaatctgaagaatgaggtagccaattatttggaggcaaagcgaatcgaggaagcacgagaacaagaaagtggaactcataaacccgtgcaagaagtcatcattatgttaaagagcgagctcgtggagcagaggaagagcatagcgagggtgacggatgaattatgtgttctgaaagccacagctgaattgctaaaatcgcaattgaagaaagagaaagcagcacttgctgccgctcagcagatggaagtgatggcatccatgtccactcagtctctcaagatggacatcaaactgtcacagcaggaacttgaagcacttcatgccaaggcaaaggagtgccgagatagatcgggcaaggctctgcaagatgcgtcccatgaagctgacgaggcgaaggttattgctaccaaggctcagggggagctaaaaaagacagaggaagaagtggcgcaagcgaaggctgctctgagcactgtggaatccaagctcgaagcagttctgagggacatacaggcagcgaaagcgtccgagaggctggcgctcgatactctgacgacgacgacactggaggagcacagcaaggtcggcgctcgatactctgagacggtcacgcttgacctggatgagtacacgtctctggttcagaggtcacgtcaggcagaagaggctgcgcacgagaagacaacagctgcttccaccgcagaggttgaggcggcaaaggagtccgcggcgcgcaccatatccagactgaacgagatcttgcaggccttggaagagcagaagcaggcactggcagccgccaccgagcgggcgggcagggcgagcgaaggcaagctggccatggagcaggagctgaggcaacggagagaggaggagaacgggaagcgccgccgcatggccagtgaagctccaaagcctgtaaccgggcctcggagcgctgcagagatcgcgggtagagtcgacatgacgttgacgtgcacgggcaaaggagatagtagctgtcccgccgcgtcggtccatccggtgtcggacgcgtccgggaccgggaccgggaggagcagccccagcgatgcggccctgccagtgccagtgccagcgaagacgaagaaggcaaagaagctgccgttcttcactcgcgtcgtcatgttcctggggggcaggaggaggaggaggctcagagctgccaggtgattttccgtttccttgtgttccttatctgtgtgcccgtgtcgcgtgtggtgtttgtcagtgctgggagcgtgtaaacttcactggtttttactcgattgcacgttgttcgtgctggatgtgttcgaagattgtgtgagattgcatggggtgttcggtttgctggacaagacaagatggttctgtaacacggttggcttgggtttttttttctcatgctcatgtcccggttttgtgaacgctag

SEQ ID NO: 216982 - DNA, 3607 bp, Zea Mays
tagggataagaccacgcttctctccgtctccatggcatggccatccaccgcagcaatctctctagacgcttcaagatctcaaggatctggcatcaatcggagcaatatcgcgccaaatccttcgcctcctcatctccaacgagcgagactacacccctcaaggtcctaaccgggctcctgcgcgacgcctattcgctgaaatgcctcagggagttgcacgcgcatctcgccgtcgcgggtgcgatccaggacacattcgtcgtcacaggtcttgtcgaaaggaaaacattccattactgttcaaccccataatatgttggagtcgttaactgcactaaagtgaactatttctatctatgcgcaacaaggagtgttgcatctaatatctactacaatttccaaggaagaggcagttgaatgtttctagcagacacctgcaattctgaaatgtcattactgtctagttgtcagttagtatcaaatttgttgagctgtggcttgagaagatgccagacaagaagatcgaaggggctgattcatctcacattgtctcttcaacaaaatctttggaaagttcagtagggcctaatctaattgaaagtactgatggagattattgtaataaccttcacaagacagcagttgccaattttgtggcatcaatgctgcaagaacatcctatgagccttatattggctgagaacaaaagcaatttgcaagaaatttcagttgaacagaagattcctatctttgtttctatcaacctttcaccaaaagtggatggcagtgaattgccatgccccattgaagttcatgatggtattacatcttcctctagcaaaactaacgaaccaatggaagcccaagattattcgaacacaatgaaatcaaacacagctagttgcatgttcgaggcatcaaagcggcaagaatgccctataagcctcatattggcagacaagaaaggcagtttgcaagaagtttcagttgaacaaaatgttccttgtggtgattatgttgccctttcacaaaaagcagacggtagtgaattgacatcaacccgtgaagctcctgaaggctttctaacttcctctagcaaagtttatgtattaaaggaagcccaagatggttctatcacaacggaagcttctaaagtaaatgtttgtgcagcttcacactccatgcttaggttaattgaaggagtccaggatgaggcttcttgtattgattctgataaggttacttgtgaaacaccacctgccatcctgaaaaagttgaaagaagataagccactggtcgtccatagatttcataagcaccaaatgagcctaggagacacacatcaaaaggtgcctgcacctgtgagcagatcaaacaccagcaaatacttaagaatggataaaaacattgttgatactacgactcccattgaatcagtaaaggctgttgcatcaaaatttggtggcagcatgaactggaaaactcgcaagacacagacagcacaggtgagtgaccgtatcgtacttgagcttgataagctgaagaacgaaatttcagaatgtaaacatcaagcagaagctgcagaggctgcaaagttatcagtattaaaagagctggagagaacaaagaagcttatcgacgaaatgaaacacgtcctggagagggaacaagctgaggaggtggatgccaaggatgacttggagttatttcaaattatattacaagcgatggagggagttgactgtaatgatagtgttgtggttagagagaagctgaataatattcaagaacgacacaaagcattggatgccaaagtgatttcagtgaaatatgtgttgggaaaagtgcaggaggattatgattctttgttgatcggaactgatatttccattaacaaagctcaggcagccttcacaatgtccaaaggtgcagagaaagaagtagaggagctcaccatagagctccaaagactaaaggaagtgtttgatttggctaacgccaaattccaggacgtggaagaacgcaagaacacgttgatggcacgtgatgaggatcgtcttgcatgggaagaggatctcaggcaatcagacaaagagctgaatcagatcagcatggacctttgttcttttcaagaattgcaatcaaagcatgatacgtcagccaccatgttgctcaatctgaagaatgaggtagccaattatttggaggcaaagcgaatcgaggaagcacgagaacaagaaagtggaactcataaacccgtgcaagaagtcatcattatgttaaagagcgagctcgtggagcagaggaagagcatagcgagggtgacggatgaattatgtgttctgaaagccacagctgaattgctaaaatcgcaattgaagaaagagaaagcagcacttgctgccgctcagcagatggaagtgatggcatccatgtccactcagtctctcaagatggacatcaaactgtcacagcaggaacttgaagcacttcatgccaaggcaaaggagtgccgagatagatcgggcaaggctctgcaagatgcgtcccatgaagctgacgaggcgaaggttattgctaccaaggctcagggggagctaaaaaagacagaggaagaagtggcgcaagcgaaggctgctctgagcactgtggaatccaagctcgaagcagttctgagggacatacaggcagcgaaagcgtccgagaggctggcgctcgatactctgacgacgacgacactggaggagcacagcaaggtcggcgctcgatactctgagacggtcacgcttgacctggatgagtacacgtctctggttcagaggtcacgtcaggcagaagaggctgcgcacgagaagacaacagctgcttccaccgcagaggttgaggcggcaaaggagtccgcggcgcgcaccatatccagactgaacgagatcttgcaggccttggaagagcagaagcaggcactggcagccgccaccgagcgggcgggcagggcgagcgaaggcaagctggccatggagcaggagctgaggcaacggagagaggaggagaacgggaagcgccgccgcatggccagtgaagctccaaagcctgtaaccgggcctcggagcgctgcagagatcgcgggtagagtcgacatgacgttgacgtgcacgggcaaaggagatagtagctgtcccgccgcgtcggtccatccggtgtcggacgcgtccgggaccgggaccgggaggagcagccccagcgatgcggccctgccagtgccagtgccagcgaagacgaagaaggcaaagaagctgccgttcttcactcgcgtcgtcatgttcctggggggcaggaggaggaggaggctcagagctgccaggtgattttccgtttccttgtgttccttatctgtgtgcccgtgtcgcgtgtggtgtttgtcagtgctgggagcgtgtaaacttcactggtttttactcgattgcacgttgttcgtgctggatgtgttcgaagattgtgtgagattgcatggggtgttcggtttgctggacaagacaagatggttctgtaacacggttggcttgggtttttttttctcatgctcatgtcccggttttgtgaacgctag

SEQ ID NO: 216983 - DNA, 1772 bp, Zea Mays
attcagtcggcctcgctactttcctaagtggaaaaagggttctctcaggccatttccttgagccgttccgctgccattcgaccaccaccgccacggcggcgccgatgccgactacaaccactcgcagagactaccgcctccagccccgctgcttctcatctccacgcagccgtccgatggccaagcggctcgccggtgccgacaaagaggtgctcgtcgaggtggtgaggttcacgcataagagcggactgaggggctgtgacggcggctggaaggatttcctggcccagaacgacaggaagtttggcgcgtcggtgagcgacccgaggaagcgctccagggacgtgctgttcgccttcctgcagaccttccccaaggatttccagaagaaacacttgatgccactagtccgacgagagccaccggaagacaacgcaggcattcctcagtccccaaagtgagctgctgggcagctgctcatcaccaacacaattctaacccccagcagtttcaggcgattggcatacgaatcgcaaagacgctgcatgccttctatcagttctgccgaccacacacaatatttggaaccgcattacttcggtgtctatcctgccagtgaaagagcctggacgattttacgttgatagctatatggggatttctcgaggctttggccgccgcattatgtatgaacgtttatgtagtagggctgaacaagtttcagataaccttttgaaggtcaataagccaaccctcccattagcgttcggagagttttcaatgccaactgcagtattgttagtagtggcattcttggtcatgagcattagcatcggaataagatcaaagtctgctccattgatgtgtgctttgcttgtttgcttccttcttggaagcgcatactccattgacgttccattactccggtggaagcgacatgcttttctagctgcattctgcataatctttgtgagggctgtagtggtccagttagctttctttgcacacatgcagtgcctgatggtgttgtttgcagcaacatgttctgaagaggcccttggcacctacaaggtgcataggctctgcattaatattctcatgacagcatacgcagccgcaattttggtaggcgcgtcatctacgaacctgtatcagaagattgtcattgtgtctggtcatggcttgcttgcctccacactctggcaaagagcacaacaatttgacattgagaataaggattgtatcacacaattttatatgttcatttggaagttattctacgccgagtattttcttataccatttgtgtagtaaagaatcatgcgaagaacaacacccctgctatagacatgtgaaggtttattgctaatgttactctaccccctgctatagacatgtgaaggtttattgctaatgttactctaccgaatggtctgaatgtctatgcgtcatttgaatgtaatatgactatttgttgtatcagggtaacaactggagcaaatgtaccatgtatattaagcattaatttaactgcatcatttgtaccatgtatattatgactatgtatgagatattgtctcttattagtactggatgtgatgtgtcttattatgactatggatgagacttttgtgatgtaattgatgagactatggttttaaatattgttatgtgattgtgtgtgagatattttatgtgaaaatatgatgtgctatatagttgttgatatatttgttatgttgtggaatgtggtgtaaaagaaaaataaacaa

SEQ ID NO: 216984 - DNA, 1279 bp, Zea Mays
attcagtcggcctcgctactttcctaagtggaaaaagggttctctcaggccatttccttgagccgttccgctgccattcgaccaccaccgccacggcggcgccgatgccgactacaaccactcgcagagactaccgcctccagccccgctgcttctcatctccacgcagccgtccgatggccaagcggctcgccggtgccgacaaagaggtgctcgtcgaggtggtgaggttcacgcataagagcggactgaggggctgtgacggcggctggaaggatttcctggcccagaacgacaggaagtttggcgcgtcggtgagcgacccgaggaagcgctccagggacgtgctgttcgccttcctgcagaccttccccaaggatttccagaagaaacacttgatgccactagtccgacgagagccaccggaagacaacgcaggcattcctcagtccccaaagtgagctgctgggcagctgctcatcaccaacacaattctaacccccagcagtttcaggcgattggcatacgaatcgcaaagacgctgcatgccttctatcagttctgccgaccacacacaatatttggaaccataataggcattacttcggtgtctatcctgccagtgaaagagcctggacgattttacgttgatagctatatggggatttctcgaggtgtctggtcatggcttgcttgcctccacactctggcaaagagcacaacaatttgacattgagaataaggattgtatcacacaattttatatgttcatttggaagttattctacgccgagtattttcttataccatttgtgtagtaaagaatcatgcgaagaacaacacccctgctatagacatgtgaaggtttattgctaatgttactctaccccctgctatagacatgtgaaggtttattgctaatgttactctaccgaatggtctgaatgtctatgcgtcatttgaatgtaatatgactatttgttgtatcagggtaacaactggagcaaatgtaccatgtatattaagcattaatttaactgcatcatttgtaccatgtatattatgactatgtatgagatattgtctcttattagtactggatgtgatgtgtcttattatgactatggatgagacttttgtgatgtaattgatgagactatggttttaaatattgttatgtgattgtgtgtgagatattttatgtgaaaatatgatgtgctatatagttgttgatatatttgttatgttgtggaatgtggtgtaaaagaaaaataaacaa

SEQ ID NO: 216985 - DNA, 1396 bp, Zea Mays
attctcctctaaaccctagccgcctagcgcctcgatctgagcagcctgtctcgcggaggtagttctggttgatttggtcctagatggcggaggaaaaagtggggcggatcttcgtcggcgggctgtcgtggaacaccacggagcgcacgctcgagcgcaccttcggtcagtacggcaaggtcatcgaggctcagagactgcagtcagttcaatttctgcatgttaggaagttagcaaagttgcaggaaaagaaattcactaatcatttgagctcactggttagcattttttgcgatgatgggttcagtaaagatcaattggaggcatatacactgttagattcagttttgctaggtgtgatctgttttgtggacagaaccagatacctgtttttgccttgttagcacttaagataactgcttccagctttagaacacaaaagaatcatcaccggcatggttaatgaactccagtcaagtaaacatggttgccagcactggactgaacttgtggcaaaatttggttgtgtcattctggatcagtttgataagaaaggcagagaaaccatttgtcctttcagtagcgaggcagcaatggtgatgctgaagaatgttgtatgctcatctttgcctacacttgcttcaaagagcattattcccagtgtccatcactccattgtgcatttccatgggaaatgcttagttctttgcgccaaaggaaagccaggattaaaaaatgcatttagacttccggattatatttttctggtactgaaggatatggcagggtaactaaaatctacctggtcatggtatagttcacctctagttttgtgcccatacaattgcccaaaagtaactggtctcagttcagttctctggattggatactggttcttgcagcacgtggccctcacctggaactgttcagactcatcattgtcgtctgtgatcacgtgcttgattcttcagttttgacttctgacctttggctgtagtaatcattaatgttcttaaccagtgaatggtcaagcagattttgatttgcattcaaatttgagttgtggcataaggaattaaggattgaccaaactcttgtacagttgggatgatttcactcgttttgcacaatgtttattagctgtttgatttgataccctaatttgcatgttgttcctactgatagaatttttggttgctcactattatatatagtttctgtcttcccattggttcattttcactgtatgtataggttgtagtggaaagggagacaggccgctctaggggatttggatttgtcacattttcagaacctcgggctgtggatgctgccattcggggaatgcataacggagaactggatggccgcaatatttctgtgaacaaagctgaac

SEQ ID NO: 216986 - DNA, 1425 bp, Zea Mays
tgctggcatcgttccattctcctctaaaccctagccgcctagcgcctcgatctgagcagcctgtctcgcggaggtagttctggttgatttggtcctagatggcggaggaaaaagtggggcggatcttcgtcggcgggctgtcgtggaacaccacggagcgcacgctcgagcgcaccttcggtcagtacggcaaggtcatcgaggctcagctgctgattcacagagactgcagtcagttcaatttctgcatgttaggaagttagcaaagttgcaggaaaagaaattcactaatcatttgagctcactggttagcattttttgcgatgatgggttcagtaaagatcaattggaggcatatacactgttagattcagttttgctaggtgtgatctgttttgtggacagaaccagatacctgtttttgccttgttagcacttaagataactgcttccagctttagaacacaaaagaatcatcaccggcatggttaatgaactccagtcaagtaaacatggttgccagcactggactgaacttgtggcaaaatttggttgtgtcattctggatcagtttgataagaaaggcagagaaaccatttgtcctttcagtagcgaggcagcaatggtgatgctgaagaatgttgtatgctcatctttgcctacacttgcttcaaagagcattattcccagtgtccatcactccattgtgcatttccatgggaaatgcttagttctttgcgccaaaggaaagccaggattaaaaaatgcatttagacttccggattatatttttctggtactgaaggatatggcagggtaactaaaatctacctggtcatggtatagttcacctctagttttgtgcccatacaattgcccaaaagtaactggtctcagttcagttctctggattggatactggttcttgcagcacgtggccctcacctggaactgttcagactcatcattgtcgtctgtgatcacgtgcttgattcttcagttttgacttctgacctttggctgtagtaatcattaatgttcttaaccagtgaatggtcaagcagattttgatttgcattcaaatttgagttgtggcataaggaattaaggattgaccaaactcttgtacagttgggatgatttcactcgttttgcacaatgtttattagctgtttgatttgataccctaatttgcatgttgttcctactgatagaatttttggttgctcactattatatatagtttctgtcttcccattggttcattttcactgtatgtataggttgtagtggaaagggagacaggccgctctaggggatttggatttgtcacattttcagaacctcgggctgtggatgctgccattcggggaatgcataacggagaactggatggccgcaatatttctgtgaacaaagctgaac

SEQ ID NO: 216987 - DNA, 1257 bp, Zea Mays
ctatcctgtactctctctcagtctctctctctccccccgttctccgttccacatcgcgtgcgcattgagacgacgagtttctagagcgccgtaccgcgcacggctcccgagccccaccgcaaagcgccggaatcgtgagcgcgtccggcctcgcctgctccgcggcgagaggcggccgaggaggacgggcgatgtacccggtggtgacgggcacgccgccggcgcggctgccggcggcgtcgcgggtggacaaggccacgagccacctgctgcagggccccgactgggccgtcaacctcgaaatctgcgacaccctcaacgccgaccgctggcaaacgaaggatatagtaaaagctgtgaagaagcgattgcagcataaggatccaaaagttaaattctttactttgacgttattggagacaatgatgaagaactgtggtgaatatgttcattttgaagttgttgatcagcatattttacaagagattgttaaaattgtccagaagaggcatgatatgcaagtgagggataaggctttgttacttctggattcatggcaagaggcatttggtggacctggtggcaaatatccacagtactactggtcatacattgaactaaagagggcaggagtaatgttcccacaacgtcctgtagatgctcctccaatatttactcctcctgcaacacatcaggcatatggttcacctagatatccttctggaagtctaaatgagagaatcacatctgatgctggaacgttgagctttgagggcttgaataatattagaaatgcaacggaactgctgtatgatatggtgaatgctttgaaccctgctgaccgcatgacagttaaagatgaaattattgcagatcttgtaaatcaatgtcgttcaaatcaacaaaagctcatgcagtttgtcagttccacaggggatgaagacctgctaaagcaaggactagaattaaatgatcgcttacagagtgtcctcacaagacatgatgctattgcttctggttctccattaccagttgagacaccgattagagaaccacagagagaggatccaaatcctgagccatctacaccaattacacatgataataaggctcaagttgaagaggatgaagatgatgagtttgctcaaatagcacgaagaaaaaacaaatctgtgatatgcggtgatgaggcatcatcgagtgctggtgatcaacccctgtatagtccttcccacagaactgaagactggagtggcg

SEQ ID NO: 216988 - DNA, 2496 bp, Zea Mays
ctgttaaggttggacctttgtctagtgcttcggtcactgtattgacttaaacctcttgttattcttcttatcaatatatgttggcagacctcctaccttttaaaaaagggactgtatcataggaaatttcaggagaagatttcatagtacgatttagaactgagaactgcattcagcgaccatcaatcatagaatctcttctaagaagacatctgggcatcatccatctagcagagcagcatattggtatggaccttactgaaggcatacgtgaagtgctggtccatttcccaatcttcaaatgtttgagactccagtggggacacaaggagggggatctgccgttgagatgacatgcaactgatatattgagaatgtagtaaaggatgcttctcgcattggagttgcttttgatgcaatccaaaattgcttcaggagctcacaacctattggttgtggatgtttagctgaatcatttacagataaaagagaaatgaaatcacttgttcgtctttttggtggctatggaatagataaaatggataagatgctaagggagcatacgtctgcgcttttaaactgtatcgattcagcattgaggtcaaatcgtgatgccttagagggcctagctggaactgtaaattccggcgataggattgaaagggatgtgaacctgaagcaaattattgacctcgaaacactggctgacctctgtattcaagcagggcaggcaatgactttcctgttggttgaggctgttggagcagtccttgaagagaaaggagttatttgagtttgtaacactctcgtcgcgcggcttcgccactatattactccacagctgcgcatcgccaatttgatattatgcagcactcatccgcgccatattgggactgttatttttccgagctctgttaccgtgtgttttcttgcggttgatgaagtttgtgtaccccttcgtactaatctaccctccacgcagccgtctaccttaaggtgaccacgccgccgtctgccaccaggtgccagcgccgctgtctgccaacagctgcccgcgccgccgtctgccagcaggagcccgcgaccccgtctgccaccaggagcccagttgcaactccacgaggcgagccgcgagtggaactgtggaagcgtcgagcttttttcttctttgtcttgctgcgcaagaagaagggaaacgagaggagggcggcgatggccaagaggctgctcccgtcgctgaaccgggtgctggtggagaagctggtgcagcccaagaagaccgccggcggcatcctcctcccggaaacatccaagcagctgaatgctgctaaagtggtggctgttggccctggtgagcgcgacaaggcaggcaatctgatcccagttgctctgaaggaaggcgacactgttcttctgcccgagtatggtggatctgaagtcaagcttgcggctgataaagagtacctcctcttcagagaggatgacattttgggcacacttgtggactgattcagatcgcgagcaagcgggtggtgagatgcgtaggatttgaagctgggaacaaactccagaaagaactgtgccctgtcgtgatgtcataaatttgtggtgaaacatcatatcatgaggataaaatttgttgctttttttgtgatgcaattgagaaaactttcgaatttgaactggttcaaaaaaaatacagttgcaactgcacgtcaaaatgttcagcattcactacgaaacgaaaaggattagccttgcagttgccagacgagacgctggtgcagctaatgataattcttggatcctacttccatacctttgtgctgcattcatggtgtccaacatttggaacggtgctgtttatgatgtcaatataggtggactcagtaacaatttgcactgcctagcaaggtgtgtaagtgctgtgattgagggaagcgaatacactcgggtcgaaagggagcagcgaataaattctctttcaaatgtgcatacagatgagctgcaagaggccgagttaccgagccgtgtctcagcagaagcaaatatcaaatcttctatgcagatctacgtcaaactgtctgcaggggtcgtcctggattcatggaacgacacaagcaggtacctggtgcactgcatttttcggattcgggtttggcaaaggtttccgacaacacccaggtcccacaccttcgagccaggctactacagctcgtcggggtcccagcacgacgatggctacgacgcggataggagggccggacggctgctgcggagcatgaggcgctctggaccgctcgacttcggtgcgagcagaaaggcgaagaagttcgtcgagggctccagctccgggagcagccatggagctggctcgctgcagaggttcgcagtgtcgagatctggccctctatcgtacaaatagggccgcatgtaatgtaaactctagagcggtagatcttcctatgcgtgctggttgtactcgtacgtagctag

SEQ ID NO: 216989 - DNA, 2642 bp, Zea Mays
acaacaagataatagatgagaagtccttaataaagaagtatcaaaaggagatatccagcctgaaagaagagctacagcaactcaggcgtggtatgatgggaaatggtggtattctccctacggatcaagaggatcttgttaatttaaaacttcagcttgaagctgggcaagttaaacttcaatcgaggctagaacaggaagaggaagcaaaagcagcattgatgggtaggattcagaggctaacaaaattaatattggtatcaaccaaaagttcgatatcctcaaatgtttctggaaagactaacttccgccgacggcattcatttggagaagatgagcttgtgtatttgcctgatcgaaagcgggaatactttgtagatgacgatgatgttagtcttgattcagaactttcgcttgaagggaaacttgatctgaacaatccagaggagtcagccaggtttggcagaaggaaccacaaacgtggaatgcttggctggtttaaactaaagaagtccgaccagttatcagggctatcatccagtgtagacggtgatagcactgctagcgtctcaccttcgtgctctaaatcatcacaacaaaaacacttgctgcttgacctgaaggatggtcgaaggaaatctatgactaggaaaggagatgacccatcacttgctgattcttttcttgaaaggactcaagccggtgatttatttagtgctgcgcccagagtacggcaccctctgccgagtggaacaaccatcgtggatcaaatagatcttctacaagagcaggtcaaaatgctggctggggatgttgcactttgtacaagctcactcaaaagattgacagagcaagcagccaacaaccctgataatttgcaaattcaggagcaaattgtgaggttgaaagatgaaatcgcagaaaagaaatcacatatacatatgctagagcagcggatggtacaatcactggaaactacagaaggcccagcaattaagacagagttatcccagaccttttcaaagttgagcacgcagctgagtgagaagacatttgaactggagattatgtctgcggataataggattcttcaagaccagctacaagcaaaggtaacagaaaatgcagaactccaagaaacagttgcacacttgaggcaagaaatcagtaatttatcgaaggctgcaaaaagcgaggatagttttgctagcgtgcagtctagtgaaccatcaacagcaagcactgatactagggatcaaacaaatgaaatctcaaaccgtgcaaatatgtcctctagaacaacggacttaaatgagtcaggatttatatctcaagtgctcaaacaggcttcagaaattgaaagtttgaaacaagaaaatctgaggttggtggaagagaaggatggactggaaattcatagtcaaaagttggcggaggaatcatcctatgctaaagaattggcttctgctgctgcaattgaacttaagaatttggcagaagaagtcactaggctttcttatgaaaacgcaaagctgaatgcagacttagctgcggcaagagagctaaatgcatcgatgtcaagaagtaacatccaccctgacccaaagcgtcgtgatcatgagagcggaattttagttgaggagttgcagaaagagttggttgctagttgtcaaagggaggccgtattagaggacacactatctcaaaaggaccgaagagagagtgagcttctaaagattattgatgatgcaaaatgccgtgagcatgagttgaaaaatgaactggcaagcatgggggcccttctttcgaagataaagaaagaaaactctcaacaggatgtatttgaatttaaagcaaagcaaaacggctttcactcatccaagactgatagtggtagactggtaagtgaaatgcaagcatcggataatgggtgctgggatggcctcagtacttttgaagaagcaagagctgcatacaattttgaaagaatgcgctgcaaggaattggaaagcatcgtgtccaaactaaagggtgaggacctcaggggcctagatgttaaagttcttgaagaactacaaaacttccatgtagaagcactgtcaaggatctgccaagaaaagatggcaagtcaggcgctatagcaaaaacctttcctgagacgagtagccgctttcatgcaggccagagcttatttctcagatgtcccttcaacttcatgcccatctctctgaagttccactcacaatttcacatagttgctgctactgcaaccgggacaaccttgattagtccgcctttggacactgattcctgcgtttaaccgacagaaaacgaagcaaaatgcggttagatagcaggcgctaatggtcactgagtagttagcatgcagatactcccctcctgtacagctttttattaaagatagtagcagtggtattgtaggagtacccggattgtatttatactggtaatatatgagccggtaaaacccgaaggtggtgtttctgttatacctggaccgtgctctgcccttcaaaaactgtagtaaacccgaacggacgctgatgtagctttggcaaacttgctgttgatgtgatgcatgactgccgtgcacctggtgccgtgcccgacgatggttgact

SEQ ID NO: 216990 - DNA, 3221 bp, Zea Mays
gtttcccctgttctctctggtcagtgggcttcatacaaggaggttatcaatgatttactagatccaacagggcagaatctcagaattcgagaagatgcacagggaacttatgtggaagggatcaaagaagaggttgttttatcacctgcacatgcgctctctctaatagcatctggagaagagcacaggcatgttggatcaaacaacttcaatcttgtcagcagtaggagtcacactatcttcacgttgacaatcgagagcagcccctctggtgaaaatgaagcagaagaagtcaagttgtctcagttgaacttgattgatcttgctgggtctgagagttccaaaactgaaacaactggtttacggcgcaaagaaggttcatacataaacaagagtttgctcacccttggaactgttattgctaaacttacagatggtaaggccactcatattccttatagagactcaaagctcacacgcttacttcagtcttctttgagtggacacggacgcatatcactcatttgcacagttacacctgcatccagcaacagtgaggagacacataacacattaaaatttgcccacaggagcaagcatattgagataaaagcttcccaaaacaagataatagatgagaagtccttaataaagaagtatcaaaaggagatatccagcctgaaagaagagctacagcaactcaggcgtggtatgatgggaaatggtggtattctccctacggatcaagaggatcttgttaatttaaaacttcagcttgaagctgggcaagttaaacttcaatcgaggctagaacaggaagaggaagcaaaagcagcattgatgggtaggattcagaggctaacaaaattaatattggtatcaaccaaaagttcgatatcctcaaatgtttctggaaagactaacttccgccgacggcattcatttggagaagatgagatgacgatgatgttagtcttgattcagaactttcgcttgaagggaaacttgatctgaacaatccagaggagtcagccaggtttggcagaaggaaccacaaacgtggaatgcttggctggtttaaactaaagaagtccgaccagttatcagggctatcatccagtgtagacggtgatagcactgctagcgtctcaccttcgtgctctaaatcatcacaacaaaaacacttgctgcttgacctgaaggatggtcgaaggaaatctatgactaggaaaggagatgacccatcacttgctgattcttttcttgaaaggactcaagccggtgatttatttagtgctgcgcccagagtacggcaccctctgccgagtggaacaaccatcgtggatcaaatagatcttctacaagagcaggtcaaaatgctggctggggatgttgcactttgtacaagctcactcaaaagattgacagagcaagcagccaacaaccctgataatttgcaaattcaggagcaaattgtgaggttgaaagatgaaatcgcagaaaagaaatcacatatacatatgctagagcagcggatggtacaatcactggaaactacagaaggcccagcaattaagacagagttatcccagaccttttcaaagttgagcacgcagctgagtgagaagacatttgaactggagattatgtctgcggataataggattcttcaagaccagctacaagcaaaggtaacagaaaatgcagaactccaagaaacagttgcacacttgaggcaagaaatcagtaatttatcgaaggctgcaaaaagcgaggatagttttgctagcgtgcagtctagtgaaccatcaacagcaagcactgatactagggatcaaacaaatgaaatctcaaaccgtgcaaatatgtcctctagaacaacggacttaaatgagtcaggatttatatctcaagtgctcaaacaggcttcagaaattgaaagtttgaaacaagaaaatctgaggttggtggaagagaaggatggactggaaattcatagtcaaaagttggcggaggaatcatcctatgctaaagaattggcttctgctgctgcaattgaacttaagaatttggcagaagaagtcactaggctttcttatgaaaacgcaaagctgaatgcagacttagctgcggcaagagagctaaatgcatcgatgtcaagaagtaacatccaccctgacccaaagcgtcgtgatcatgagagcggaattttagttgaggagttgcagaaagagttggttgctagttgtcaaagggaggccgtattagaggacacactatctcaaaaggaccgaagagagagtgagcttctaaagattattgatgatgcaaaatgccgtgagcatgagttgaaaaatgaactggcaagcatgggggcccttctttcgaagataaagaaagaaaactctcaacaggatgtatttgaatttaaagcaaagcaaaacggctttcactcatccaagactgatagtggtagactggtaagtgaaatgcaagcatcggataatgggtgctgggatggcctcagtacttttgaagaagcaagagctgcatacaattttgaaagaatgcgctgcaaggaattggaaagcatcgtgtccaaactaaagggtgaggacctcaggggcctagatgttaaagttcttgaagaactacaaaacttccatgtagaagcactgtcaaggatctgccaagaaaagatggcaagtcaggcgctatagcaaaaacctttcctgagacgagtagccgctttcatgcaggccagagcttatttctcagatgtcccttcaacttcatgcccatctctctgaagttccactcacaatttcacatagttgctgctactgcaaccgggacaaccttgattagtccgcctttggacactgattcctgcgtttaaccgacagaaaacgaagcaaaatgcggttagatagcaggcgctaatggtcactgagtagttagcatgcagatactcccctcctgtacagctttttattaaagatagtagcagtggtattgtaggagtacccggattgtatttatactggtaatatatgagccggtaaaacccgaaggtggtgtttctgttatacctggaccgtgctctgcccttcaaaaactgtagtaaacccgaacggacgctgatgtagctttggcaaacttgctgttgatgtgatgcatgactgccgtgcacctggtgccgtgcccgacgatggttgact

SEQ ID NO: 216991 - DNA, 3447 bp, Zea Mays
ccgaaaccccagaaaacttcagagcttcggaccaaaaaaacaccaaaaaggcggcacccgggcgcctaggaggaagacgacgacgaccctccaaagcaagcacacgagcttccctccctcctcccccacgagctcgtgcttgcttccttccccaaaaccctagtaccccgccccaagtccggctgtgctccccgtctccaccgccgcggcgcggcaatgtcgtcgtcgaggccgacgcgttccagtatatccccattccgatcccgccgctcggctccggcggtgtcggcagcgggacctcctccgccggcgaggacctcatctgggggtcgcccgtccaccccctcttctactgcctctgggcgacccaccaccccctcgtcctccggtggtcgccccgctaccccgtccgccgcgttcgcgcgtcccgccaccccttcgtcgtcatcggcgcggcccgccacgccgtcctctaccgcctccgcgcggcccaccacgccctcgtcgatctcctcgcgcgttgcggtgagggcgccgctcgtggacgcggccaatgccaaggagaacatcatggtcaccgtccgcttccggcccctcagtcctagagagatcaacaagggggacgaggtggcgtggtacgcggatggtgacaacatggtgcgcaacgagtataacctcagcatcgcctatgctttcgataaagtgtttggccctgctactacaactcgccatgtatatgatattgctgctcagcatattgtgagtggtgccatgcaaggaatcaatggaactgtttttgcatatggagtaactagcagtgggaaaactcacaccatgcatggagaacaaaagtcacctggaatcattccattggcagtaaaggatgtattcagcattattcaagatacacctggacgagagtttcttctgcgggtttcgtatcttgaaatttacaatgaggttatcaatgatttactagatccaacagggcagaatctcagaattcgagaagatgcacagggaacttatgtggaagggatcaaagaagaggttgttttatcacctgcacatgcgctctctctaatagcatctggagaagagcacaggcatgttggatcaaacaacttcaatcttgtcagcagtaggagtcacactatcttcacgttgacaatcgagagcagcccctctggtgaaaatgaagcagaagaagtcaagttgtctcagttgaacttgattgatcttgctgggtctgagagttccaaaactgaaacaactggtttacggcgcaaagaaggttcatacataaacaagagtttgctcacccttggaactgttattgctaaacttacagatggtaaggccactcatattccttatagagactcaaagctcacacgcttacttcagtcttctttgagtggacacggacgcatatcactcatttgcacagttacacctgcatccagcaacagtgaggagacacataacacattaaaatttgcccacaggagcaagcatattgagataaaagcttcccaaaacaagataatagatgagaagtccttaataaagaagtatcaaaaggagatatccagcctgaaagaagagctacagcaactcaggcgtggtatgatgggaaatggtggtattctccctacggatcaagaggatcttgttaatttaaaacttcaggagcaaattgtgaggttgaaagatgaaatcgcagaaaagaaatcacatatacatatgctagagcagcggatggtacaatcactggaaactacagaaggcccagcaattaagacagagttatcccagaccttttcaaagttgagcacgcagctgagtgagaagacatttgaactggagattatgtctgcggataataggattcttcaagaccagctacaagcaaaggtaacagaaaatgcagaactccaagaaacagttgcacacttgaggcaagaaatcagtaatttatcgaaggctgcaaaaagcgaggatagttttgctagcgtgcagtctagtgaaccatcaacagcaagcactgatactagggatcaaacaaatgaaatctcaaaccgtgcaaatatgtcctctagaacaacggacttaaatgagtcaggatttatatctcaagtgctcaaacaggcttcagaaattgaaagtttgaaacaagaaaatctgaggttggtggaagagaaggatggactggaaattcatagtcaaaagttggcggaggaatcatcctatgctaaagaattggcttctgctgctgcaattgaacttaagaatttggcagaagaagtcactaggctttcttatgaaaacgcaaagctgaatgcagacttagctgcggcaagagagctaaatgcatcgatgtcaagaagtaacatccaccctgacccaaagcgtcgtgatcatgagagcggaattttagttgaggagttgcagaaagagttggttgctagttgtcaaagggaggccgtattagaggacacactatctcaaaaggaccgaagagagagtgagcttctaaagattattgatgatgcaaaatgccgtgagcatgagttgaaaaatgaactggcaagcatgggggcccttctttcgaagataaagaaagaaaactctcaacaggatgtatttgaatttaaagcaaagcaaaacggctttcactcatccaagactgatagtggtagactggtaagtgaaatgcaagcatcggataatgggtgctgggatggcctcagtacttttgaagaagcaagagctgcatacaattttgaaagaatgcgctgcaaggaattggaaagcatcgtgtccaaactaaagggtgaggacctcaggggcctagatgttaaagttcttgaagaactacaaaacttccatgtagaagcactgtcaaggatctgccaagaaaagatggcaagtcaggcgctatagcaaaaacctttcctgagacgagtagccgctttcatgcaggccagagcttatttctcagatgtcccttcaacttcatgcccatctctctgaagttccactcacaatttcacatagttgctgctactgcaaccgggacaaccttgattagtccgcctttggacactgattcctgcgtttaaccgacagaaaacgaagcaaaatgcggttagatagcaggcgctaatggtcactgagtagttagcatgcagatactcccctcctgtacagctttttattaaagatagtagcagtggtattgtaggagtacccggattgtatttatactggtaatatatgagccggtaaaacccgaaggtggtgtttctgttatacctggaccgtgctctgcccttcaaaaactgtagtaaacccgaacggacgctgatgtagctttggcaaacttgctgttgatgtgatgcatgactgccgtgcacctggtgccgtgcccgacgatggttgact

SEQ ID NO: 216992 - DNA, 4231 bp, Zea Mays
atcacattcacaacaaagcagtgctcagcaagtcactgaccagaaggccgcggtgagctcaccaccggtgttccgaaaccccagaaaacttcagagcttcggaccaaaaaaacaccaaaaaggcggcacccgggcgcctaggaggaagacgacgacgaccctccaaagcaagcacacgagcttccctccctcctcccccacgagctcgtgcttgcttccttccccaaaaccctagtaccccgccccaagtccggctgtgctccccgtctccaccgccgcggcgcggcaatgtcgtcgtcgaggccgacgcgttccagtatatccccattccgatcccgccgctcggctccggcggtgtcggcagcgggacctcctccgccggcgaggacctcatctgggggtcgcccgtccaccccctcttctactgcctctgggcgacccaccaccccctcgtcctccggtggtcgccccgctaccccgtccgccgcgttcgcgcgtcccgccaccccttcgtcgtcatcggcgcggcccgccacgccgtcctctaccgcctccgcgcggcccaccacgccctcgtcgatctcctcgcgcgttgcggtgagggcgccgctcgtggacgcggccaatgccaaggagaacatcatggtcaccgtccgcttccggcccctcagtcctagagagatcaacaagggggacgaggtggcgtggtacgcggatggtgacaacatggtgcgcaacgagtataacctcagcatcgcctatgctttcgataaagtgtttggccctgctactacaactcgccatgtatatgatattgctgctcagcatattgtgagtggtgccatgcaaggaatcaatggaactgtttttgcatatggagtaactagcagtgggaaaactcacaccatgcatggagaacaaaagtcacctggaatcattccattggcagtaaaggatgtattcagcattattcaagatacacctggacgagagtttcttctgcgggtttcgtatcttgaaatttacaatgaggttatcaatgatttactagatccaacagggcagaatctcagaattcgagaagatgcacagggaacttatgtggaagggatcaaagaagaggttgttttatcacctgcacatgcgctctctctaatagcatctggagaagagcacaggcatgttggatcaaacaacttcaatcttgtcagcagtaggagtcacactatcttcacgttgacaatcgagagcagcccctctggtgaaaatgaagcagaagaagtcaagttgtctcagttgaacttgattgatcttgctgggtctgagagttccaaaactgaaacaactggtttacggcgcaaagaaggttcatacataaacaagagtttgctcacccttggaactgttattgctaaacttacagatggtaaggccactcatattccttatagagactcaaagctcacacgcttacttcagtcttctttgagtggacacggacgcatatcactcatttgcacagttacacctgcatccagcaacagtgaggagacacataacacattaaaatttgcccacaggagcaagcatattgagataaaagcttcccaaaacaagataatagatgagaagtccttaataaagaagtatcaaaaggagatatccagcctgaaagaagagctacagcaactcaggcgtggtatgatgggaaatggtggtattctccctacggatcaagaggatcttgttaatttaaaacttcagcttgaagctgggcaagttaaacttcaatcgaggctagaacaggaagaggaagcaaaagcagcattgatgggtaggattcagaggctaacaaaattaatattggtatcaaccaaaagttcgatatcctcaaatgtttctggaaagactaacttccgccgacggcattcatttggagaagatgagcttgtgtatttgcctgatcgaaagcgggaatactttgtagatgacgatgatgttagtcttgattcagaactttcgcttgaagggaaacttgatctgaacaatccagaggagtcagccaggtttggcagaaggaaccacaaacgtggaatgcttggctggtttaaactaaagaagtccgaccagttatcagggctatcatccagtgtagacggtgatagcactgctagcgtctcaccttcgtgctctaaatcatcacaacaaaaacacttgctgcttgacctgaaggatggtcgaaggaaatctatgactaggaaaggagatgacccatcacttgctgattcttttcttgaaaggactcaagccggtgatttatttagtgctgcgcccagagtacggcaccctctgccgagtggaacaaccatcgtggatcaaatagatcttctacaagagcaggtcaaaatgctggctggggatgttgcactttgtacaagctcactcaaaagattgacagagcaagcagccaacaaccctgataatttgcaaattcaggagcaaattgtgaggttgaaagatgaaatcgcagaaaagaaatcacatatacatatgctagagcagcggatggtacaatcactggaaactacagaaggcccagcaattaagacagagttatcccagaccttttcaaagttgagcacgcagctgagtgagaagacatttgaactggaggattcttcaagaccagctacaagcaaaggtaacagaaaatgcagaactccaagaaacagttgcacacttgaggcaagaaatcagtaatttatcgaaggctgcaaaaagcgaggatagttttgctagcgtgcagtctagtgaaccatcaacagcaagcactgatactagggatcaaacaaatgaaatctcaaaccgtgcaaatatgtcctctagaacaacggacttaaatgagtcaggatttatatctcaagtgctcaaacaggcttcagaaattgaaagtttgaaacaagaaaatctgaggttggtggaagagaaggatggactggaaattcatagtcaaaagttggcggaggaatcatcctatgctaaagaattggcttctgctgctgcaattgaacttaagaatttggcagaagaagtcactaggctttcttatgaaaacgcaaagctgaatgcagacttagctgcggcaagagagctaaatgcatcgatgtcaagaagtaacatccaccctgacccaaagcgtcgtgatcatgagagcggaattttagttgaggagttgcagaaagagttggttgctagttgtcaaagggaggccgtattagaggacacactatctcaaaaggaccgaagagagagtgagcttctaaagattattgatgatgcaaaatgccgtgagcatgagttgaaaaatgaactggcaagcatgggggcccttctttcgaagataaagaaagaaaactctcaacaggatgtatttgaatttaaagcaaagcaaaacggctttcactcatccaagactgatagtggtagactggtaagtgaaatgcaagcatcggataatgggtgctgggatggcctcagtacttttgaagaagcaagagctgcatacaattttgaaagaatgcgctgcaaggaattggaaagcatcgtgtccaaactaaagggtgaggacctcaggggcctagatgttaaagttcttgaagaactacaaaacttccatgtagaagcactgtcaaggatctgccaagaaaagatggcaagtcaggcgctatagcaaaaacctttcctgagacgagtagccgctttcatgcaggccagagcttatttctcagatgtcccttcaacttcatgcccatctctctgaagttccactcacaatttcacatagttgctgctactgcaaccgggacaaccttgattagtccgcctttggacactgattcctgcgtttaaccgacagaaaacgaagcaaaatgcggttagatagcaggcgctaatggtcactgagtagttagcatgcagatactcccctcctgtacagctttttattaaagatagtagcagtggtattgtaggagtacccggattgtatttatactggtaatatatgagccggtaaaacccgaaggtggtgtttctgttatacctggaccgtgctctgcccttcaaaaactgtagtaaacccgaacggacgctgatgtagctttggcaaacttgctgttgatgtgatgcatgactgccgtgcacctggtgccgtgcccgacgatggttgact

SEQ ID NO: 216993 - DNA, 1182 bp, Zea Mays
cagctagtcagcatggcgggggagacggtgctggtcaccggcgccagcggcttcatcggctcgaccctcgtccgcctcctcctcggccgcggctacaacgtccacgccggcgtcctcaaccccgatgacggggcggagacggagcacctgctcgccatggccgctggcgctggcgctggcgagggccgcctccgcatcttccgtggcgacctccttgacgacgccgcgcggggctgctcgggcgtcttccacctcgcgtcgccctgcaccgtcgaccccgtcagcgacccccagaagcaactgatagtgccggcagtggaagaacgggtgacccgccggcgatctccgcgacgagcgctgctggactgacatcgactactgcaagaagaacggggtttggtaccctgtttccaagacgctggcagagaaggcagcgtggaggtttgcagaggagaacgggctggacgtggttgtggttaatccaatgtctgtcctgggccagataatcccaccgaccatcaattctagcatgtccgtccttctacgcctccttcaaggctgcacagaggagtacaaggatatctggatgggggtagtccacgtggaagacgtcgccttggcccatctcctggtgttcgagaacccatcagcttccgggaggcacatctgcgccgagtccatcagtcacctgagtgacttcgcggccaaactcgccgagctctaccccaacaacaaagtgcccaagttccccaaggacacccagcctgggctggtaagagcggaggcgggagtggcgtcgaagaagctcgtcgagctagggctgcagttcagccctctggagaagatcatcagggatgccgtggagagcctcaagaccaaagggtacatttcgtagctagccgtgagggtgctataatgcctttcatgaaccttttgattatatgatttgtagttgtaactagtaacaaagatgtctttcatgaaccttaataattgacaatttgtaattctggaaagtgaggtcgaaacttagatatctcctataaggagttgcaactatggaacctgaataccttgatgattcgaaaaggttcaaatttcgcaactggatagcggtcgcctcgtcaatcgtcatcgaagaatttgcttaagaggaaaggctttctgaatgctgctagtaag

SEQ ID NO: 216994 - DNA, 3041 bp, Zea Mays
tttactggacaagtgatataggccagaacgactaaattaagcgaacggagggagtagttgttttgtggtccaccattctaacggttgtggctggttggcctgtctgctcggcccgccgtcgtctcagctcttgtgttttctgttacggaaaaaaaaagaagaaaaaacaagccggggacgacggcggcgaggacgacgacgacgagagggacggaactggaccagcgcacgtgccgagatggcggcgctggatgacaaggccatgacggacctggagacgctggaggaggaggaagtgctgcgccggttaggcacagcggaggaggcgggcctcaccgacaacgaggccgcgcgacgcctccgtctccacggccccaacgtcgtcgtcctctcgcaccacgagggcagcatgcttcatggattcctaatggcgctcttctcgctctggggatgggatcatgtcttccccaagtacaataacatggtccgggtcatacttaactccatgtcgtgggttacagtactgactatagttgtgtctcttgctatcacctcagctggccaaagatcatgcgagctggccatcataattttcgtagtagctacatgcctcatagcatgctttactgcaatgcttgttttagagtatgctaaggctccgctggaggccaaagcccacgcaccaagggccaaggttctgagagatgggaattggagagatgtacatgcagcaaatctggtcccaggggatatcatatttctcaaagttggggacattgtcccagccaatgctcgcatactccgatttcagaaaatcgacacaatgacttgctgggccaaaaggtctgttgattgtgcgcatggcttcctcctatactatgcttggactgtttcctgtggccaaggaactgccgttgtcattgcaactggacgtggcattcccagaagtacattgcggctctacccacaacgttatgctcgacctgggcagcttaaagaaggagccatgcttactggctgcttctgtgcttccctggtacttgttggcacttttgctgagatagtcttaagatttttgttccaaaaacaaaattacagaggcatgccactcgacgcccattttatgccattgattggtggaatcccgatggcaatgcctacttttttttacctggcattggcattgggatctgtaaggctttgttttctggggattgctagccggggaacagttgcacttgaagatctagcaagtgtggatgtaatcctcttcaacatgactggtactttaacgtgtaatcagccctgttttgtacgggacaagattgagatgtttgcagatagcgttaataaagaccatgccatagttttagctgcacgggcatcaagatctcaacatgagttgtacattgaaccaattgatgcagctattctaagcctccttgatgatccggagcaggcacgactcggtgttcaagtcttagagcatcatgccagtttctttgttgcactgaaactgatgttccagactacatacatcgacgaaggcaatagattcaagtgttgcgtattcaaaggtgatcctgcaaaggttgctcatcactgtggcagcagcaaagaagttaaagagaaaataagcatgataatggatgaacttgcccttgatggatatcaggccatagctgtaggacatcaagtagactcttgttgggactttattgcccttctgccttacacagatgaccttagaagcgatagtgctgatgttgtcgatagccttatcgatctaggtttagatataagagtcctcacagaaagtccattgtcgaccacaaagcaggtttgtggaaagcttggaaaactaggtaccaatgtggtacctgcacatatagtgtttgagttagctcgcaataacagagaagtccattcaaacatcaacgggatttctgatctctttccagaggacaaaagcgatatagtaagaagactaagaaatttcggttgtcattgtgcaatggttgggtatgaatttcttgatcatgatgccataggagagagccatattgggatttcagttgctgatgcaactgattacacaaaaagtgaatctgatcttgttttgactcagcctgcactgatgcctgtttcttcagcagtgcaaatcagtaggaagatttgtcagatgctaagaagctacactgtaggtcattctgatgcatttagaggcttgatttctgacaagatgttttatatctggatcataataaatggatattaacttgcagtatgttgctgttttgcagatattcaccatttcatcaactgtccatcttgtgagttcaatttatgattattttctataatccttctaaagtacaggatcctgcaggtacgtcctttgcaatgttatttgaaagggtggaattgaacaagtcaccagataaatggagagttcagaaaatcattacaagcggtgctgcttttggaagctacatagttcttactactgccattttttatagggttgcaacaactgcaaacccttttgcatgtaaattcaaacatatatcactgatgggcagtgatgaggaaatcagatctgctttgttccttcagattagcacagtaaaccaggctattgcactctttgttcattctgatggttgctgtatcataagatggcctggaccttttgtcacatttgcctttgttgtttctcaaacggtcgcaaatggagacacgcaaagatgactagtgaaaagttgttgacaatatgcttgcgttcagctatcctacacatagttcttacctggtttctgtacgtaatacttgatgttagggtgcaacagccagtctctagtagatagatcgaacacatagttagggctttttccttctgcagtgtcatctgtaaaactctcaagttaattaatatcttgcataatagattttgcagttggttggcccttcatgattcagaacttgcaactgtgagaccactatattattttaagttaaaactttgctgaagctatagaatg

SEQ ID NO: 216995 - DNA, 2911 bp, Zea Mays
gttgttttgtggtccaccattctaacggttgtggctggttggcctgtctgctcggcccgccgtcgtctcagctcttgtgttttctgttacggaaaaaaaaagaagaaaaaacaagccggggacgacggcggcgaggacgacgacgacgagagggacggaactggaccagcgcacgtgccgagatggcggcgctggatgacaaggccatgacggacctggagacgctggaggaggaggaagtgctgcgccggttaggcacagcggaggaggcgggcctcaccgacaacgaggccgcgcgacgcctccgtctccacggccccaacgtcgtcgtcctctcgcaccacgagggcagcatgcttcatggattcctaatggcgctcttctcgctctggggatgggatcatgtcttccccaagtacaataacatggtccgggtcatacttaactccatgtcgtgggttacagtactgactatagttgtgtctcttgctatcacctcagctggccaaagatcatgcgagctggccatcataattttcgtagtagctacatgcctcatagcatgctttactgcaatgcttgttttagagtatgctaaggctccgctggaggccaaagcccacgcaccaagggccaaggttctgagagatgggaattggagagatgtacatgcagcaaatctggtcccaggggatatcatatttctcaaagttggggacattgtcccagccaatgctcgcatactccgatttcagaaaatcgacacaatgacttgctgggccaaaaggtctgttgattgtgcgcatggcttcctcctatactatgcttggactgtttcctgtggccaaggaactgccgttgtcattgcaactggacgtggcattcccagaagtacattgcggctctacccacaacgttatgctcgacctgggcagcttaaagaaggagccatgcttactggctgcttctgtgcttccctggtacttgttggcacttttgctgagatagtcttaagatttttgttccaaaaacaaaattacagaggcatgccactcgacgcccattttatgccattgattggtggaatcccgatggcaatgcctacttttttttacctggcattggcattgggatctgtaaggctttgttttctggggattgctagccggggaacagttgcacttgaagatctagcaagtgtggatgtaatcctcttcaacatgactggtactttaacgtgtaatcagccctgttttgtacgggacaagattgagatgtttgcagatagcgttaataaagaccatgccatagttttagctgcacgggcatcaagatctcaacatgagttgtacattgaaccaattgatgcagctattctaagcctccttgatgatccggagcaggcacgactcggtgttcaagtcttagagcatcatgccagtttctttgttgcactgaaactgatgttccagactacatacatcgacgaaggcaatagattcaagtgttgcgtattcaaaggtgatcctgcaaaggttgctcatcactgtggcagcagcaaagaagttaaagagaaaataagcatgataatggatgaacttgcccttgatggatatcaggccatagctgtaggacatcaagtagactcttgttgggactttattgcccttctgccttacacagatgaccttagaagcgatagtgctgatgttgtcgatagccttatcgatctaggtttagatataagagtcctcacagaaagtccattgtcgaccacaaagcagaggacaaaagcgatatagtaagaagactaagaaatttcggttgtcattgtgcaatggttgggtatgaatttcttgatcatgatgccataggagagagccatattgggatttcagttgctgatgcaactgattacacaaaaagtgaatctgatcttgttttgactcagcctgcactgatgcctgtttcttcagcagtgcaaatcagtaggaagatttgtcagatgctaagaagctacactatattcaccatttcatcaactgtccatctttttggtgtccgtgtcattttacatttatggaactttgacttgtcaaatatcctggctttcatgattacagcttgtaattactgtacgtcctttgcaatgttatttgaaagggtggaattgaacaagtcaccagataaatggagagttcagaaaatcattacaagcggtgctgcttttggaagctacatagttcttactactgccattttttatagggttgcaacaactgcaaacccttttgcatgtaaattcaaacatatatcactgatgggcagtgatgaggaaatcagatctgctttgttccttcagattagcacagtaaaccaggctattgcactctttgttcattctgatggttgctgtatcataagatggcctggaccttttgtcacatttgcctttgttgtttctcaaacggtggcaacacaaaaagttgtccatggcgacttgaattttgcactaacaaagggtattggctgtgttagggccggattgatatggttgtataacttagtcctacttttggccctggttttagtttgtcgcaaatggagacacgcaaagatgactagtgaaaagttgttgacaatatgcttgcgttcagctatcctacacatagttcttacctggtttctgtacgtaatacttgatgttagggtgcaacagccagtctctagtagatagatcgaacacatagttagggctttttccttctgcagtgtcatctgtaaaactctcaagttaattaatatcttgcataatagattttgcagttggttggcccttcatgattcagaacttgcaactgtgagaccactatattattttaagttaaaactttgctgaagctatagaatg

SEQ ID NO: 216996 - DNA, 2366 bp, Zea Mays
ctaacggttgtggctggttggcctgtctgctcggcccgccgtcgtctcagctcttgtgttttctgttacggaaaaaaaaagaagaaaaaacaagccggggacgacggcggcgaggacgacgacgacgagagggacggaactggaccagcgcacgtgccgagatggcggcgctggatgacaaggccatgacggacctggagacgctggaggaggaggaagtgctgcgccggttaggcacagcggaggaggcgggcctcaccgacaacgaggccgcgcgacgcctccgtctccacggccccaacgtcgtcgtcctctcgcaccacgagggcagcatgcttcatggattcctaatggcgctcttctcgctctggggatgggatcatgtcttccccaagtacaataacatggtccgggtcatacttaactccatgtcgtgggttacagtactgactatagttgtgtctcttgctatcacctcagctggccaaagatcatgcgagctggccatcataattttcgtagtagctacatgcctcatagcatgctttactgcaatgcttgttttagagtatgctaaggctccgctggaggccaaagcccacgcaccaagggccaaggttctgagagatgggaattggagagatgtacatgcagcaaatctggtcccaggggatatcatatttctcaaagttggggacattgtcccagccaatgctcgcatactccgatttcagaaaatcgacacaatgacttgctgggccaaaaggtctgttgattgtgcgcatggcttcctcctatactatgcttggactgtttcctgtggccaaggaactgccgttgtcattgcaactggacgtggcattcccagaagtacattgcggctctacccacaacgttatgctcgacctgggcagcttaaagaaggagccatgcttactggctgcttctgtgcttccctggtacttgttggcacttttgctgagatagtcttaagatttttgttccaaaaacaaaattacagaggcatgccactcgacgcccattttatgccattgattggtggaatcccgatggcaatgcctacttttttttacctggcattggcattgggatctgtaaggctttgttttctggggattgctagccggggaacagttgcacttgaagatctagcaagtgtggatgtaatcctcttcaacatgactggtactttaacgtgtaatcagccctgttttgtacgggacaagattgagatgtttgcagatagcgttaataaagaccatgccatagttttagctgcacgggcatcaagatctcaacatgagttgtacattgaaccaattgatgcagctattctaagcctccttgatgatccggagcaggcacgactcggtgttcaagtcttagagcatcatgccagtttctttgttgcactgaaactgatgttccagactacatacatcgacgaaggcaatagattcaagtgttgcgtattcaaaggtgatcctgcaaaggttgctcatcactgtggcagcagcaaagaagttaaagagaaaataagcatgataatggatgaacttgcccttgatggatatcaggccatagctgtaggacatcaagtagactcttgttgggactttattgcccttctgccttacacagatgaccttagaagcgatagtgctgatgttgtcgatagccttatcgatctaggtttagatataagagtcctcacagaaagtccattgtcgaccacaaagcaggtttgtggaaagcttggaaaactaggtaccaatgtggtacctgcacatatagtgtttgagttagctcgcaataacagagaagtccattcaaacatcaacgggatttctgatctctttccaggtctaactccaatcttaattgtaatgaagtttggtgtccgtgtcattttacatttatggaactttgacttgtcaaatatcctggctttcatgattacagcttgtaattactgtacgtcctttgcaatgttatttgaaagggtggaattgaacaagtcaccagataaatggagagttcagaaaatcattacaagcggtgctgcttttggaagctacatagttcttactactgccattttttatagggttgcaacaactgcaaacccttttgcatgtaaattcaaacatatatcactgatgggcagtgatgaggaaatcagatctgctttgttccttcagattagcacagtaaaccaggctattgcactctttgttcattctgatggttgctgtatcataagatggcctggaccttttgtcacatttgcctttgttgtttctcaaacgatggtgaattgtcatttccttctctttccttctttg

SEQ ID NO: 216997 - DNA, 3102 bp, Zea Mays
ggctggttggcctgtctgctcggcccgccgtcgtctcagctcttgtgttttctgttacggaaaaaaaaagaagaaaaaacaagccggggacgacggcggcgaggacgacgacgacgagagggacggaactggaccagcgcacgtgccgagatggcggcgctggatgacaaggccatgacggacctggagacgctggaggaggaggaagtgctgcgccggttaggcacagcggaggaggcgggcctcaccgacaacgaggccgcgcgacgcctccgtctccacggccccaacgtcgtcgtcctctcgcaccacgagggcagcatgcttcatggattcctaatggcgctcttctcgctctggggatgggatcatgtcttccccaagtacaataacatggtccgggtcatacttaactccatgtcgtgggttacagtactgactatagttgtgtctcttgctatcacctcagctggccaaagatcatgcgagctggccatcataattttcgtagtagctacatgcctcatagcatgctttactgcaatgcttgttttagagtatgctaaggctccgctggaggccaaagcccacgcaccaagggccaaggttctgagagatgggaattggagagatgtacatgcagcaaatctggtcccaggggatatcatatttctcaaagttggggacattgtcccagccaatgctcgcatactccgatttcagaaaatcgacacaatgacttgctgggccaaaaggtctgttgattgtgcgcatggcttcctcctatactatgcttggactgtttcctgtggccaaggaactgccgttgtcattgcaactggacgtggcattcccagaagtacattgcggctctacccacaacgttatgctcgacctgggcagcttaaagaaggagccatgcttactggctgcttctgtgcttccctggtacttgttggcacttttgctgagatagtcttaagatttttgttccaaaaacaaaattacagaggcatgccactcgacgcccattttatgccattgattggtggaatcccgatggcaatgcctacttttttttacctggcattggcattgggatctgtaaggctttgttttctggggattgctagccggggaacagttgcacttgaagatctagcaagtgtggatgtaatcctcttcaacatgactggtactttaacgtgtaatcagccctgttttgtacgggacaagattgagatgtttgcagatagcgttaataaagaccatgccatagttttagctgcacgggcatcaagatctcaacatgagttgtacattgaaccaattgatgcagctattctaagcctccttgatgatccggagcaggcacgactcggtgttcaagtcttagagcatcatgccagtttctttgttgcactgaaactgatgttccagactacatacatcgacgaaggcaatagattcaagtgttgcgtattcaaaggccatagctgtaggacatcaagtagactcttgttgggactttattgcccttctgccttacacagatgaccttagaagcgatagtgctgatgttgtcgatagccttatcgatctaggtttagatataagagtcctcacaggtcattctgttgtgcatatcgccatatcctgctgtcgagatttttgctattgtcattttctatgataaacatgtcttcatcatatatgtatattgttttgtcctctctacagaaagtccattgtcgaccacaaagcaggtttgtggaaagcttggaaaactaggtaccaatgtggtacctgcacatatagtgtttgagttagctcgcaataacagagaagtccattcaaacatcaacgggatttctgatctctttccaggtctatctttatcttctatgtacctcctgcaaagttttgtttttgcaagttcttgttaccattttgctatcttcatatcttagtacagaggacaaaagcgatatagtaagaagactaagaaatttcggttgtcattgtgcaatggttgggtatgaatttcttgatcatgatgccataggagagagccatattgggatttcagttgctgatgcaactgattacacaaaaagtgaatctgatcttgttttgactcagcctgcactgatgcctgtttcttcagcagtgcaaatcagtaggaagatttgtcagatgctaagaagctacactatattcaccatttcatcaactgtccatctttttggtgtccgtgtcattttacatttatggaactttgacttgtcaaatatcctggctttcatgattacagcttgtaattactgtacgtcctttgcaatgttatttgaaagggtggaattgaacaagtcaccagataaatggagagttcagaaaatcattacaagcggtgctgcttttggaagctacatagttcttactactgccattttttatagggttgcaacaactgcaaacccttttgcatgtaaattcaaacatatatcactgatgggcagtgatgaggaaatcagatctgctttgttccttcagattagcacagtaaaccaggctattgcactctttgttcattctgatggttgctgtatcataagatggcctggaccttttgtcacatttgcctttgttgtttctcaaacggtggcaacacaaaaagttgtccatggcgacttgaattttgcactaacaaagggtattggctgtgttagggccggattgatatggttgtataacttagtcctacttttggccctggttttagtttgtcgcaaatggagacacgcaaagatgactagtgaaaagttgttgacaatatgcttgcgttcagctatcctacacatagttcttacctggtttctgtacgtaatacttgatgttagggtgcaacagccagtctctagtagatagatcgaacacatagttagggctttttccttctgcagtgtcatctgtaaaactctcaagttaattaatatcttgcataatagattttgcagttggttggcccttcatgattcagaacttgcaactgtgagaccactatattattttaagttaaaactttgctgaagctatagaatg

SEQ ID NO: 216998 - DNA, 3006 bp, Zea Mays
ggctggttggcctgtctgctcggcccgccgtcgtctcagctcttgtgttttctgttacggaaaaaaaaagaagaaaaaacaagccggggacgacggcggcgaggacgacgacgacgagagggacggaactggaccagcgcacgtgccgagatggcggcgctggatgacaaggccatgacggacctggagacgctggaggaggaggaagtgctgcgccggttaggcacagcggaggaggcgggcctcaccgacaacgaggccgcgcgacgcctccgtctccacggccccaacgtcgtcgtcctctcgcaccacgagggcagcatgcttcatggattcctaatggcgctcttctcgctctggggatgggatcatgtcttccccaagtacaataacatggtccgggtcatacttaactccatgtcgtgggttacagtactgactatagttgtgtctcttgctatcacctcagctggccaaagatcatgcgagctggccatcataattttcgtagtagctacatgcctcatagcatgctttactgcaatgcttgttttagagtatgctaaggctccgctggaggccaaagcccacgcaccaagggccaaggttctgagagatgggaattggagagatgtacatgcagcaaatctggtcccaggggatatcatatttctcaaagttggggacattgtcccagccaatgctcgcatactccgatttcagaaaatcgacacaatgacttgctgggccaaaaggtctgttgattgtgcgcatggcttcctcctatactatgcttggactgtttcctgtggccaaggaactgccgttgtcattgcaactggacgtggcattcccagaagtacattgcggctctacccacaacgttatgctcgacctgggcagcttaaagaaggagccatgcttactggctgcttctgtgcttccctggtacttgttggcacttttgctgagatagtcttaagatttttgttccaaaaacaaaattacagaggcatgccactcgacgcccattttatgccattgattggtggaatcccgatggcaatgcctacttttttttacctggcattggcattgggatctgtaaggctttgttttctggggattgctagccggggaacagttgcacttgaagatctagcaagtgtggatgtaatcctcttcaacatgactggtactttaacgtgtaatcagccctgttttgtacgggacaagattgagatgtttgcagatagcgttaataaagaccatgccatagttttagctgcacgggcatcaagatctcaacatgagttgtacattgaaccaattgatgcagctattctaagcctccttgatgatccggagcaggcacgactcggtgttcaagtcttagagcatcatgccagtttctttgttgcactgaaactgatgttccagactacatacatcgacgaaggcaatagattcaagtgttgcgtattcaaaggtgatcctgcaaaggttgctcatcactgtggcagcagcaaagaagttaaagagaaaataagcatgataatggatgaacttgcccttgatggatatcaggccatagctgtaggacatcaagtagactcttgttgggactttattgcccttctgccttacacagatgaccttagaagcgatagtgctgatgttgtcgatagccttatcgatctaggtttagatataagagtcctcacagaaagtccattgtcgaccacaaagcaggtctatctttatcttctatgtacctcctgcaaagttttgtttttgcaagttcttgttaccattttgctatcttcatatcttagtacagaggacaaaagcgatatagtaagaagactaagaaatttcggttgtcattgtgcaatggttgggtatgaatttcttgatcatgatgccataggagagagccatattgggatttcagttgctgatgcaactgattacacaaaaagtgaatctgatcttgttttgactcagcctgcactgatgcctgtttcttcagcagtgcaaatcagtaggaagatttgtcagatgctaagaagctacactatattcaccatttcatcaactgtccatcttgatcctgcaggtctaactccaatcttaattgtaatgaagtttggtgtccgtgtcattttacatttatggaactttgacttgtcaaatatcctggctttcatgattacagcttgtaattactgtacgtcctttgcaatgttatttgaaagggtggaattgaacaagtcaccagataaatggagagttcagaaaatcattacaagcggtgctgcttttggaagctacatagttcttactactgccattttttatagggttgcaacaactgcaaacccttttgcatgtaaattcaaacatatatcactgatgggcagtgatgaggaaatcagatctgctttgttccttcagattagcacagtaaaccaggctattgcactctttgttcattctgatggttgctgtatcataagatggcctggaccttttgtcacatttgcctttgttgtttctcaaacggtggcaacacaaaaagttgtccatggcgacttgaattttgcactaacaaagggtattggctgtgttagggccggattgatatggttgtataacttagtcctacttttggccctggttttagtttgtcgcaaatggagacacgcaaagatgactagtgaaaagttgttgacaatatgcttgcgttcagctatcctacacatagttcttacctggtttctgtacgtaatacttgatgttagggtgcaacagccagtctctagtagatagatcgaacacatagttagggctttttccttctgcagtgtcatctgtaaaactctcaagttaattaatatcttgcataatagattttgcagttggttggcccttcatgattcagaacttgcaactgtgagaccactatattattttaagttaaaactttgctgaagctatagaatg

SEQ ID NO: 216999 - DNA, 3537 bp, Zea Mays
ggttggcctgtctgctcggcccgccgtcgtctcagctcttgtgttttctgttacggaaaaaaaaagaagaaaaaacaagccggggacgacggcggcgaggacgacgacgacgagagggacggaactggaccagcgcacgtgccgagatggcggcgctggatgacaaggccatgacggacctggagacgctggaggaggaggaagtgctgcgccggttaggcacagcggaggaggcgggcctcaccgacaacgaggccgcgcgacgcctccgtctccacggccccaacgtcgtcgtcctctcgcaccacgagggcagcatgcttcatggattcctaatggcgctcttctcgctctggggatgggatcatgtcttccccaagtacaataacatggtccgggtcatacttaactccatgtcgtgggttacagtactgactatagttgtgtctcttgctatcacctcagctggccaaagatcatgcgagctggccatcataattttcgtagtagctacatgcctcatagcatgctttactgcaatgcttgttttagagtatgctaaggctccgctggaggccaaagcccacgcaccaagggccaaggttctgagagatgggaattggagagatgtacatgcagcaaatctggtcccaggggatatcatatttctcaaagttggggacattgtcccagccaatgctcgcatactccgatttcagaaaatcgacacaatgacttgctgggccaaaaggtctgttgattgtgcgcatggcttcctcctatactatgcttggactgtttcctgtggccaaggaactgccgttgtcattgcaactggacgtggcattcccagaagtacattgcggctctacccacaacgttatgctcgacctgggcagcttaaagaaggagccatgcttactggctgcttctgtgcttccctggtacttgttggcacttttgctgagatagtcttaagatttttgttccaaaaacaaaattacagaggcatgccactcgacgcccattttatgccattgattggtggaatcccgatggcaatgcctacttttttttacctggcattggcattgggatctgtaaggctttgttttctggggattgctagccggggaacagttgcacttgaagatctagcaagtgtggatgtaatcctcttcaacatgactggtactttaacgtgtaatcagccctgttttgtacgggacaagattgagatgtttgcagatagcgttaataaagaccatgccatagttttagctgcacgggcatcaagatctcaacatgagttgtacattgaaccaattgatgcagctattctaagcctccttgatgatccggagcagtcttagagcatcatgccagtttctttgttgcactgaaactgatgttccagactacatacatcgacgaaggcaatagattcaagtgttgcgtattcaaaggtgatcctgcaaaggttgctcatcactgtggcagcagcaaagaagttaaagagaaaataagcatgataatggatgaacttgcccttgatggatatcaggccatagctgtaggacatcaagtaggcaattggatttcacattagcatgctttaacttgcaaaaattacgatctatatttatttagtttgttttgccttcctccaggtagactcttgttgggactttattgcccttctgccttacacagatgaccttagaagcgatagtgctgatgttgtcgatagccttatcgatctaggtttagatataagagtcctcacaggtcattctgttgtgcatatcgccatatcctgctgtcgagatttttgctattgtcattttctatgataaacatgtcttcatcatatatgtatattgttttgtcctctctacagaaagtccattgtcgaccacaaagcaggtttgtggaaagcttggaaaactaggtaccaatgtggtacctgcacatatagtgtttgagttagctcgcaataacagagaagtccattcaaacatcaacgggatttctgatctctttccaggtctatctttatcttctatgtacctcctgcaaagttttgtttttgcaagttcttgttaccattttgctatcttcatatcttagtacagaggacaaaagcgatatagtaagaagactaagaaatttcggttgtcattgtgcaatggttgggtatgaatttcttgatcatgatgccataggagagagccatattgggatttcagttgctgatgcaactgattacacaaaaagtgaatctgatcttgttttgactcagcctgcactgatgcctgtttcttcagcagtgcaaatcagtaggaagatttgtcagatgctaagaagctacactgtaggtcattctgatgcatttagaggcttgatttctgacaagatgttttatatctggatcataataaatggatattaacttgcagtatgttgctgttttgcagatattcaccatttcatcaactgtccatcttgtgagttcaatttatgattattttctataatccttctaaagtacaggatcctgcaggtctaactccaatcttaattgtaatgaagtttggtgtccgtgtcattttacatttatggaactttgacttgtcaaatatcctggctttcatgattacagcttgtaattactgtgagcatcagttccaaaaggacaccaccattatttgcaatatgtattttctttttttattttccttgtttctatttttattttcaggtacgtcctttgcaatgttatttgaaagggtggaattgaacaagtcaccagataaatggagagttcagaaaatcattacaagcggtgctgcttttggaagctacatagttcttactactgccattttttatagggttgcaacaactgcaaacccttttgcatgtaaattcaaacatatatcactgatgggcagtgatgaggaaatcagatctgctttgttccttcagattagcacagtaaaccaggctattgcactctttgttcattctgatggttgctgtatcataagatggcctggaccttttgtcacatttgcctttgttgtttctcaaacggtggcaacacaaaaagttgtccatggcgacttgaattttgcactaacaaagggtattggctgtgttagggccggattgatatggttgtataacttagtcctacttttggccctggttttagtttgtcgcaaatggagacacgcaaagatgactagtgaaaagttgttgacaatatgcttgcgttcagctatcctacacatagttcttacctggtttctgtacgtaatacttgatgttagggtgcaacagccagtctctagtagatagatcgaacacatagttagggctttttccttctgcagtgtcatctgtaaaactctcaagttaattaatatcttgcataatagattttgcagttggttggcccttcatgattcagaacttgcaactgtgagaccactatattattttaagttaaaactttgctgaagctatagaatg

SEQ ID NO: 217000 - DNA, 3170 bp, Zea Mays
ggttggcctgtctgctcggcccgccgtcgtctcagctcttgtgttttctgttacggaaaaaaaaagaagaaaaaacaagccggggacgacggcggcgaggacgacgacgacgagagggacggaactggaccagcgcacgtgccgagatggcggcgctggatgacaaggccatgacggacctggagacgctggaggaggaggaagtgctgcgccggttaggcacagcggaggaggcgggcctcaccgacaacgaggccgcgcgacgcctccgtctccacggccccaacgtcgtcgtcctctcgcaccacgagggcagcatgcttcatggattcctaatggcgctcttctcgctctggggatgggatcatgtcttccccaagtacaataacatggtccgggtcatacttaactccatgtcgtgggttacagtactgactatagttgtgtctcttgctatcacctcagctggccaaagatcatgcgagctggccatcataattttcgtagtagctacatgcctcatagcatgctttactgcaatgcttgttttagagtatgctaaggctccgctggaggccaaagcccacgcaccaagggccaaggttctgagagatgggaattggagagatgtacatgcagcaaatctggtcccaggggatatcatatttctcaaagttggggacattgtcccagccaatgctcgcatactccgatttcagaaaatcgacacaatgacttgctgggccaaaaggtctgttgattgtgcgcatggcttcctcctatactatgcttggactgtttcctgtggccaaggaactgccgttgtcattgcaactggacgtggcattcccagaagtacattgcggctctacccacaacgttatgctcgacctgggcagcttaaagaaggagccatgcttactggctgcttctgtgcttccctggtacttgttggcacttttgctgagatagtcttaagatttttgttccaaaaacaaaattacagaggcatgccactcgacgcccattttatgccattgattggtggaatcccgatggcaatgcctacttttttttacctggcattggcattgggatctgtaaggctttgttttctggggattgctagccggggaacagttgcacttgaagatctagcaagtgtggatgtaatcctcttcaacatgactggtactttaacgtgtaatcagccctgttttgtacgggacaagattgagatgtttgcagatagcgttaataaagaccatgccatagttttagctgcacgggcatcaagatctcaacatgagttgtacattgaaccaattgatgcagctattctaagcctccttgatgatccggagcaggcacgactcggtgttcaagtcttagagcatcatgccagtttctttgttgcactgaaactgatgttccagactacatacatcgacgaaggcaatagattcaagtgttgcgtattcaaaggtgatcctgcaaaggttgctcatcactgtggcagcagcaaagaagttaaagagaaaataagcatgataatggatgaacttgcccttgatggatatcaggccatagctgtaggacatcaagtagactcttgttgggactttattgcccttctgccttacacagatgaccttagaagcgatagtgctgatgttgtcgatagccttatcgatctaggtttagatataagagtcctcacaggtcattctgttgtgcatatcgccatatcctgctgtcgagatttttgctattgtcattttctatgataaacatgtcttcatcatatatgtatattgttttgtcctctctacagaaagtccattgtcgaccacaaagcaggtttgtggaaagcttggaaaactaggtaccaatgtggtacctgcacatatagtgtttgagttagctcgcaataacagagaagtccattcaaacatcaacgggatttctgatctctttccaggtctatctttatcttctatgtacctcctgcaaagttttgtttttgcaagttcttgttaccattttgctatcttcatatcttagtacagaggacaaaagcgatatagtaagaagactaagaaatttcggttgtcattgtgcaatggttgggtatgaatttcttgatcatgatgccataggagagagccatattgggatttcagttgctgatgcaactgattacacaaaaagtgaatctgatcttgttttgactcagcctgcactgatgcctgtttcttcagcagtgcaaatcagtaggaagatttgtcagatgctaagaagctacactatattcaccatttcatcaactgtccatcttgtgagttcaatttatgattattttctataatccttctaaagtacaggatcctgcaggtacgtcctttgcaatgttatttgaaagggtggaattgaacaagtcaccagataaatggagagttcagaaaatcattacaagcggtgctgcttttggaagctacatagttcttactactgccattttttatagggttgcaacaactgcaaacccttttgcatgtaaattcaaacatatatcactgatgggcagtgatgaggaaatcagatctgctttgttccttcagattagcacagtaaaccaggctattgcactctttgttcattctgatggttgctgtatcataagatggcctggaccttttgtcacatttgcctttgttgtttctcaaacggtggcaacacaaaaagttgtccatggcgacttgaattttgcactaacaaagggtattggctgtgttagggccggattgatatggttgtataacttagtcctacttttggccctggttttagtttgtcgcaaatggagacacgcaaagatgactagtgaaaagttgttgacaatatgcttgcgttcagctatcctacacatagttcttacctggtttctgtacgtaatacttgatgttagggtgcaacagccagtctctagtagatagatcgaacacatagttagggctttttccttctgcagtgtcatctgtaaaactctcaagttaattaatatcttgcataatagattttgcagttggttggcccttcatgattcagaacttgcaactgtgagaccactatattattttaagttaaaactttgctgaagctatagaatg

SEQ ID NO: 217001 - DNA, 2873 bp, Zea Mays
ggttggcctgtctgctcggcccgccgtcgtctcagctcttgtgttttctgttacggaaaaaaaaagaagaaaaaacaagccggggacgacggcggcgaggacgacgacgacgagagggacggaactggaccagcgcacgtgccgagatggcggcgctggatgacaaggccatgacggacctggagacgctggaggaggaggaagtgctgcgccggttaggcacagcggaggaggcgggcctcaccgacaacgaggccgcgcgacgcctccgtctccacggccccaacgtcgtcgtcctctcgcaccacgagggcagcatgcttcatggattcctaatggcgctcttctcgctctggggatgggatcatgtcttccccaagtacaataacatggtccgggtcatacttaactccatgtcgtgggttacagtactgactatagttgtgtctcttgctatcacctcagctggccaaagatcatgcgagctggccatcataattttcgtagtagctacatgcctcatagcatgctttactgcaatgcttgttttagagtatgctaaggctccgctggaggccaaagcccacgcaccaagggccaaggttctgagagatgggaattggagagatgtacatgcagcaaatctggtcccaggggatatcatatttctcaaagttggggacattgtcccagccaatgctcgcatactccgatttcagaaaatcgacacaatgacttgctgggccaaaaggtctgttgattgtgcgcatggcttcctcctatactatgcttggactgtttcctgtggccaaggaactgccgttgtcattgcaactggacgtggcattcccagaagtacattgcggctctacccacaacgttatgctcgacctgggcagcttaaagaaggagccatgcttactggctgcttctgtgcttccctggtacttgttggcacttttgctgagatagtcttaagatttttgttccaaaaacaaaattacagaggcatgccactcgacgcccattttatgccattgattggtggaatcccgatggcaatgcctacttttttttacctggcattggcattgggatctgtaaggctttgttttctggggattgctagccggggaacagttgcacttgaagatctagcaagtgtggatgtaatcctcttcaacatgactggtactttaacgtgtaatcagccctgttttgtacgggacaagattgagatgtttgcagatagcgttaataaagaccatgccatagttttagctgcacgggcatcaagatctcaacatgagttgtacattgaaccaattgatgcagctattctaagcctccttgatgatccggagcaggttgctcatcactgtggcagcagcaaagaagttaaagagaaaataagcatgataatggatgaacttgcccttgatggatatcaggccatagctgtaggacatcaaaaagtccattgtcgaccacaaagcaggtttgtggaaagcttggaaaactaggtaccaatgtggtacctgcacatatagtgtttgagttagctcgcaataacagagaagtccattcaaacatcaacgggatttctgatctctttccagaggacaaaagcgatatagtaagaagactaagaaatttcggttgtcattgtgcaatggttgggtatgaatttcttgatcatgatgccataggagagagccatattgggatttcagttgctgatgcaactgattacacaaaaagtgaatctgatcttgttttgactcagcctgcactgatgcctgtttcttcagcagtgcaaatcagtaggaagatttgtcagatgctaagaagctacactatattcaccatttcatcaactgtccatcttgtgagttcaatttatgattattttctataatccttctaaagtacaggatcctgcaggtctaactccaatcttaattgtaatgaagtttggtgtccgtgtcattttacatttatggaactttgacttgtcaaatatcctggctttcatgattacagcttgtaattactgtgagcatcagttccaaaaggacaccaccattatttgcaatatgtattttctttttttattttccttgtttctatttttattttcaggtacgtcctttgcaatgttatttgaaagggtggaattgaacaagtcaccagataaatggagagttcagaaaatcattacaagcggtgctgcttttggaagctacatagttcttactactgccattttttatagggttgcaacaactgcaaacccttttgcagtgagtgcttttccttccgaagaaagttaacatcttgatttcaaggtgatgaagagctgattatttggtacttggacagtgtaaattcaaacatatatcactgatgggcagtgatgaggaaatcagatctgctttgttccttcagattagcacagtaaaccaggctattgcactctttgttcattctgatggttgctgtatcataagatggcctggaccttttgtcacatttgcctttgttgtttctcaaacggtcgcaaatggagacacgcaaagatgactagtgaaaagttgttgacaatatgcttgcgttcagctatcctacacatagttcttacctggtttctgtacgtaatacttgatgttagggtgcaacagccagtctctagtagatagatcgaacacatagttagggctttttccttctgcagtgtcatctgtaaaactctcaagttaattaatatcttgcataatagattttgcagttggttggcccttcatgattcagaacttgcaactgtgagaccactatattattttaagttaaaactttgctgaagctatagaatg

SEQ ID NO: 217002 - DNA, 2599 bp, Zea Mays
ggttggcctgtctgctcggcccgccgtcgtctcagctcttgtgttttctgttacggaaaaaaaaagaagaaaaaacaagccggggacgacggcggcgaggacgacgacgacgagagggacggaactggaccagcgcacgtgccgagatggcggcgctggatgacaaggccatgacggacctggagacgctggaggaggaggaagtgctgcgccggttaggcacagcggaggaggcgggcctcaccgacaacgaggccgcgcgacgcctccgtctccacggccccaacgtcgtcgtcctctcgcaccacgagggcagcatgcttcatggattcctaatggcgctcttctcgctctggggatgggatcatgtcttccccaagtacaataacatggtccgggtcatacttaactccatgtcgtgggttacagtactgactatagttgtgtctcttgctatcacctcagctggccaaagatcatgcgagctggccatcataattttcgtagtagctacatgcctcatagcatgctttactgcaatgcttgttttagagtatgctaaggctccgctggaggccaaagcccacgcaccaagggccaaggttctgagagatgggaattggagagatgtacatgcagcaaatctggtcccaggggatatcatatttctcaaagttggggacattgtcccagccaatgctcgcatactccgatttcagaaaatcgacacaatgacttgctgggccaaaaggtctgttgattgtgcgcatggcttcctcctatactatgcttggactgtttcctgtggccaaggaactgccgttgtcattgcaactggacgtggcattcccagaagtacattgcggctctacccacaacgttatgctcgacctgggcagcttaaagaaggagccatgcttactggctgcttctgtgcttccctggtacttgttggcacttttgctgagatagtcttaagatttttgttccaaaaacaaaattacagaggcatgccactcgacgcccattttatgccattgattggtggaatcccgatggcaatgcctacttttttttacctggcattggcattgggatctgtaaggctttgttttctggggattgctagccggggaacagttgcacttgaagatctagcaagtgtggatgtaatcctcttcaacatgactggtactttaacgtgtaatcagccctgttttgtacgggacaagattgagatgtttgcagatagcgttaataaagaccatgccatagttttagctgcacgggcatcaagatctcaacatgagttgtacattgaaccaattgatgcagctattctaagcctccttgatgatccggagcaggttgctcatcactgtggcagcagcaaagaagttaaagagaaaataagcatgataatggatgaacttgcccttgatggatatcaggccatagctgtaggacatcaagtagactcttgttgggactttattgcccttctgccttacacagatgaccttagaagcgatagtgctgatgttgtcgatagccttatcgatctaggtttagatataagagtcctcacagaaagtccattgtcgaccacaaagcaggtttgtggaaagcttggaaaactaggtaccaatgtggtacctgcacatatagtgtttgagttagctcgcaataacagagaagtccattcaaacatcaacgggatttctgatctctttccagatattcaccatttcatcaactgtccatcttgtgagttcaatttatgattattttctataatccttctaaagtacaggatcctgcaggtacgtcctttgcaatgttatttgaaagggtggaattgaacaagtcaccagataaatggagagttcagaaaatcattacaagcggtgctgcttttggaagctacatagttcttactactgccattttttatagggttgcaacaactgcaaacccttttgcatgtaaattcaaacatatatcactgatgggcagtgatgaggaaatcagatctgctttgttccttcagattagcacagtaaaccaggctattgcactctttgttcattctgatggttgctgtatcataagatggcctggaccttttgtcacatttgcctttgttgtttctcaaacggtggcaacacaaaaagttgtccatggcgacttgaattttgcactaacaaagggtattggctgtgttagggccggattgatatggttgtataacttagtcctacttttggccctggttttagtttgtcgcaaatggagacacgcaaagatgactagtgaaaagttgttgacaatatgcttgcgttcagctatcctacacatagttcttacctggtttctgtacgtaatacttgatgttagggtgcaacagccagtctctagtagatagatcgaacacatagttagggctttttccttctgcagtgtcatctgtaaaactctcaagttaattaatatcttgcataatagattttgcagttggttggcccttcatgattcagaacttgcaactgtgagaccactatattattttaagttaaaactttgctgaagctatagaatg

SEQ ID NO: 217003 - DNA, 3247 bp, Zea Mays
atcgcccgtgccctgcggtgttctactcactcccagctgcgacaatccccctcatcgcccgccccccctggtctcgtctctccttcgcgcatctcaccgccatctcactcccgaaccccccttcctttgcttcccgcgtctaatttagcgccagaacatttgaattccccgcaacttccgcttccagcggcttctcgaaccttccggaggcgccgccgatcgaccccggctccatccccttgcccccctagggtttcgcgttcccctcggggatgggggacgccgccaccgccgcagcggcggcggcagcgtcgcccgcttgcgccgcgcggaagcggcggcgcggcgacgacagcgcggggctgaggcgggtggcggagatcgtgatggtcctggccgcggccggggaggtacgcggcgggaggcagcccacggccgcggagcgcgcgctggcggccgaggcgcgggagactctggccaccgccgtcgccgagagggccgtgcggcccaaggatctgttcccgggggaagcggtgcgcgcggtcgtcgaggatctcgggctcaaccgctccaaggacccagctgccatggggtttcgcccgcccaaggcctccatcgccgataggctcatgcttactaagcgcaaggttttgccaactctctcgtttgcacccattcccgcacagtttactagccattgtggtggctttgaaattcttaactggggtgataaatgtgatatggaagaagtcaaggaagctccagtggttagcgcacctcaaacagtcgtctcaagtggaacgtctgagttccatggtttgaatggggctaccaagtttggtgttggagttcctaggaacccaccagttccatctttagctgctactggcccattaacctctacatccccagttaccttgaagccaccaggatcatctcctgtaaaaccagttgccaactcatcagttgttcctctagtcaatactggtccatcaaaccttaaattggacaaaaatgttagtggtcctctgaatttagcattcagtggagcaacggtcgtccactcaaacaagtcaactttagacacatctgctaggcccgatgtaaatgctgtacagagttccaatcagacggtgaaaaaccatgacacaaaaccagtggcagttcaagccgcgacaggtaaccctgttatgggtcatcgtgctacaccaggcgtggcatttgctccaccaaaacctactttcatcaatcacaatgagatagcaaagaatgttctacaatttcttcaccaacctgcaaaccatcctagctggactccaccatcaactgagtacatgcattctcgtttgtgctgtcaaatatgcaaagttgatatcattggtacagacaatttacttgtttgtgatgcttgcgagaggggagtacacttgaaatgccttcatcagtatggcaataagggcgtccccaaagctgagtggcattgttctgcatgcctgactcagagtaagggaaaacccttgccaccaaaatatggcaaggttacaaggactgtagttgcatcaaagactgctccacctggtggtggagcacagctttctttgcaggaatcagcagaaaacatggctgcaaaggaaaatcaccaaaagttggctgcaaatggaaatcttatgaagccattctccattcatggtggcagcacagtacccgacagtaatgtattggcactgagtgctgtcatggctggttcacaatcacaattagtttctaccttgagaccatcaatagtcgttaaagctgaaacaccctctaatggaaaggaaggaactgggcaaccatgcaatactgcaatacaacctaatgtgcgatcatcttctcttaacaacagattgagaagtgattcctgtttgaaccctgctgattcagcaaatgaaatcatgcatggtaagcatgctgcagaaatttctggtgttgaagcaaaggtcaagtctgaagcaaactctgaggttgttgtgagtacagatgaggaattggttcatagcagtggaacatcaatcgaaactgaacgagccaaggttgtcgctattgaagaaaacagggcacaatcaacctttgagacagataaaatgaaagttggggaaacaactatcaacacaggaacaacagatcaatgcatcaatactgaagaaaagctccccagtttagcaacttctgaggcacacacaatcactgacgtgaagatgactagcaatacaggaataccagtacagcaacacaacattgctactattgaagagaagacccagattgatgcagtgtctgatccacatccacatgcaatccaagatattcaagatatggaaatgggcaccaacaatggaccacccatagatcaaacaagcagtcttgttgaagaaaacccccctggacaatcctcttcaattgctgatgcgtgtgtcactgctaatactggaataccaacagatcaaacacagcatccaaatgagtcaactgaaaatgcagtaaagaaatctcccaacagagaactatataaagaaaaaccgggctgcaacataacctcagatattacccaaaaagtaacttcaaatggcatcatgtgccctgaggacaaaactttatgtgttcatgaagataaagcagtgggttgtgacacagaagcaaaagaagaaaactaatttagtagcaggttgcatccaattttcattttccagatggaactgttctgaatctaccattattttaccaacgtcagtgattgactgtgttctctacattctcttggacagcattatacatttagccattgccaaccatttttccaggaggtatccattgcctcctggtgtagtttagagaatcccagaacacaggaaatataatcgtgatgttgtactttatgtagattgataatcttgagttcctgactattgaattccatttccccctttatttgttccgtgctcatctggaatgctgtaactagatagggtttagctgagttaggactggattatcaagtcataataatgatacgtgccttcgccatcccttcggaccatgttccaatgtgatacaatctactaccatgcaatatatcaccatcagcctgctaacgcacgccactagctttaagtttccaatccttctgtcagtttgtaatgtttgcagctacttcatccgtttcaatttacacttcctatgtccaatctaatggtgtgtttggttgaaa

SEQ ID NO: 217004 - DNA, 3150 bp, Zea Mays
atcgcccgtgccctgcggtgttctactcactcccagctgcgacaatccccctcatcgcccgccccccctggtctcgtctctccttcgcgcatctcaccgccatctcactcccgaaccccccttcctttgcttcccgcgtctaatttagcgccagaacatttgaattccccgcaacttccgcttccagcggcttctcgaaccttccggaggcgccgccgatcgaccccggctccatccccttgcccccctagggtttcgcgttcccctcggggatgggggacgccgccaccgccgcagcggcggcggcagcgtcgcccgcttgcgccgcgcggaagcggcggcgcggcgacgacagcgcggggctgaggcgggtggcggagatcgtgatggtcctggccgcggccggggaggtacgcggcgggaggcagcccacggccgcggagcgcgcgctggcggccgaggcgcgggagactctggccaccgccgtcgccgagagggccgtgcggcccaaggatctgttcccgggggaagcggtgcgcgcggtcgtcgaggatctcgggctcaaccgctccaaggacccagctgccatggggtttcgcccgcccaaggcctccatcgccgataggctcatgcttactaagcgcaagatggaagaagtcaaggaagctccagtggttagcgcacctcaaacagtcgtctcaagtggaacgtctgagttccatggtttgaatggggctaccaagtttggtgttggagttcctaggaacccaccagttccatctttagctgctactggcccattaacctctacatccccagttaccttgaagccaccaggatcatctcctgtaaaaccagttgccaactcatcagttgttcctctagtcaatactggtccatcaaaccttaaattggacaaaaatgttagtggtcctctgaatttagcattcagtggagcaacggtcgtccactcaaacaagtcaactttagacacatctgctaggcccgatgtaaatgctgtacagagttccaatcagacggtgaaaaaccatgacacaaaaccagtggcagttcaagccgcgacaggtaaccctgttatgggtcatcgtgctacaccaggcgtggcatttgctccaccaaaacctactttcatcaatcacaatgagatagcaaagaatgttctacaatttcttcaccaacctgcaaaccatcctagctggactccaccatcaactgagtacatgcattctcgtttgtgctgtcaaatatgcaaagttgatatcattggtacagacaatttacttgtttgtgatgcttgcgagaggggagtacacttgaaatgccttcatcagtatggcaataagggcgtccccaaagctgagtggcattgttctgcatgcctgactcagagtaagggaaaacccttgccaccaaaatatggcaaggttacaaggactgtagttgcatcaaagactgctccacctggtggtggagcacagctttctttgcaggaatcagcagaaaacatggctgcaaaggaaaatcaccaaaagttggctgcaaatggaaatcttatgaagccattctccattcatggtggcagcacagtacccgacagtaatgtattggcactgagtgctgtcatggctggttcacaatcacaattagtttctaccttgagaccatcaatagtcgttaaagctgaaacaccctctaatggaaaggaaggaactgggcaaccatgcaatactgcaatacaacctaatgtgcgatcatcttctcttaacaacagattgagaagtgattcctgtttgaaccctgctgattcagcaaatgaaatcatgcatggtaagcatgctgcagaaatttctggtgttgaagcaaaggtcaagtctgaagcaaactctgaggttgttgtgagtacagatgaggaattggttcatagcagtggaacatcaatcgaaactgaacgagccaaggttgtcgctattgaagaaaacagggcacaatcaacctttgagacagataaaatgaaagttggggaaacaactatcaacacaggaacaacagatcaatgcatcaatactgaagaaaagctccccagtttagcaacttctgaggcacacacaatcactgacgtgaagatgactagcaatacaggaataccagtacagcaacacaacattgctactattgaagagaagacccagattgatgcagtgtctgatccacatccacatgcaatccaagatattcaagatatggaaatgggcaccaacaatggaccacccatagatcaaacaagcagtcttgttgaagaaaacccccctggacaatcctcttcaattgctgatgcgtgtgtcactgctaatactggaataccaacagatcaaacacagcatccaaatgagtcaactgaaaatgcagtaaagaaatctcccaacagagaactatataaagaaaaaccgggctgcaacataacctcagatattacccaaaaagtaacttcaaatggcatcatgtgccctgaggacaaaactttatgtgttcatgaagataaagcagtgggttgtgacacagaagcaaaagaagaaaactaatttagtagcaggttgcatccaattttcattttccagatggaactgttctgaatctaccattattttaccaacgtcagtgattgactgtgttctctacattctcttggacagcattatacatttagccattgccaaccatttttccaggagccattgcctcctggtgtagtttagagaatcccagaacacaggaaatataatcgtgatgttgtactttatgtagattgataatcttgagttcctgactattgaattccatttccccctttatttgttccgtgctcatctggaatgctgtaactagatagggtttagctgagttaggactggattatcaagtcataataatgatacgtgccttcgccatcccttcggaccatgttccaatgtgatacaatctactaccatgcaatatatcaccatcagcctgctaacgcacgccactagctttaagtttccaatccttctgtcagtttgtaatgtttgcagctacttcatccgtttcaatttacacttcctatgtccaatctaatggtgtgtttggttgaaa

SEQ ID NO: 217005 - DNA, 1738 bp, Zea Mays
tagaaacgctcccacctcacaaaatattacgctgagtgagaagaggtcaaacacgtacgctatatgcttacacgtggatgcagcgggcagccccaggctggcacaggctcgatcgcatcagcagtcgtcgacggaacaagaggcgatggcacaggacggccgcgcccgcgagagctccagcaaggcggcgtcggctggcagcggcggctgctccatgccgttcaggctcaacgtgcacgcgcgggagttcgtcccggtggccagccctttggcggcggccgccgccggcggcggctactattctccgttcgtgcagctttccggcgatggcgggctgggcacggactggatgaacttctttgccgagccggaccccacgtcgccgtcgtccttcctgccggactttggacactgcgacatcctcagagctaccggcggcatcaatggctaccctaaccccaaaggcggcgcaagtgtggccgacatcgcagataagattgtcaagcaggtcgagtaccaattcagtgacacgaacttggttgcgaacgattttctgacaaagatcatgaacaaggatcccgagggctatgtccctttgtctgtcatatcatcctggaagaagatcaaggccatgggggtaacaagccagctgctggtcatggctctccggacctcggacaagctcgttgtcagcgacgacggcaggaaggtgcggcgggcgcagccattcaccgagcgacacaaagaagagctgcagtgccggatggtcatcgccgagaacttgccgcaggattccacgagaaacagcctcgagaagatcttcggcgtcatcggcagcgtgaaaaacatcagaatctgccatccgcaagaacccggctctgcaagatcatcacctaggtcgtcagacacaaacacaccagccagtaacaagctgcatgcgcttatagagtacgagacctcgcaccaagccgacagagcagtggacaagctgaacgacgaaaggaactggaggaagggcctccgcgtgcgccccgtgctgcgacgatcgcccaagacggtggcacggatgaagcggccggacttggaccaccacgtcgccgcctccgacgaggagcgtgtctccacgtccgactccccgacggcgacagcggcagcgcaccctcctgacaacactcagcagcagcaggaggaggaggaggaggaccagcaccagcaccagcacggcggcgccaagaagccgtggggcagcagagggcggggcaggccgccgccgcactcctccgcgcactctgctggcgcgcccgggcattcggtggacagcctcgcggcgagcccccggcacgcggcgcaggggcctaggatgcccgacggcacgcgcgggttcaccatgggccgcgggaggccggcgccgcctgccgcgccgtcggctgctgctgccgtccgggtcgtgtaggtcggtcgccggttccgccgtacgtggtggcgtctgactgaccgggcagatgtcccttcttgatttttatttgttttgttttgagggagaggatgaaagtgcagtgtcttgtctctctctatctctcttttttcctttctttctttcttgaataaactgttttgatttttttaataaggaataatacgtgataaagttgcattattgttgtcttttgatgaacgtacggtctacgataatgctcttctattcttaggacagaatatattccttgaataaacaccg

SEQ ID NO: 217006 - DNA, 1729 bp, Zea Mays
cttacacgtggatgcagcgggcagccccaggctggcacaggctcgatcgcatcagcagtcgtcgacggaacaagaggcgatggcacaggacggccgcgcccgcgagagctccagcaaggcggcgtcggctggcagcggcggctgctccatgccgttcaggctcaacgtgcacgcgcgggagttcgtcccggtggccagccctttggcggcggccgccgccggcggcggctactattctccgttcgtgcagctttccggcgatggcgggctgggcacggactggatgaacttctttgccgagccggaccccacgtcgccgtcgtccttcctgccggactttggacactgcgacatcctcagagctaccggcggcatcaatggctaccctaaccccaaaggcggcgcaagtgtggccgacatcgcagataagattgtcaagcagaactgtagatctctgggaaaaaaaaaccggaaacgccgagagcgcatgctgctgcaggtcgagtaccaattcagtgacacgaacttggttgcgaacgattttctgacaaagatcatgaacaaggatcccgagggctatgtccctttgtctgtcatatcatcctggaagaagatcaaggccatgggggtaacaagccagctgctggtcatggctctccggacctcggacaagctcgttgtcagcgacgacggcaggaaggtgcggcgggcgcagccattcaccgagcgacacaaagaagagctgcagtgccggatggtcatcgccgagaacttgccgcaggattccacgagaaacagcctcgagaagatcttcggcgtcatcggcagcgtgaaaaacatcagaatctgccatccgcaagaacccggctctgcaagatcatcacctaggtcgtcagacacaaacacaccagccagtaacaagctgcatgcgcttatagagtacgagacctcgcaccaagccgacagagcagtggacaagctgaacgacgaaaggaactggaggaagggcctccgcgtgcgccccgtgctgcgacgatcgcccaagacggtggcacggatgaagcggccggacttggaccaccacgtcgccgcctccgacgaggagcgtgtctccacgtccgactccccgacggcgacagcggcagcgcaccctcctgacaacactcagcagcagcaggaggaggaggaggaggaccagcaccagcaccagcacggcggcgccaagaagccgtggggcagcagagggcggggcaggccgccgccgcactcctccgcgcactctgctggcgcgcccgggcattcggtggacagcctcgcggcgagcccccggcacgcggcgcaggggcctaggatgcccgacggcacgcgcgggttcaccatgggccgcgggaggccggcgccgcctgccgcgccgtcggctgctgctgccgtccgggtcgtgtaggtcggtcgccggttccgccgtacgtggtggcgtctgactgaccgggcagatgtcccttcttgatttttatttgttttgttttgagggagaggatgaaagtgcagtgtcttgtctctctctatctctcttttttcctttctttctttcttgaataaactgttttgatttttttaataaggaataatacgtgataaagttgcattattgttgtcttttgatgaacgtacggtctacgataatgctcttctattcttaggacagaatatattccttgaataaacaccg

SEQ ID NO: 217007 - DNA, 497 bp, Zea Mays
ctaaaaccaagaagctactcattcctcccattcgcatctagcctcacaggcggcggcggctcccgccgagcgctgagcgtcgagcacatcggcccaggaacaccaacgctgcgtgcagcagccccgctaggatcgccaccgacgccgccgtgttgtacaggacgaaccccatcgggctgtccttgggcacaggttttaattctctctttacacatatcttggtctttaattctctcatcaccagcgtaaggaagatgatttctcgatggacattcacatgtgaatttggatggtactccggatataaatgtccaaatgaaggttattgggttctcatgtacaacattgcataagtgctcactttattcatgggtatcataattcctggattccaaatctgagacggatgttgatgttgactataacagcttgtactcaaagcagggctttctacaggcgaggggtataatgcctttcttttcccaatgcaaatggaa

SEQ ID NO: 217008 - DNA, 435 bp, Zea Mays
ctaaaaccaagaagctactcattcctcccattcgcatctagcctcacaggcggcggcggctcccgccgagcgctgagcgtcgagcacatcggcccaggaacaccaacgctgcgtgcagcagccccgctaggatcgccaccgacgccgccgtgttgtacaggacgaaccccatcgggctgtccttgggcacaggttttaattctctctttacacatatcttggtctttaattctctcatcaccagcgtaaggtatcataattcctggattccaaatctgagacggatgttgatgttgactataacagcttgtactcaaagcagggctttctacagggtagagggagactggtattgcagccaagaagcaagaaaataagaaaagagaggcaaaagtagccacctactgttggtcccccaacaaatacaagcgtgaa

SEQ ID NO: 217009 - DNA, 2131 bp, Zea Mays
taaatcgtgtccgtccgttgctgcagacccaccccgcgctccatgtgatgtgtagtgttttctccctctgctttccccactcgtccgctcctgcttcccgccgccatcgcccatgacgccggcggcaccggcatccgccgcggacgcgcttgcgcagatcctgcaggacctcctgccttcggttctgctggccgcggcgtcggtcagggcgctccactcgcggtggcgcgcgctccaggcctccctcctcgcgttgcagtcctcgctcgtctccgcgcccgcctccgccccgtcccacccgctcttcgccgacctggtggccgcgcttctcccagccctccgttccctccacgcgctctctgtccggtgccaggaccctgggctccccggggggcggctgcggctacagagcgaccttgacatggtgcctgcgtcggcggctccgcacgcagacaagtccctcttcgtccgtgacgcctttgcccgcctccagatcgggtcgctggacctgaagctaaaggcgctagtgtcgctgctcgacctgctgggtgacgaccctactgcggaggccgcgcagatcgtcgccaccgaaggggacgttgcggcgctgctccgtttgcttgacgcgtcgtcccactcggcgctgcgggaccgtgcggtcacggccgtggcccaccttgcgaccgcctgcgctgcgtcccggagggtggtcttcgacgaaggcggactcggcccacttctgcgcgtgctcgactcaggctcaccgcccgccacgcgtgagcggtctgctgcggccattgtggccatcactggtgatgccggcagcgcgtgggctctatcggcttatggtggattgcccatcttgattaatgcttgccgtcctgggtctggatcccccgcattgcaggcatttgccgtggcggcaattaagaatgtttcttcagtcgatgatgtgcgctccactctggtggaggagagtggtttgcctgttcttgttgacctgcttgccagtggcactgctgagacgcagaagagtgctgctctctgcctctgggcacttgcttcgatgggagaccataagacacagaaccagattgtgcaagcaggtgcattgtcgccactcctacaagcactgcatatcgcctctgatcaggacctccatgattctgtactgcgtgctatacacgcacttacatcagcccctgctgccaccagaatcctttgttcatcgccactgttctttgcacgacttacagacctcatatgcagctctggtagcttcctgttgcaacaaatggctgctgatatgattgctgatcttgcacctactgtgagcgatgacacaaagaggtgcatggcaccatgcattggtacactgattaagctgatggaggtggctaagccagcaacaatacaggagtcagctggagactgataagaagtatccactctcgatctttctagttcttgccatgggtggcgggaacgggacacgacgacgacttgttgatgctggttcttgtcagcatctacagaagctggctgatgctgatgtgcctggtgcaaagaaggctttgcagaggatatctaacaatcgtcttaaaagtttgttttccataggatggcaaaactagtccatatgctgcactgggttgaagagcagcccaagactgcagatgtggagagcctctaccaaatgacagaagaacgctcaagtatttgtttgagtaggagttatgatagtacaagaacatcaagcgagagagttctcagtttctctgcggctaaaggtggccagtagatggtattattaagtacaagtagtatgttaacaagctggaagcttggacgtggcattttaggaagcgtctaaaagcttctttggtttgctcctttccgttttcccttgtattttagctttttttttctttctttcttctgttttataattgtggctctcaccatctactttgtgaaaatttgtttgtgttgatttggaatgaagcaaggaattgatctgtgtcacgtcccagtaggcagtctgtgctgctttagctcccactgccagtgggctttgtacgctccataggcacatttcgttgatcatactgtggacagagataagtccctg

SEQ ID NO: 217010 - DNA, 11413 bp, Zea Mays
acaacaatcacaaccctctctctccctctccttcacgtagccgcctctgaatccccacctctctgctctcccgtcggcctcctccgcgaccgatgtgtgtgccccgccgccggcccaaaacactagaggtgacgagcaggtaaggggttccgatcggagatggcggcggcggcggccgcacatagagccagcttcccgttgcgcctgcagcagatccttgctggaagccgcgctgtctcacctgcgatcaaggtcgagtctgagccgcccgcaaatgtcaaagcatttattgatcaagtaatcaatattccactacatgacattgccataccgctatcaggcttccgttgggagttcaataagggaaatttccaccactggaagcctttatttattcattttgacacatatttcaagacatacatttcttctcggaaggatcttcttttatctgatgatatgactgaggctgaacctatgccaaagaatgccatcttgaaaattttaatagttatgcagattattttggagaactgtcagaatagaagttcttttactggtcttgagcatcttaagcttctcctggcatcgtcagaccctgagatagttgtagcagcattggaaactcttgttgccttggtcaaaataaatccttcaaagttgcatatgaatggaaagctaattagctgcggatccataaacacccatcttctatcattggcccaaggatggggcagcaaggaggaaggcctaggcatatattcttgtgttgtggcaaatgaaggaaaccagcaggggggcctgtccttgttcccagtagacttggagagcaaatatcagcatcgtcttggttcaactcttcattttgagtataatttgggttctgcacagtaccctgaccaaactagtgacaagggcaagtcatctaatttgtgtgtgatacatattccagacatgcatcttcagaaagaggatgacttgagcatactgaagcaatgcgtggacaaattcaatgtgcctccagagcacaggtttgcattgcttacaaggataagatatgcccgcgccttcaactccacacggacttgtagtatctatagccgcataagtcttctttcgttcattgtacttgtgcaatcaagtgatgctcacgatgagctcacatatttctttacaaatgaaccagaatacataaacgagttaatcaggcttgttcggtcagaagattctgtccctgggcccattcgtgcacttgctatgctagcactgggagcacagctggcagcatatgcatcatctcatgagcgtgctaggatattgagtggctcaagtatcatttctgctggtggaaatcgtatggtgttgctcagtgtcttgcagaaagcaatattctcactcaatagcccaaatgatgcctcatctcctctaattgttgatgctcttcttcagttttttctgctccatgtattgtcctcatcaagttcagggactacggttagaggctcaggcatggttcctcctctcttgcccctgctgcgagataatgattcttctcatatgcatcttgtctgcttggcagtgaagactcttcaaaagcttatggagtacagcagccctgctgtttctctgttcaaagacttgggtggtgtagaccttttgtctcggaggttacatgtagaagtgcagcgtgttattggtactgctgatggtcataattcaatggttactgatgcagttaaatcaaaagaggaccacctgtactcccagaagcgattgattaaagctttgcttaaggctttggggtcttctacttattcccctgggattcctgctcgttctcaaagctcccaagataattcattgcctgtgtcactttcccttatatttcagaatgtagaaaagtttgggggcgacatttatttttcagcagttacagttatgagcgaaataatccataaagatcctacatgctttcctgctttgaaagaacttggtcttccagatgcttttctctcatcagtgactgctggggtaataccatcttgtaaagccctgatctgtgttcctaatggcctgggtgcaatatgcctcaataaccaaggacttgaggctgtcagggaaacttcagcactacgatttcttgtatataccttcactagcaggaaatacttgataccactgaatgagggcgttgttcttctagctaatgcagcagaagagcttcttcgtcatgtgcaatccctgagaagtattggtgttgacatcattattgaaataatcaataaactaagttcatctctgaaagatagaaacaatgaaacagccatcttggaagaaaaaacagatatggaaactgatgttgaaggtcgtgatttggtaggtggtatggattccagtgtggagggcagtaatgatgaacagttttctcatttgagcattttccatgtgatggtattggttcaccggacaatggaaaactctgaaacctgccggttatttgtcgaaaagggaggtctaaatgctcttttgacactcttgttgaggcctagcattacactgtcatctggagggatgcctattgctttgcatagcacaatggtgttcaagggatttactcagcatcactctactccacttgcacgtgcattttgctcgtctttaagggagcatttgaagagtgcattaggggaacttgataaagtttctaactcatttgagatgaccaagattgaaaaaggagcgataccttctttgtttgttgttgaatttctgctatttttagctgcctcaaaagacaatcgttggatgaatgctttgctctcagaatttggcgatgctagcagggaggtcctggaagatattgggcgagtccaccgggaagtgctttggaaaatttcgctttttgaagaaaacaagattgacgctgaaattagtttatcttcttccacatctgaagcccagcagcctgacttgtctgccagcgacattggtgatagcagatacacttctttcaggcaatatcttgatccaattttaaggcgaaggggttctgggtggaacatagagtctcaagtgtctgacctcattaatatgtatcgagacattggcagtgcagctagtgactctcagagagttggttctgatagatattctagtctgggtttgccctcaagttcccaggaccagtcttccagttcatctgatgcaaatgtcagcacaagatcagaagaggaaaagaaaaattctgagcattcctcctgctttgacatgatgagatctctctcctaccatatcaaccatctttttatggagcttggtaaagcaatgcttcttacatctcgtcgggagaacagtcctgtaaacctatccccatccgttatatctgttgctaacaacattgcttctattatgttggaacacctcaactttgaaggacattcggtaagttctgagagggagatgactgttaccacaaaatgccaatatcttggaaaggtagctgaatttattgatgggatattattagatcggccagaatcctgtaatccaattatggtaaattcattctattgctgtggtgtcattcaggccatcctgaccacatttcaggccaccagtgagttgctcttcacaatgagcaggccaccatcttcacctatggagacagatagtaaaactggaaaggatggaaaggatatgaattcttcatggatctatggtcccctcatcagctatggcgcaattatggatcatcttgtgacctcgtcttttattctctcttcatcaactagacaattacttgagcagcctatttttaatggatctgtaaggtttcctcaagatgctgagaggttcatgaagttacttcagtctaaggtgttgaagacagttcttcccatctgggctcatcctgagtttccagaatgcaacattgagttgattagttcagtcatgtccatcatgaggcatgtttgctctggggtggaagtgaaaaacactgttggcaatgatggtgctcgtttaactggtccacctcctgatgagagtgcaatttcattgattgtagagatggggttttctcgtgcaagagctgaagaagcattaagacaagttggaaccaacagtgttgaaatagcaactgattggttattctcacacccagaggatgaacttgctcgggcgctcgcaatgtctcttgggaattctgatacacctgcacaagagggaaatggtaggtccaatgaccttgagctggaggaagtaacagtccagctgcctcctatagatgaaatgttacactcatgttttcagctacttcagacaaaggaagcattagctttccctgtcagggatatgcttgttactatcagctcacagaaggatggccaaaaccgagtaaaggtgcttacatatttgattgaaaatctgaaacaatgtgtggtggcatctgagccttcaaatgatactgcactgtctgctcttttacatgttcttgctttgattctccatggagatactgctgctcgtgaagttgcctcaaaggcaggaattgtgaaggttgctttagatctgctttccagctgggagttggaacttagggaaagtggcatgattgaggttcctaattgggtaagttcctgtttcctttctgttgatcagatgctccagttggaaccaaagttgccagatgttacagagctagatgttctgaaaagggataattcaaatataaaaacatcacttgtgattgatgagagcaagaaaaaagattcagaatccttgtcaagtgttggattactagacatggaggaccagtatcaacttttgaagatctgttgcaagtgcatagaaaaacagttgccttcggcttccatgcatgctattcttcagctctctgcaacactgacaaaagttcatgcagctgctatttgtttccttgagtctggtggtctgaatgcattgctatcattgccaacaagtagtttgttttctgggttcaacagtgtggcttctacaataattcgtcatattttggaggaccctcacacccttcagcaagcaatggaattagagatacgtcacagtcttgtcacagctgctaatcgacatacaaatcccagggttaccccacgcaattttgtccagaatttggcatttgtcatatatagggacccagtgatatttatgaaagctgtccagtctgtgtgccagattgagatggttggagatagaccgtatgttgttctgttaaaggatcgtgagaaagaaaggagcaaggagaaggataaggacaaatcagttgataaggataaagcaacaggtgcagtcgctaaggtagtgtccggggacacagctgcaggatctcctgcaaatgctcaggggaaacagtctgatttgaattcaagaaacgtgaaatctcaccgcaagccaccccaaagttttgtcactgttatagagcatctcttagatctggtgatgtcctttgttccgccaccccgtccagaggatcaagctgatgttgtctctggtactgccttatcttctgacatggacattgactgcagttctgcaaaagggaaagggaaagctgtgtctgtcccacctgaagagagcaagcatgctatccaagagtctactgcatcccttgccaaagcttcatttttccttaagttgatgacagatgtgttgttaacttacacatcatccattcaagttgttcttcgtcatgatgctgatctgagcaacatgcacggtccaaatcgaacaaattctggtctaattagtggtggaatctttaaccatatcctgcagcatttccttcctcatgccacaaagcaaaagaaagagagaaaaagtgatggagattggatgtataaattggcaacaagggctaatcagttcttggtggcttcatctattcgttctgcagaggcccgaaaaaaagttttttctgaaatctgcaatatacttcttgatttcaccgactcgtctgcagcttacaaagccccagtagcaaggatgaatgtgtatgttgatttactgaatgatattctgtcagcccgatcaccaactggctcctcattgtcagcagaatctgcagttacatttgttgaagttggtcttgctccttcattattgaaaatgcttcaaaatcttgatttggatcaccctgattctgcaaagatcgttactgccattgttaaggccctggaactcgtcagtaaggaacatgttcattcagcagataatgcaaaaggagagaactcatcaaagattgcttccgacagcaacaatgtgaattcatcacctaataggttccaggctcttgacatgacttctcagcccacagagatgattactgatcacagggaaacatttaatgctgaccaaacttcacaaagttcagattcagtggcagatgagatggatcatgatcgtgatatggatggtggctttgctcgtgatggtgaagatgattttatgcatgagatggctggcgatggaactggtaatgaatctacaatggaaatcagatttgaaatttcacgcaatagagacgatatggctgatgatgatgatgatgatgacaacactgatgaagatatgtctgcagaggatgatgaggaggttaatgaagatgatgaagacgaagatgaggagaataacaatttggaggaagatgatgcccatcagatgtctcatcctgacacagaccaggaagaccgtgaaatggatgaagaagaatttgacgaggatctactagaagatgatgacgatgaggatgaggagggagtcatccttcgcctggaggaggggattaatggcattaatgtgtttgaccatattgaagtatttggtggtagcaacaatttgtctggggatacactgcgtgtgatgcctctggacatttttggtacaagaaggcaaggccgaagtacctccatatacaatcttcttggcagggctagtgatcatggtgttcttgatcacccacttcttgaagagccttcctcgacattgaatttttcacatcaagaacaaccagagaatcttgttgagatggctttctctgatcgaaatcacgaaggtagctcctcccgtttggatgctatattccgcagcttgcgaagtgggcgtaatggacatcgctttaatatgtggctagatgacggtccacaacgcaatggatctgctgcccctgcagtacctgaaggcattgaagaattgctgatctctcatttgagtcggcccactcaacaacctggtgcccagactgttggtggtactcaagaaaatgaccaacccaaacatggctcagctgctgaggcaagggaaggatcgccagctcagcaaaatgagaacagtgaaaatacaacgaatcctgtagatctgtcagaaagtgctggccctgcacctcctgatagtgatgcacttcaaagagttgtgtccaatgcaagtattgagcatgctacggagatgcagtatgaacgcagcgacactataacacgtgatgttgaagcagtgagccaagcaagcagtggcagtggtgctactttaggggagagcctcagaagtttagaggttgaaataggaagtgttgaagggcatgatgatggtgaccggcatggaacttcaggggcctcagaacgattacctttgggtgatattcaagctgctgctcgatcacgcaggccatctggaaatgctgtggctgtaagcagtagagatatgtctctggagagtgttagtgaggttcctcaaaatccagatcaagaacctgatcataatgctagtgaggggaatcaggagcctagaggggttggtgctgacacaattgatcctacatttttggaggctcttcctgaggacttgcgagctgaagttctttcttcacgtcaaaatcaagtgactcagacttctaatgaccaacctcagaatgatggtgatattgatcctgaattccttgctgcactcccccttgatataagagaggaggtgctagctcaacaacgtagtcaaaggatacaacaacaatcacaagaattagaaggacaaccagttgaaatggatgctgtttcaattattgcaacattcccttcagaaattcgggaagaggtccttttgacatctcctgacaccctcctagctacactcacacctgcactagttgctgaggccaacatgttaagggagagatttgctcatcggtatcacagtagttctctttttggtatgaactccaggaacaggagaggtgagtcctcccgacgtgacataatggcagcaggacttgataggaacacaggtgatccctccagatcaactagcaaaccaattgagattgaaggtgctcctcttgttgatgaagatggccttaaagctcttattcggttacttcgagttgttcagcccctatacaagggtcagctgcagaggcttcttgtgaacctttgcacgcatcgggataacagacaggccttggttcaaattctggtggacatgcttatgcttgatctgcaggggttttcaaagaaatcagtagatgcatctgagccaccatttaggttgtatggatgccatgcaaatatcacatattcacgtcctcaatcttcaaatggtgttcctccattggtttcacgtcgtgtgctcgaaacactgacaaacttggcaagaagccatccaaatgttgctaaactcttgctctttcttgagttcccttgcccatcaagatgtcgctctgaagcacatgatcataggcatggcaaggctgttctagaagatggtgaagaacggaaagcctttgcggttgttcttttgttaactctgttgaatcagccactttatatgagaagtgtagctcatcttgaacagttactaaacctccttgaagttgtcatgcataacgctgagaatgaaattaatcaagctaagctagaagcgtcatctgagaagccatctgagaatgcagtgaaagatgtcaaagataacaccagcatttctgattcatatggatcaaagtcgaatcctgaggatggtagcaaagcccttgctgttgacaataaaagtaacttgcgagctgttctgcgaagtcttccccaatcagagcttagattgctatgttcattgcttgcgcatgatggattgtcggacagcgcttatctccttgtaggtgaagtgttgaaaaagattgtggctctggcccctttcttctgttgccatttcataaatgagcttgcacgatcaatgcaaagcttgacattttgtgcaatgaaggagcttcgtttgtacgagaattctgaaaaggctcttcttagttctacatcagccaatggaactgcgattcttagagttgtgcaggctttgagttctcttgtcagtactcttcaagatagaaaggatccagaacagcctgctgagaaggaccattcagatgcagtttcccagatttctgaaattaacacagcattggatgctttgtggttggaattgagcaactgcataagcaaaatagaaagctcttcagagtatgcatcaaatctaactcctgcttctgcaagtgcagctacattaacagcaggagtagcacctccattgcctgcaggaactcaaaacatattaccatatatagagtcattttttgtgacatgtgagaagttgcgtcctgggcaacctgatgctgtacaagaggcttcgacttctgatatggaagatgcttcaacatctagtggtgggcagagatcatattcctgtcaagctagtcttgacgagaagcaaaatgcttttgtgaaattctcagagaagcacagaagattgctgaatgcattcatccatcaaaaccctggattactggagaagtcattctcgctgatgttaaaaattcctcgcctgattgattttgacaacaaacgtgcatatttccggtctaaaatcaagcatcagtatgatcatcatcatcataatcctgttagaatttctgtgcgtcgttcatatattcttgaggactcctacaatcagcttaggatgcgctctcctcaggacttgaagggtagactcactgttcattttcaaggagaagaaggaattgatgctggtgggctgacaagggaatggtaccaatcgctttcacgagtcatttttgacaagagtgcccttctatttacaacagtcgggaatgatttgacgtttcaaccgaatcctaattctgtatatcaaactgagcacctctcatactttaaatttgctggacgagtggttggcaaagctctcttcgatggtcagcttttagatgctcattttactagatctttctacaaacacatacttggtgtcagggttacataccatgacattgaagctatcgatcctgcatactacaagaatttgaaatggatgctcgagaatgacataagtgatgttttggatctcaccttcagcatggatgcggacgaagagaaactgatattgtacgagaaggcagaggagggcgtaacatcagggttactgaggagaataaacatcaatatgtagatcgggtagcagagcatcgactgacgactgcaatcaggcctcaaattaatgccttcctggaagggtttaatgaactcattccacgggagctgatatctatcttcaacgacaaagagcttgaacttctgattagcggtcttccagatattgacttggacgatttgaaagcaaatacagaatattctggctacagcatagcctctccagtcatccagtggttctgggaaatcgttcaggggttcagcaaggaagacaaagcccggttcctccagttcgtcactggcacttcaaaggtaccgttggaaggttttagtgcacttcaagggatctctgggccacaaaggtttcagatacataaggcctacggcagcacgaaccatctgccttcagctcatacttgctttaaccaactagacttgcctgagtacacatccaaagagcagctccaggagcggttactattggcaatccacgaagcaaatgaaggtttcggatttggctaatcagttatactcgtttgtccgtgccctgagaactgcaataggcgagcagcacgtgtgtggctgatcacattatgaactccacgtgtgtgatgagagatggccggagagaacatgtccaggatagacgaatgcccgtgggagaggtcatcttacgctggaatgttatacctcccctaatctgttaaaacaactgtaaattccgaaggactatttattctaatattattagagcgaaaattctctctttcgctctcccaatcctgtccatctcctactgcctcttattccgtcgtctctctcttacgcttcgttctttcagttatatataaaacctttgtcattaatgttgttattgtgtggccgctccggccttttttgtgtcg

SEQ ID NO: 217011 - DNA, 4429 bp, Zea Mays
ccgccgctccaggccgcagctcctccgccacagctccaggccgccgcttggccgcgccaggccgctgctcggccgcgccaggccgccgctcagccgccagcagctccaggccgcgctccaggccgctcccgctgtctgccggccactacagagacagccaaccctccagccctgcttcactggtgactggtgagtggtgagtaccatcttaatttgttgaaggaagaaggattgaggtgaggtgcttcctgctgtcatctgaacatatgcattcactggtgactggtgactggtgagtggtgagtggtgagtggtgagtaccatcttattgcagaatagattggaggagaaatggctgattttagcacggaagcatctgcagctggctctcaaatacgaagtgatggatatgatccactgaaagatccaaaaaggaaacccaaatctgatgatccaggctggaagtatgcctattatgtagagcctggcaagcgagagttgatccaatgcgccctttgcccgaggaaaattaaaggaggaattctgagggtgaagaaacatcttgtgggcggattcttgaggatgatgaagatgaagatgatgttgatgagggtgatgagaatgaagatgatgatgatgctgttgatgagggtgatgagaatgaagacgatgacaattttgtgcttgacgaccttgacatggatgatgaagaagaaacaaacaatagtggtggccgtggtgatgagcaagacaaggatgatgttggtttagatgatttggatgatgactgcccccgcctctacacccgccatccagcccgcacgtcgcaatcccgtcgcggccgccgcgaaccactcgcccgcacgccctacgcccatccgcccgcccgcacgctgcaaacccagccgcgaccatggcgaaccgcccgccctaccgcccggtcgggccaggcggcgtgtcaatctctgagatctacagggacgcacgacgctgccgatggcgaaacgaggaaaatccgcacctcggctccagatccgcccgtagccgccgttcggcttccgtggaacccaccggcgccggcagtccccacgatcattctgatctcgctcgctgcgctcctcatccgcatgctggtttccgtgggcccctactccggtcagggtgcggcgcccaagttcggcaactatgaggcgcagcggcactggatggagctcacactccacctcacgcccgccgactggtaccgcaacacctccgacaatgaccttgcctactggggcctggactacctgtccctctccgcctaccagagcctcgtccacgggcagctggtgccgtggtcgagcttggacccgaacttctcaaccgggggcaactttgagttcgccttcaacgaggccaacttctccaatcaggaattgcagattgaggtcatcgcgggggacgatgacgcgccggggtctaggggcgacgatgctggaggaggtggcctcgccgactgggcgcgccattgcaagcaccgacgctgggagttcttcaaggagaaagggagttgtgtgcctcattattttggtgtaaactctgattttcgtaggtacacgacaatataggttataatgggaaatgaattggagaaggatgaagaggaatttcaatttggagttgctgcgatgtacatcaataggagaagctttcctgtaacttgtatttgcccagaagattgaactcctagcggctcacctgagggtcaagcaagtgaactacatcaggcttcctgaccatcctgggcaggctttacactattctcagactgcggctgctctcctctccagcagctcggggcgcttgattgacaatcccgacccttatctctgcggtggagccttgaagctctgctcatggacgtcgaaaaatcataggaccctcatgatgccagtggcaactagctaggaatagtgctattagtgtcgtgctgtatgtgtcaaggttattgcatttctcgtgcgactacaaaggatgacagaagaaattaactaaatgaaaagtattgttctttagttcaggagaaaatgacgatagtttaatttattcatattactataatatgcaggtcctgaataccagcgcatctaattaagaatttctaaatgtgagtcactgcaagcaacctctctgacgccttccttgcctcttgttttgcacaaagtgttgtttcgtatcgattttcacattaacatgattattgtttccaattcccaactatgattttgttcttggatcaagaatgaacaatagcccttttggtgctagataaaggaccaacctcccatcatctagcaccaacaactttttgcccttttccttttggtcctgttattttcttttgcataggatgggatggaaggcacaaagcttgtttgcgtatcgtcttcccttgtcttgagttctagagaggtccaattgagttttagtagttgaacctcaaggaaggcacatcttctttgtgcgcttattgtattggttgtcagcatctttgacaagtcacatattggctcttcaaaatctgattttggttctatttctaacaaagcagtgggagacatggcacaactaggttgctccctctttagtttttaacatgtttggcttccgagcaaactttctccagaccccaagaaaatataagatccgatcagatatgtgtcgatgctcatctcagcgtactcccgttgcaacgggcacacacccagtacagctgatatccggaacgagcccgctcggccaaatcgaccggacctgagcgctctcgttctctctactcctccgttctctctcacgcgagcagtgcatccttgagccaccgccgccgtgaggagctccgcccgtccgccgtcatccgtcaaatcagggagcttcacagtgatggatctgaagagaagtgggaaatggcagaaaagacccggcagctaggtggccatttggtacaggcgtcggactcccaggaggatgaccggtggcaagaggttcggcggcgggcgggtgccgacggggaccccgtccctcgcgtggtcgtccgtcgtcatcgtcgcctccctcctcgttggcgcctccatcgtccacaacatctacaagcctgacatgaccattccacctgtggagggtgccgccggcggcggcggccaagaaagctgagctacgaatggctggacactgcatgcaagagaggaggctgggcatgggagtagtgagggaccggccatcagcacctttttttttttgttctagaacaaaaacgatattatgttgttcttttctgttttgctaccaaaagatgtgaggctgcatagtatttgcttcgttaggcgctactggtcacgcgtaaccatggtatatgtacgttgattttgttttttctaatgcctaataatcactacactcaaaatgtacgggcttgtggtggcactgcggcgggaggtggttggttggttccacttccatccaggctgctccgtggatgcgacggtgattcacgagcggatacgcaagtgtagctgtggcctgcacttggggccggattgtgacccattatcaggcttaggcctgcgtgcggggtcgtttgccgttgtgtacacatggaagaacggggcaccaagtcttgcttccattgccgccgccccttccgtgcacgcgcgcacggcgcacctatacatatgcaccgccccatgccccgcacgccctccctctcccagcgacaccagagagccgaatttacttcgttctcagcctccgttgcccctcgcgcgcgttacgctgtaccaccaggctcgatcggtcgatcctttgctgggcgtcagagaagcatggcagcagctggcaagtcgtcggccatggaggaggtggtggcggcggcggattgactggcaggccgttgacaggggcatcgcctacctgctcatggtggccacgtacgcgcttcactagagccgtcttggcttcggtctgctccggccggcggcagagatcacgggaaggaaggctttgtgagctctgcttcccggcctcagcgtgagagttcccccgcgccaaacttcattcgtttctcttccactcttcctcttgtatggagatggagatggagatatgcctgtgtctttaccactagaaaaaaatgttgttttttctattgtctttctgtgattattctgtgcaaaatggtcaattgttgccaaaacgatcaatgttaccatggtttcggcttgcgtctatcttctgttgtgattgggttcgacattcagagtttgcacaaggccatacatagcatacatatatggcagagtttgcagcgtgaggaaaactgtcatcgccgtgtattttagcattatacataacataccccatccgttcattccaataggcatataagctacca

SEQ ID NO: 217012 - DNA, 3241 bp, Zea Mays
ctcggcgtggctcacacggcaggaggtcgatgacgtggcgaggttcccctagttcatcgagatcatcccgaacaagagctacaagcttatttccgacgacgcgtcggcttcttcgcagctatcatggcttgacaatgttagggatggcgtgtggtgcaagggcaacatgggtgaggttatgatcattggcatccttgacgcaggcatcaccaccataggccaaatcaatgccaactccaaagccaaagggatgccaccgcctccggtcaagtggaaggacaggtgtgacaataaccaagcatgcaacaacaagttgattgggttcaaaacattcgtagataccagtgatacgtgtgggaattccctgctgcagcgcgcatccgttcttggaatcgagtacgacaaggcgttcgcggtggcgcccaaggcgcacctcgtgatgtaccatgtgtgcgacgaggagtgccaccccaaagaagtaagagcagggatggactccgcggtggacgacgacgtcgacgtcatatcgatgtccttcaatggcaccgaggacaacatggtgttccatgacgatgtcgtgaccgcaccgtggtataatgttgtcgcccaatgcctcttatatgacctcactgtcggtgagttcatcccgtatctatgcgttatgagcctcgatgcggaccggaaatgcaagatcgtggagccgacgcacgcctcgtgcgcggagatcggggagatcgcgacgaaggacctaaactacccttccatcatgatcttcacgggcaacgacgtgtggcaagtggaggcgaagcagtcagtgaccaagccatacatggcccagtgcaagtggcctgggcccctaaaaatctgagggcctccaactcttaatgtgttggatactttagtatgtctaaatagggagatatactcacatacagaaaatgaacacgaaccgttataccgcgcgatacaaaggctaggatagcgccgtcgccgatcctttgaggcataaggtacctatcgccgattagatagctcttatatttagcacgtctcaatagtcaccttcacctctgtagtcaacacgtaacatcaacatctaagagcaaaccaactaggttgtaggcaagaatttaaaccttacatggggaagtggtgacttgatcatcaattgattcctccagcatcacgtatgtattaggcaataaaaccactagtatttttaggtgattacaataaactaagccccattaattaaataatgtattcattttactaggtgtgtactagtttaattaattactttggcccttgttcctcgtgaaatagagagataaattttatcgtcacaactttaaaaataaaaatatcatttgtatgaaaagtcaacaaagacctaagtctgtgtttcactctagggctcaaaaaatataattatgggcctgacgctgacgaacgtgggggagcccgagaagacaaacagagcataggttgacgtagcggtgaacccgtcgactctggtgttcagagacatttgccagaagagggacttcgttgtcacggttagagatgacaatgggtacccgaaacccgaaatccgatgggtaaaaaccctattagggcatgggtatggcagattttgatacccatggatattttattgggtcatttgttatgcccattaggtacggtgggcgtgggtatgttctttgttgcccccatactcgctacccgatggggaacccgctaatatatgatacatgggtccagattcaaatattaagtattgtgtattgaacaattagatttgaagacatgattttgtccacagttttgtagaatcaatgctatgttttgtgtgatttgaaggcatgatggtgttatttagtggcttactaaatgctttcttgttttcgttattttttatttttcctctatattggttctttcttgtgctgcacatttgttgttttaggtggttatttagtatcacttttacatttttggcagatattgttgagcttaaccttcttaagacaactaagattacttttaagaatggcaaggatgatctgatgaactttgagtccactattaagcctgatgaaggatactacatgtaagtggtcctgaggagaatggcgtaattgccttatgctattcacaacatatatattcatcatgtacgttactcattctgtcctaattttacatgtagatatcccatcgtgcatctactatgtatatattgaaaatggaattgaactgtttgcaaatagagttttgagcatgaaagggcatactcttgttagggtgggttttgttatggattttgatatgtttggacaaaatagaattatatgctttgctagatattcttgggtttcatgccatattaggctttgttcggttatttcaattccacgtggattgaagtggattgggtgggattgagatgtattttgacttgctatggatttaaaccgactaaatctcacccaatccacatggtttaatagcaaaacgaacaagccgttatagtgttaggacgcatccttggacacctaggctctgtctgggtgatgactactcaacaccattaatagtatttttcttgcttatcatcatatcacaatgttcctaattgcttgccgaagcaaaccgaggatatttccccttttgtcttttggtggtttgctcttttagttgggttggtgaacatttgatccttagatattgcttttactcaaaattagaagcataattttgtggattttttcaccacggaggaaccgaaatttgttactctgaagttcgagttatgaactcaagactacctttattttttttatttttgtttcccctattcaatataatgccttattactaaccttgttttctaatgtgcaaatgcttattgttaggggtggaaaatttatttttactttccaagtttacctgcatgaacctccaaaagtcaagtgcaagactaaggtttaccatcccaatatttacttggagggaaacgtatgcctgaatagtctgcttgaagactggaagcctgtcctgaacatcaacaccattgtgtacatggttgaatcttcttttcttgcaacctaatgatgaggatcccctgaaccatgatgcagcaattgttctctgtgatgacccaaaaaagtttgggaagaatgtctagcaggcgatggctagatgatacattggtgaaacccacttccctcggtgt

SEQ ID NO: 217013 - DNA, 4115 bp, Zea Mays
gccctcattcctgtctacagaagtacagctaacaaaacaaaatacaggtgttggtggcgctgacgggaatgcctccatatggccggtgactgctgcgccatgcttcgatgggtcgctattagctgtggttacggtctctgaatacctcgcgctgcgacgagatttcagcggcggcggcgtctaccagtccatgtccatccagcagggttcagtctgtgtgagcaaggacgcttcactttcagtgctctctgtctgtaagttgtcacaacctactcgcatatccatgcgcgtcggcgttgcacgcatacagccatacaggggaaaaaagaggagaggagaaatcggcccagttgcacgcagcgaaggtagccgaagaaaaaaaaaattctcccgttcacctcgcctgcgggacaactggggcaacagccgccggccggtgccccctcccccctacgcccagctgcccagatccgagccctttgcccggcgattacaccaggaatgaagcgttttgtctacataaatgatgagtcttatcagaacgactactgtgataaccgggtttctaatacaaagtataccttattgaacttcgtgccaaaaaacctatgggaacagttcaggcgcttcatgaatcaatatttcttgttgatagcttgtctgcaactatggtcacttatcactcctgtaaatcctataaacaagcgaatgataaggaagtgtggattgttaagaatggtgcccggaaacacattcaagctcaagatatccgtgtcggtaacatagtttggattcgagagaatgaagaagtaccatgtgatcttgttttgttgggaacttctgaaccacaaggcatctgtcatgttgagacagctgctcttgatggggaaattgatttgaagacaagagcaagcccaccaccatgcgtagggctggagtttgaacagctgcacaaaataaagggtgtgatcgagtgcccaataccagataaagacatacgaagatttgatgcaaacatccgcctgtttcctccattcattgataatgacatttgcccattgactattaataacacattgctgcagtcatgctacttgagaaatacagaatgggcttgtggtgtagcagtttatacaggcaatgaaactaagttgggaatgagtaggggtgtcccagaacccaagctaactgctatggatgcaatgattgataagcttactggtgccatattcttatttcaacttacagtcgttgtcgttcttggggctgcaggcaatatttggaaggatatggaagctcgcaagcaatggtatgttaagtatgatgacaatgaaccatggtatcagattctggttatacctctgcggtttgaactattgtgctctattatgattcccatttcgataaaggtttctttggactttgttaaaagtctctatgcaaagttcatagattgggatgatgatatttatgacctggaaaatgacacacctgcccgtgcagcaaacacagcaattagtgaggacttgggacaggttgaatatattttgacagataaaactgggacattgactgagaacaagatgatcttcagaaggtgctgtattgggggtaccttttatgggaatgaatctggagatgcgctcagagacgttgaattactgaacgctgtcgccaataattctcctaatgtcatcaagtttttgacagtcatgacactctgcaatacagtaattcctataaaaagtcctactggaccaattttgtataaagcccagtcccaggatgaggatgccctggttaatgcagctgcaaatttgcatatggttcttgtcagcaagaatggaagcaatgcagaaattcacttcaaccggcgagtgatgcaatatgagatacttgacattcttgagttcacatctgaccggaaaagaatgtctattgttattttggattgtcagagtggcaagttttttctcttgtccaaaggagctgatgaggcaatgcttccttgtgcttattctggacaaaagacaaagacatttgttgatgcagttgacaaatatgctcagctggggttgcgcacactctgcttgggatggcgtgagctggaaccagaggaatacactaaatggtctcaatcatttaaggaggccaatagctcattgaatgacagggagtggaaagttgctgaggtttgccaaaagctagaacatagcttggagattctaggtgtcagtgcaatagaagatcgcctccaggatggggtaccagaaactatcgaaatactgaggcagtcaggaatcaacttctggatgttaactggtgataaacaaagtactgccattcaaattgctcttttgtgcaacttgatttcttcagaacctaaaggacagctcttgcatatcaatgggaaaactcaagatgaagttgctagaagcttggaaagagttcttcttaccatgaggattacgtcatcagagcctaaggagctggcttttgtagtggatggctgggcactagagattattctatcacgctatactgaagcttttactgaactagcagttctttcaaaaactgcattatgctgccgtgttacaccttcacaaaaagcacagctagtgaagcttctgaagtcatgtgactatcgaactttggcaatcggtgatggtgggaatgatgtaaggatgatacaacaggctgacattggtgtaggaattagtggtagggaaggtcttcaagctgcaagggctgctgactatagcattggcaaattcaggttcctgaaaaggttgattcttgttcatgggcggtactcctacaatcgcactgccttcctgtcgcagtactctttctacaagtcattgttaatttgctttattcagatacttttttcttttctttcaggcattgctggaacaagcttattcaactcagttagtttgatggcttataatgttttctacacaagcattcctgttttaactactgtactggacaaggatttatctgaaaagacagtgatgcaaaatccagagatattactttactgccaagctggaaggcttctcaatccaagtacctttgctggttggtttggtcgatcattgtatcatgcaatcattattttcttaataaccatccatgcatatgctaatgagaaaagcgagatggaggagctctcaatggttgcactctcaggaagcatttggttgcaggcatttgttgtgacgttggagatgaattccttcacatctgtgcaacttctggccatatggggaaacctcattgccttctatgtcctcaatttctttatcagcagtatacccacttctggaatgtacactatcatgttcggcctttgcagacaaccgtcatactggataacgctggtgttgatcagtggagttggaatgggtcctgtattggctctgaaatatttcagatatacatacagacctagcgtgatcaacattcttcagaaggccgagcgttcacgggggccaatgtacaccctgctgaatctagagtctcagttgagatcagacaaagatagtatgatggtagccggttccacagcgccagccaagaataagagctctgtttacgagccgttgctttctgactccccgatggcatccaggagatctcttgcaccagcatcttcatttgatatcttccagccagcacattctagaacatctcacccaagaaacataaaagccaattaattttttggaacaacagttaactcgtaacagtatggcataccagaatgacaaaaaaaaaagatgtcagtcgaattagatatgttgcatatttctgttaatgatttagtagatattgcccaaaaagatataacgaaaagtcatacttaatcctttatagctgttagcaaaaatgggtagtgaccatttatgttctctatggggaataaattaatttctccaatccaccagatgcaaaaaaataaacttatgtcccagtcataccaaaaagacttgcgttgtctccggacccatccaattttaaattgcgatgtgctgtcgggcccaaattatgtgttgctgctgcgttttccctttcgctttccccagtttcactcactttttgcc

SEQ ID NO: 217014 - DNA, 4250 bp, Zea Mays
atgggcgtcgcgccctcattcctgtctacagaagtacagctaacaaaacaaaatacaggtgttggtggcgctgacgggaatgcctccatatggccggtgactgctgcgccatgcttcgatgggtcgctattagctgtggttacggtctctgaatacctcgcgctgcgacgagatttcagcggcggcggcgtctaccagtccatgtccatccagcagggttcagtctgtgtgagcaaggacgcttcactttcagtgctctctgtctgtaagttgtcacaacctactcgcatatccatgcgcgtcggcgttgcacgcatacagccatacaggggaaaaaagaggagaggagaaatcggcccagttgcacgcagcgaaggtagccgaagaaaaaaaaaattctcccgttcacctcgcctgcgggacaactggggcaacagccgccggccggtgccccctcccccctacgcccagctgcccagatccgagccctttgcccggcgattacaccaggcctgcccagctgacctcacctggacaatcaagctgaagagaaatatcatagtgtgcatggtttttcaggaatgaagcgttttgtctacataaatgatgagtcttatcagaacgactactgtgataaccgggtttctaatacaaagtataccttattgaacttcgtgccaaaaaacctatgggaacagttcaggcgcttcatgaatcaatatttcttgttgatagcttgtctgcaactatggtcacttatcactcctgtaaatcctgcaagtacctggggcccacttatatttatctttgctgtttctgcaaccaaagaggcatgggatgactacaacaggtatatttcagataaacaagcgaatgataaggaagtgtggattgttaagaatggtgcccggaaacacattcaagctcaagatatccgtgtcggtaacatagtttggattcgagagaatgaagaagtaccatgtgatcttgttttgttgggaacttctgaaccacaaggcatctgtcatgttgagacagctgctcttgatggggaaattgatttgaagacaagagcaagcccaccaccatgcgtagggctggagtttgaacagctgcacaaaataaagggtgtgatcgagtgcccaataccagataaagacatacgaagatttgatgcaaacatccgcctgtttcctccattcattgataatgacatttgcccattgactattaataacacattgctgcagtcatgctacttgagaaatacagaatgggcttgtggtgtagcagtttatacaggcaatgaaactaagttgggaatgagtaggggtgtcccagaacccaagctaactgctatggatgcaatgattgataagcttactggtgccatattcttatttcaacttacagtcgttgtcgttcttggggctgcaggcaatatttggaaggatatggaagctcgcaagcaatggtatgttaagtatgatgacaatgaaccatggtatcagattctggttatacctctgcggtttgaactattgtgctctattatgattcccatttcgataaaggtttctttggactttgttaaaagtctctatgcaaagttcatagattgggatgatgatatttatgacctggaaaatgacacacctgcccgtgcagcaaacacagcaattagtgaggacttgggacaggttgaatatattttgacagataaaactgggacattgactgagaacaagatgatcttcagaaggtgctgtattgggggtaccttttatgggaatgaatctggagatgcgctcagagacgttgaattactgaacgctgtcgccaataattctcctaatgtcatcaagtttttgacagtcatgacactctgcaatacagtaattcctataaaaagtcctactggaccaattttgtataaagcccagtcccaggatgaggatgccctggttaatgcagctgcaaatttgcatatggttcttgtcagcaagaatggaagcaatgcagaaattcacttcaaccggcgagtgatgcaatatgagatacttgacattcttgagttcacatctgaccggaaaagaatgtctattgttattttggattgtcagagtggcaagttttttctcttgtccaaaggagctgatgaggcaatgcttccttgtgcttattctggacaaaagacaaagacatttgttgatgcagttgacaaatatgctcagctggggttgcgcacactctgcttgggatggcgtgagctggaaccagaggaatacactaaatggtctcaatcatttaaggaggccaatagctcattgaatgacagggagtggaaagttgctgaggtttgccaaaagctagaacatagcttggagattctaggtgtcagtgcaatagaagatcgcctccaggatggggtaccagaaactatcgaaatactgaggcagtcaggaatcaacttctggatgttaactggtgataaacaaagtactgccattcaaattgctcttttgtgcaacttgatttcttcagaacctaaaggacagctcttgcatatcaatgggaaaactcaagatgaagttgctagaagcttggaaagagttcttcttaccatgaggattacgtcatcagagcctaaggagctggcttttgtagtggatggctgggcactagagattattctatcacgctatactgaagcttttactgaactagcagttctttcaaaaactgcattatgctgccgtgttacaccttcacaaaaagcacagctagtgaagcttctgaagtcatgtgactatcgaactttggcaatcggtgatggtgggaatgatgtaaggatgatacaacaggctgacattggtgtaggaattagtggtagggaaggtcttcaagctgcaagggctgctgactatagcattggcaaattcaggttcctgaaaaggttgattcttgttcatgggcggtactcctacaatcgcactgccttcctgtcgcagtactctttctacaatttttcttttctttcaggcattgctggaacaagcttattcaactcagttagtttgatggcttataatgttttctacacaagcattcctgttttaactactgtactggacaaggatttatctgaaaagacagtgatgcaaaatccagagatattactttactgccaagctggaaggcttctcaatccaagtacctttgctggttggtttggtcgatcattgtatcatgcaatcattattttcttaataaccatccatgcatatgctaatgagaaaagcgagatggaggagctctcaatggttgcactctcaggaagcatttggttgcaggcatttgttgtgacgttggagatgaattccttcacatctgtgcaacttctggccatatggggaaacctcattgccttctatgtcctcaatttctttatcagcagtatacccacttctggaatgtacactatcatgttcggcctttgcagacaaccgtcatactggataacgctggtgttgatcagtggagttggaatgggtcctgtattggctctgaaatatttcagatatacatacagacctagcgtgatcaacattcttcagaaggccgagcgttcacgggggccaatgtacaccctgctgaatctagagtctcagttgagatcagacaaagatagtatgatggtagccggttccacagcgccagccaagaataagagctctgtttacgagccgttgctttctgactccccgatggcatccaggagatctcttgcaccagcatcttcatttgatatcttccagccagcacattctagaacatctcacccaagaaacataaaagccaattaattttttggaacaacagttaactcgtaacagtatggcataccagaatgacaaaaaaaaaagatgtcagtcgaattagatatgttgcatatttctgttaatgatttagtagatattgcccaaaaagatataacgaaaagtcatacttaatcctttatagctgttagcaaaaatgggtagtgaccatttatgttctctatggggaataaattaatttctccaatccaccagatgcaaaaaaataaacttatgtcccagtcataccaaaaagacttgcgttgtctccggacccatccaattttaaattgcgatgtgctgtcgggcccaaattatgtgttgctgctgcgttttccctttcgctttccccagtttcactcactttttgcc

SEQ ID NO: 217015 - DNA, 3538 bp, Zea Mays
cacgctaccaatcttataagccgaaagcaacactgcatgttttctttatgtgcgggcaacgccatacatctgatggctcccatggaggaatcacaggggacggtcgatgcctgttcaggtccgtcgcctacggcgcctgcctgaggagaggaaagcatgcgcccagcgacagcgcccagaaggaactggccgacgagctccgagccaaagtagctgatgagttcgtcaagcgaagaggagacaccgaatggttccatcctctttccattactgcttttatgatatatgtattattagtttccatggacgtactatctgtttctgcatacagactatatattcccatacagcaactttacacatttaatttgttgatagatgtccttccatccttaataaagatctaatgtcaaaagaacatgctccagctcccaatatacaaagacgactatgtcttattaactcctttccaatcttaggttccttgaaggcagctttgagagttatgtgagacagatgagaaagcctcatgcttggggaggggaacctgagctgttcatgtgttcccacgttctcaggatgcccatcaccgtctacatgtatacgggcagctccgacggcccaaggatcatagcggaatacggccaggaatacggaaaggacgatccagtccgcgttctctacgacggctacgggcactacgacgcactccagccatctctcgtaagaacacaatcatcgagactgcgaggtgtgtaggtcaccgggggctgcgctgcctaagcttcttctacaggacagctgcgtaactgcgagcagctcaagatttgacgacgctatttttttactccagttccacacagccgtatagccaatacgaaactatgcctggcggctttgactgtaccagccttttctgttcttcaacgtttgatgtataaataaacacacacacacacaaaaaaaaactcgtcacccgagtcagaaaatcagttgagctactacctggtaccatgcccagcatcgagtgaccgaccgtgtaaagtttcttcgatcgtttttgctcaacaagaatgctgcatagaaaaaaaaaagctgaataatgctcaagttgtcatactaaaattctcttggacttcgtatggggtggcatgaacgctcggtcagtgctcggtttctgagttacggtcttgtcaaaatccagtgacacacaaaaaaaaagatgagctcgatgaaaaatggagcacagatgatattcctacaacaattttaccagcaacaacaatcccagtcgcgttgaaagggaggacttctttacacgaaagccagagccaccgcgtcgcggtaactaaattacaacatcgtcctacttgttatctcctagtcttcaagccgttggcaccccggtcgctagtccgtggaacaaccaagaaaagaggaagctgagtcatggaagccgctccacatgtcacgcacttctgcccgcggcctggtctcctgaagcaacagctctggtttaacagtcacattgttacggcgtaaaaaccctcctccgtctgcttctccagcatcagcagcagctcttgttgcctaggcaacagcagtttgcttggtcgtgttttagcttctgcaaggatccatgtttttttaggcatggtaagagatagtgtatttttgtttgtaggcatgtcgagataaagactcaagtcacaaatatatatatattttttgtttgcacaccaagcgatacgtacgtacctcaacttggtccttgagctctttgatgtactccacagcaaggtccaacatgtccgacgtattcgtttgctgcgtgttcacgagaaacaccaataaacacgctgacgaaaatgggcgatggcaacgaacaacaacgagaacaggttgttcagcaatcccgcacgggaaaaatctacggatgacgataatgaatggctatggctcattgcagatcttaagctcagcttaccttgtccatgttgggcacgaggtcttgcagcttcttcagcctcttgctgatcctcgtccttctttcctgaacgtacgccagcgaacaaggaaaacgaaattggtttctgtgctgacatccagctagcatcaaagctggcagagtgtggcaccatatattgcgccgtgcttttttttagcgaatcgtttgggaaggaccgaaggatcgagtagatgaactgaccctctcggcaatgctccgtgggtgagtcgcgcagccacgcctcgcacgcactctgcaggcgacggagtcctgctgcagctgcaggtagtcgtccatgccgggcagctccagggacgagttggacaggccgaactggacatacatacagcaaggccaaaaaaaaaacagctcactcccgtcagcatggaaccacgccgtcgatgatgcatgacgccggggagcggcaaagtaaggccagagctaggcacggaaagcggcgcgcgctgacctgcgggtcaatggtgctgaagttggtgaccatgtcgtcggcgccggcggcggggtccaccttgggcttcttgcagggggcagacgagaacatgatggagttggtgtcgtcccaggagccgacggagaaggtcctggagaggtaggaggaggactgcgcggcgtcgctggagctgttgcacccgccggcgcccacgatgctctccccgatgtcggccggtatcatccccatctccgagatctgcggcaggtcctgcctggagaagctccactgcgagctgagctgcgcgtggccgtggccgtggccggggcccagcgcggcgtcgctgcccgcctgcgtgtagctccccatcgctcctccgctcgccgccattcctgcagtgggcgcatccggaagatcgtcgaacacacgtcaaacaggtagactatagctgacccgtgcccgcatgtcagcgactgttcgtcgagcttgaggtaaaaggcattcttttggtatatttattttagtagtatcgttcctttttttcacgctttcttcctttttttcattttaagaaaaacaagaacattgtaccatcgatgatttttcttctttatcgcgttctagctagaaagtagttggatgaacggctggtgagtgctgctgacaagcgctgcccagcccccagcaggttcgccgtagctacagccggattcgcagcgggacggccaggaacggtcgccctcacgtcacctaggtcggcagcatataggccgcctttccgaaaaccgaaagagcagacaatggaggggacgggaccaatccgcgtgtatttgtttacgttaatttcatactgtggtcgcgataggattcttcggcaaggtgcgttgcatttgcactgcgcttgcgtactactgtgcgacgaacgatgttgcggcacggattcactaccaagggagctagggaagcattgttaatgagagccgagaacgctggacatgtgcgccggtgggtgggtgatcgacttcgcgtctcgttcggagctggagctggagctggagctggagaggagtattattcta

SEQ ID NO: 217016 - DNA, 3059 bp, Zea Mays
ccattactgcttttatgatatatgttccttgaaggcagctttgagagttatgtgagacagatgagaaagcctcatgcttggggaggggaacctgagctgttcatgtgttcccacgttctcaggatgcccatcaccgtctacatgtatacgggcagctccgacggcccaaggatcatagcggaatacggccaggaatacggaaaggacgatccagtccgcgttctctacgacggctacgggcactacgacgcactccagccatctctcgcgaggtgtgtaggtcaccgggggctgcgctgcctaagcttcttctacaggacagctgcgtaactgcgagcagctcaagatttgacgacgctatttttttactccagttccacacagccgtatagccaatacgaaactatgcctggcggctttgactgtaccagccttttctgttcttcaacgtttgatgtataaataaacacacacacacacaaaaaaaaactcgtcacccgagtcagaaaatcagttgagctactacctggtaccatgcccagcatcgagtgaccgaccgtgtaaagtttcttcgatcgtttttgctcaacaagaatgctgcatagaaaaaaaaaagctgaataatgctcaagttgtcatactaaaattctcttggacttcgtatggggtggcatgaacgctcggtcagtgctcggtttctgagttacggtcttgtcaaaatccagtgacacacaaaaaaaaagatgagctcgatgaaaaatggagcacagatgatattcctacaacaattttaccagcaacaacaatcccagtcgcgttgaaagggaggacttctttacacgaaagccagagccaccgcgtcgcggtaactaaattacaacatcgtcctacttgttatctcctagtcttcaagccgttggcaccccggtcgctagtccgtggaacaaccaagaaaagaggaagctgagtcatggaagccgctccacatgtcacgcacttctgcccgcggcctggtctcctgaagcaacagctctggtttaacagtcacattgttacggcgtaaaaaccctcctccgtctgcttctccagcatcagcagcagctcttgttgcctaggcaacagcagtttgcttggtcgtgttttagcttctgcaaggatccatgtttttttaggcatggtaagagatagtgtatttttgtttgtaggcatgtcgagataaagactcaagtcacaaatatatatatattttttgtttgcacaccaagcgatacgtacgtacctcaacttggtccttgagctctttgatgtactccacagcaaggtccaacatgtccgacgtattcgtttgctgcgtgttcacgagaaacaccaataaacacgctgacgaaaatgggcgatggcaacgaacaacaacgagaacaggttgttcagcaatcccgcacgggaaaaatctacggatgacgataatgaatggctatggctcattgcagatcttaagctcagcttaccttgtccatgttgggcacgaggtcttgcagcttcttcagcctcttgctgatcctcgtccttctttcctgaacgtacgccagcgaacaaggaaaacgaaattggtttctgtgctgacatccagctagcatcaaagctggcagagtgtggcaccatatattgcgccgtgcttttttttagcgaatcgtttgggaaggaccgaaggatcgagtagatgaactgaccctctcggcaatgctccgtgggtgagtcgcgcagccacgcctcgcacgcactctgcaggcgacggagtcctgctgcagctgcaggtagtcgtccatgccgggcagctccagggacgagttggacaggccgaactggacatacatacagcaaggccaaaaaaaaaacagctcactcccgtcagcatggaaccacgccgtcgatgatgcatgacgccggggagcggcaaagtaaggccagagctaggcacggaaagcggcgcgcgctgacctgcgggtcaatggtgctgaagttggtgaccatgtcgtcggcgccggcggcggggtccaccttgggcttcttgcagggggcagacgagaacatgatggagttggtgtcgtcccaggagccgacggagaaggtcctggagaggtaggaggaggactgcgcggcgtcgctggagctgttgcacccgccggcgcccacgatgctctccccgatgtcggccggtatcatccccatctccgagatctgcggcaggtcctgcctggagaagctccactgcgagctgagctgcgcgtggccgtggccgtggccggggcccagcgcggcgtcgctgcccgcctgcgtgtagctccccatcgctcctccgctcgccgccattcctgcagtgggcgcatccggaagatcgtcgaacacacgtcaaacaggtagactatagctgacccgtgcccgcatgtcagcgactgttcgtcgagcttgaggtaaaaggcattcttttggtatatttattttagtagtatcgttcctttttttcacgctttcttcctttttttcattttaagaaaaacaagaacattgtaccatcgatgatttttcttctttatcgcgttctagctagaaagtagttggatgaacggctggtgagtgctgctgacaagcgctgcccagcccccagcaggttcgccgtagctacagccggattcgcagcgggacggccaggaacggtcgccctcacgtcacctaggtcggcagcatataggccgcctttccgaaaaccgaaagagcagacaatggaggggacgggaccaatccgcgtgtatttgtttacgttaatttcatactgtggtcgcgataggattcttcggcaaggtgcgttgcatttgcactgcgcttgcgtactactgtgcgacgaacgatgttgcggcacggattcactaccaagggagctagggaagcattgttaatgagagccgagaacgctggacatgtgcgccggtgggtgggtgatcgacttcgcgtctcgttcggagctggagctggagctggagctggagaggagtattattcta

SEQ ID NO: 217017 - DNA, 4043 bp, Zea Mays
gttttttactgaacggagtagattactgatggggatgggcaagatggctggagcccactaatgtctatcgttggtgatattcaatcattgctcttgacaatcatgtgtgctgctgtcaagataatactatcgagaaaactctcatgctctggaacctcctatcaggttgaccacttggaatgttcctgtctcatagatgcagccattgcattttgcaagctccagcaccttgatcctacaatatccatcaaaactcaggttgacttaattgttgcagtccatgatttgcttgctgagtatgggctctgttgtgctggaagagatggtgaaggggaggaagggatgttcctaaagttcgcaatcaaacatctcatggctctagatgtgaaactaaaatctcaactcaattcaaatgggatggaagaagatgcagttccaaaagacgtcagagcagaagacagtgtggccgatgaaccatcggttagtgacaataagcagaactccgatgatgaggaagaatcggagttagatgagattcagtcatgtcttgatagtgccttggaccaggcttttttctgcctgtatggtttgaagatcaacccagattcttgcagtgaagatgatctcgctgtacataaaaatacaagccgcggtgattatcaaaccaaagaacagtgtgctgatgtgtttcaatatgtcctgccatatgcaaaagctctatctaaaactggcttggttaaattacggagagtgctgcgggctatacgtaaacactttccgcagccaccttatgacttatttgttaacaaccctattgataatttcttggatggacctgactcatgtgaaaaaatactctctgaaatttgtgaaagcaatgaatctagggaagctatcctgaatgtattgttcccaggtgaaagaggctatgaagcattcaaaaaactctccactgccagctctgagccttattcagatgtttatgagaacttatattatttcatagctcaagccgaagatattagtgccaccgacaagcatacaggttttgttttgaaaaaggaaggagaagaattcgttgaacagagtgccaatattttcaagtatgatttgttgtacaatccattgcggtttgaaagctggcagaagctttccaatctttatgatgaggtggaagttgatctgttgctcaatgatggtagtaaacatataagcatcttggattggcgaacaaacacggatttaatcagaagggttgagatgggccgtcgacatagtcgacgctgcctattgatgagttcactactggccaaaactgcccctgagcagagcgaggcacatgaactgttggctcttgtgtactacgatagccttcaaaatgtggtgcctttttatgatcaaagagctactttgccagtgaaggattcatcatgggagacattttgtaaaaattctatgaagcactttgagaaggcttttgaaatcaaggagcagtggcttcatgcgttttaccttgggaaactgtgtgagaaactggggcattctttttctaaggcattatcatactacaacaaagccatgatgctgaatccaactgcagtcgaccctgtttacaggattcatgcatcacgcttgaagttactttacactcaaggcaaacagaatcttgaagctatacaggttgttgctgactacacatataaccagtcaacaaaagaaaatgtcttgagcatgctggggtcaatgactaaggttttgcagtcatcttctgataaaacatctttagacactaaagaggaaaataagttttttgagtccgatatactggataaagtgtggcacatcctttatgatgattgtctgtatgctcttggtacttgtgtggaaggggaactcaagcatttccacaaggcgagatacaagcttgcgcaaggatattatagaagaggtgaagcaggggacctggaacgggctaaggaagagctctcgttctgtttcaaatcttctcggtcttcctttacagtaaacatgtgggagattgatggcactgttagaaaaggaaggaggaaaaatccaaatgtgggtggatccagaaagaatctggaggtcagtttgtcagaaagttcacggaaattcattacgtgcattagaaaatatatgatactctatttaaacctgctggagaagaacacggacctgtggactcttgagaaggcttatacttatctgcgaacagataagaggtttgcattgtgtttaggtgatattgttcctgttggtcttgggaagtatattctagttctaacggcagcaattcataatcctgagattcgtcgagcttctggtgatgcttctgttgagcaattacttgagaaaatgttcactgtattcatggatcatgcgaacatgtgggctgatataagcaatataccagaggtgaacagtccagaattatcagaaagcaatctttacagctatatccaccagtacatccatttgctcgagagtgatgtacgactagatgttctagaaggactaaacgagaagataagaaagcgtttcaagacaccgaagttatcaaatagtaacttcgctaagatatgcaagcatgcttctctggcatggtgccggtgtattctcatcaaactggcctcaatcactccactgcctgaatccgcagatgcaaccaatcagcctgcaccattatccaatgggcttctactctatgttgacttgcaacctgatgagcttcttatctcatcccctgatgggcctgctcaattcaaagggcttgacatgaactggtttgagacacttaacagaattaaaaacatcccggtcaagcaaacatccgaagataacttggagactgctgttacgttaatgaagagcacttataacttttatcgggagagcccttgtggaacatttccttcaggtatcaatctctacacggttacaccatcacaagctcctattgaagggctaccgccaaccgctgctgtagttgagacgctcgacttaagtattccaagaaaactccttctgtgggtatacactctggttcatggtcgttactcaaatatatcctccgttgtaaagtattgcgacgagatgaagttaagaagtaaaagaggaaccccagctgcgtctgcttcgtcacaagttgtgcagccagtgtcgcatagtaccgtttcttcccaagttgtatctaaagaaaagagctcccaagttgaacccgctgaagcagcacaaaatccttctgatctagctgccacttgcgttcctgcataccaagaagttggtggtgctagtgcctcgcaaagtgccattgaggcccagaaagctactgctgcggcatctcagctcactcgcagtggttcatcaagggcaatggaaaatgcacaggacggcggggagaggaagtaacgagatagagttcgattttttttatcctctatgctacatcgtatggatgcatatgatcctgcctgacgattctcaggtctcagctctccgtggctccgtgtgcaaatctctgccacgggcgtgttttaacgcctgattggatggttgcccgctggcgcgcccggccagcctcgtacggccacttcggacgcatctgcatcttcggaggtacccgcagatgtagatgaatggccgtaaaatggtttggtctgcgtctctttacatataaccaaataaaaactcagataaagttaactcatgtggtggtctatgttgagatgatgcgggtaaccaatcgaacggttaacaaattcaggtcgtatgtatatcctggtttacagttagtgtttcctaagtgcatttgtagattatagagctgtcaagattgaacgatacatctgtaaggtgttacaaatgctaaatgctaatcctgattttgtggctgatgctaaaaacctgtggactcttaattaccacagactgaactttccctcattttggcccaacaaatacaatagcagaggaagagtttcagttggatttggtggaacggtaggagcgtaaaatatcacttt

SEQ ID NO: 217018 - DNA, 6162 bp, Zea Mays
cttctctcatcctttttattaatggtttttgacattgaaaaatcttgcatctgttttccttcaacaaggttttgagttctacgataatgctcttcactgttacctacaagctgtagagcttgattcaaatgattcagttgtctggaatcatctgggaacactttcttgttcaatgggtttgctgagcgtatcaagatgggcatttgagcaagggcttgtatgcagcccaaacaactggaactgcatggagaaattgttggaggtgcttatatcaattcgtgatgaagtcgcatgcctttctgtagcaaatttaatacttaatagttggccatcacatcatcgtgctttacatgtgaagaagaccattgaatgtgctgaaccggtaccttttgcacctcgtggtattgacatacttgaacccaagcatgcaaaactcatcttttcgaataaaagaaaatccgttgatgatgaaatctgtcaagaaatagggacaaagaagagtaaacacagtgctacattgcaattgaatgaagcaaaatggttggcccttttagatggtatcctaagcttaataagtgcaaacaccgagaaggctggtgaatataattgctcaaatactgttgataggtgttcaatcagtgagggtagtgccaaggggcttgcttataacattatagacgttgtcatatctacagatacattgaaaagtgtggaaactgctggtggaaatggaaatgattctcaccatggtgagattctgccatatgattgcaaagctacagttaaagagaaagatggtaattcagatagggaacatccccatgaaagacggagcacacgccttgagaggctgcgaagtcgcaaatctggaaaagatgaaaatggatctgatggtaaagatatatcccatgctatgacccagtttctagaatcatttattctaaaaggaccaagccctgtagaaaaggcttattgttctggaaatgccgatgcttcaaatcctgatactcataactatacatccaacgaggaggcaaatgatcttaagcaatttctatgcaagatatccaagaattttggccctcatcacattggttatatgttacttgaggagatggctcatctcaaagtgccattccaagattattttgtcaagttaattgaactggacaaacttactagaggctgggctgaagacagatctgcatcgtgcaatttatttctagctgaactgtactatgatcgggctttgtgttctggaagtccaccaacatcttctgagctgtctgattcatcttaccatctttgtaagatcattgaatcagtagctctggaactgccattcaacatatctgttagagaaatacattccaccaacttggatacggaaagtagcaggacaggtgaatcttcaagtgaattaatcgagagaagtcatgaaaatggtcacatcaacatgcttaatgaccaaaagtccaaacatgattcttcttcaaacatgaattgtgcattctggattcgcttcttctggctgagtggttgcctgtccctttcatcagactgcaaagagaaagcttataaggagttcaatattgccctgtcaatactaaaaaatagcaacaaaactaaaagctatggagaggtcattcttctacctcacaccaaacttgtaaaatcacttacaactgacaggattcttcgtgaaatcaacttgatcaggcttgaatctctactttggaataatgatgagaatatcaacaaaataactcatacagagttcatgcagttgctacctccacttttgctttccaccaaagatgcctacgttggaaatgcatatggtccacaaagagaaagcgagaatgttatttcacttgagttgtctgccttggatgtcttaatatctgcatgtgaaaaagcaaaaccaatgaacatccaggtatatcttgactcccatcgaagaaaaattcaagttctaactgtggcagccggcatggttggatctgtcacacccctgaaagcgaaaggttcaagcaatgtggaatttgtggaagcaatgaacaggaaccggctagaaaatgttgtggaagcagtcaaagatgtgtctcgaaatgccagtaaagcaaaagacataatcgatcaatgcgataattccgatgggcaagatggctggagcccactaatgtctatcgttggtgatattcaatcattgctcttgacaatcatgtgtgctgctgtcaagataatactatcgagaaaactctcatgctctggaacctcctatcaggttgaccacttggaatgttcctgtctcatagatgcagccattgcattttgcaagctccagcaccttgatcctacaatatccatcaaaactcaggttgacttaattgttgcagtccatgatttgcttgctgagtatgggctctgttgtgctggaagagatggtgaaggggaggaagggatgttcctaaagttcgcaatcaaacatctcatggctctagatgtgaaactaaaatctcaactcaattcaaatgggatggaagaagatgcagttccaaaagacgtcagagcagaagacagtgtggccgatgaaccatcggttagtgacaataagcagaactccgatgatgaggaagaatcggagttagatgagattcagtcatgtcttgatagtgccttggaccaggcttttttctgcctgtatggtttgaagatcaacccagattcttgcagtgaagatgatctcgctgtacataaaaatacaagccgcggtgattatcaaaccaaagaacagtgtgctgatgtgtttcaatatgtcctgccatatgcaaaagctctatctaaaactggcttggttaaattacggagagtgctgcgggctatacgtaaacactttccgcagccaccttatgacttatttgttaacaaccctattgataatttcttggatggacctgactcatgtgaaaaaatactctctgaaatttgtgaaagcaatgaatctagggaagctatcctgaatgtattgttcccaggtgaaagaggctatgaagcattcaaaaaactctccactgccagctctgagccttattcagatgtttatgagaacttatattatttcatagctcaagccgaagatattagtgccaccgacaagcatacaggttttgttttgaaaaaggaaggagaagaattcgttgaacagagtgccaatattttcaagtatgatttgttgtacaatccattgcggtttgaaagctggcagaagctttccaatctttatgatgaggaagttgatctgttgctcaatgatggtagtaaacatataagcatcttggattggcgaacaaacacggatttaatcagaagggttgagatgggccgtcgacatagtcgacgctgcctattgatgagttcactactggccaaaactgcccctgagcagagcgaggcacatgaactgttggctcttgtgtactacgatagccttcaaaatgtggtgcctttttatgatcaaagagctactttgccagtgaaggattcatcatgggagacattttgtaaaaattctatgaagcactttgagaaggcttttgaaatcaaggagcagtggcttcatgcgttttaccttgggaaactgtgtgagaaactggggcattctttttctaaggcattatcatactacaacaaagccatgatgctgaatccaactgcagtcgaccctgtttacaggattcatgcatcacgcttgaagttactttacactcaaggcaaacagaatcttgaagctatacaggttgttgctgactacacatataaccagtcaacaaaagaaaatgtcttgagcatgctggggtcaatgactaaggttttgcagtcatcttctgataaaacatctttagacactaaagaggaaaataagttttttgagtccgatatactggataaagtgtggcacatcctttatgatgattgtctgtatgctcttggtacttgtgtggaaggggaactcaagcatttccacaaggcgagatacaagcttgcgcaaggatattatagaagaggtgaagcaggggacctggaacgggctaaggaagagctctcgttctgtttcaaatcttctcggtcttcctttacagtaaacatgtgggagattgatggcactgttagaaaaggaaggaggaaaaatccaaatgtgggtggatccagaaagaatctggaggtcagtttgtcagaaagttcacggaaattcattacgtgcattagaaaatatatgatactctatttaaacctgctggagaagaacacggacctgtggactcttgagaaggcttatacttatctgcgaacagataagaggtttgcattgtgtttaggtgatattgttcctgttggtcttgggaagtatattctagttctaacggcagcaattcataatcctgagattcgtcgagcttctggtgatgcttctgttgagcaattacttgagaaaatgttcactgtattcatggatcatgcgaacatgtgggctgatataagcaatataccagaggtgaacagtccagaattatcagaaagcaatctttacagctatatccaccagtacatccatttgctcgagagtgatgtacgactagatgttctagaaggactaaacgagaagataagaaagcgtttcaagacaccgaagttatcaaatagtaacttcgctaagatatgcaagcatgcttctctggcatggtgccggtgtattctcatcaaactggcctcaatcactccactgcctgaatccgcagatgcaaccaatcagcctgcaccattatccaatgggcttctactctatgttgacttgcaacctgatgagcttcttatctcatcccctgatgggcctgctcaattcaaagggcttgacatgaactggtttgagacacttaacagaattaaaaacatcccggtcaagcaaacatccgaagataacttggagactgctgttacgttaatgaagagcacttataacttttatcgggagagcccttgtggaacatttccttcaggtatcaatctctacacggttacaccatcacaagctcctattgaagggctaccgccaaccgctgctgtagttgagacgctcgacttaagtattccaagaaaactccttctgtgggtatacactctggttcatggtcgttactcaaatatatcctccgttgtaaagtattgcgacgagatgaagttaagaagtaaaagaggaaccccagctgcgtctgcttcgtcacaagttgtgcagccagtgtcgcatagtaccgtttcttcccaagttgtatctaaagaaaagagctcccaagttgaacccgctgaagcagcacaaaatccttctgatctagctgccacttgcgttcctgcataccaagaagttggtggtgctagtgcctcgcaaagtgccattgaggcccagaaagctactgctgcggcatctcagctcactcgcagtggttcatcaagggcaatggaaaatgcacaggacggcggggagaggaagtaacgagatagagttcgattttttttatcctctatgctacatcgtatggatgcatatgatcctgcctgacgattctcaggtctcagctctccgtggctccgtgtgcaaatctctgccacgggcgtgttttaacgcctgattggatggttgcccgctggcgcgcccggccagcctcgtacggccacttcggacgcatctgcatcttcggaggtacccgcagatgtagatgaatggccgtaaaatggtttggtctgcgtctctttacatataaccaaataaaaactcagataaagttaactcatgtggtggtctatgttgagatgatgcgggtaaccaatcgaacggttaacaaattcaggtcgtatgtatatcctggtttacagttagtgtttcctaagtgcatttgtagattatagagctgtcaagattgaacgatacatctgtaaggtgttacaaatgctaaatgctaatcctgattttgtggctgatgctaaaaacctgtggactcttaattaccacagactgaactttccctcattttggcccaacaaatacaatagcagaggaagagtttcagttggatttggtggaacggtaggagcgtaaaatatcacttt

SEQ ID NO: 217019 - DNA, 6213 bp, Zea Mays
caggaatttgcgctctctcagaagtaccatgagggactcctcaagttgcaacaaaaagactatgcaaaagctcgtgaacttctcgaggatgttttaaaggacccactaatatcaaatgttcagtgatcagcatttgctgcagctaaggtttttgacattgaaaaatcttgcatctgttttccttcaacaaggttttgagttctacgataatgctcttcactgttacctacaagctgtagagcttgattcaaatgattcagttgtctggaatcatctgggaacactttcttgttcaatgggtttgctgagcgtatcaagatgggcatttgagcaagggcttgtatgcagcccaaacaactggaactgcatggagaaattgttggaggtgcttatatcaattcgtgatgaagtcgcatgcctttctgtagcaaatttaatacttaatagttggccatcacatcatcgtgctttacatgtgaagaagaccattgaatgtgctgaaccggtaccttttgcacctcgtggtattgacatacttgaacccaagcatgcaaaactcatcttttcgaataaaagaaaatccgttgatgatgaaatctgtcaagaaatagggacaaagaagagtaaacacagtgctacattgcaattgaatgaagcaaaatggttggcccttttagatggtatcctaagcttaataagtgcaaacaccgagaaggctggtgaatataattgctcaaatactgttgataggtgttcaatcagtgagggtagtgccaaggggcttgcttataacattatagacgttgtcatatctacagatacattgaaaagtgtggaaactgctggtggaaatggaaatgattctcaccatggtgagattctgccatatgattgcaaagctacagttaaagagaaagatggtaattcagatagggaacatccccatgaaagacggagcacacgccttgagaggctgcgaagtcgcaaatctggaaaagatgaaaatggatctgatggtaaagatatatcccatgctatgacccagtttctagaatcatttattctaaaaggaccaagccctgtagaaaaggcttattgttctggaaatgccgatgcttcaaatcctgatactcataactatacatccaacgaggaggcaaatgatcttaagcaatttctatgcaagatatccaagaattttggccctcatcacattggttatatgttacttgaggagatggctcatctcaaagtgccattccaagattattttgtcaagttaattgaactggacaaacttactagaggctgggctgaagacagatctgcatcgtgcaatttatttctagctgaactgtactatgatcgggctttgtgttctggaagtccaccaacatcttctgagctgtctgattcatcttaccatctttgtaagatcattgaatcagtagctctggaactgccattcaacatatctgttagagaaatacattccaccaacttggatacggaaagtagcaggacaggtgaatcttcaagtgaattaatcgagagaagtcatgaaaatggtcacatcaacatgcttaatgaccaaaagtccaaacatgattcttcttcaaacatgaattgtgcattctggattcgcttcttctggctgagtggttgcctgtccctttcatcagactgcaaagagaaagcttataaggagttcaatattgccctgtcaatactaaaaaatagcaacaaaactaaaagctatggagaggtcattcttctacctcacaccaaacttgtaaaatcacttacaactgacaggattcttcgtgaaatcaacttgatcaggcttgaatctctactttggaataatgatgagaatatcaacaaaataactcatacagagttcatgcagttgctacctccacttttgctttccaccaaagatgcctacgttggaaatgcatatggtccacaaagagaaagcgagaatgttatttcacttgagttgtctgccttggatgtcttaatatctgcatgtgaaaaagcaaaaccaatgaacatccaggtatatcttgactcccatcgaagaaaaattcaagttctaactgtggcagccggcatggttggatctgtcacacccctgaaagcgaaaggttcaagcaatgtggaatttgtggaagcaatgaacaggaaccggctagaaaatgttgtggaagcagtcaaagatgtgtctcgaaatgccagtaaagcaaaagacataatcgatcaatgcgataattccgatgggcaagatggctggagcccactaatgtctatcgttggtgatattcaatcattgctcttgacaatcatgtgtgctgctgtcaagataatactatcgagaaaactctcatgctctggaacctcctatcaggttgaccacttggaatgttcctgtctcatagatgcagccattgcattttgcaagctccagcaccttgatcctacaatatccatcaaaactcaggttgacttaattgttgcagtccatgatttgcttgctgagtatgggctctgttgtgctggaagagatggtgaaggggaggaagggatgttcctaaagttcgcaatcaaacatctcatggctctagatgtgaaactaaaatctcaactcaattcaaatgggatggaagaagatgcagttccaaaagacgtcagagcagaagacagtgtggccgatgaaccatcggttagtgacaataagcagaactccgatgatgaggaagaatcggagttagatgagattcagtcatgtcttgatagtgccttggaccaggcttttttctgcctgtatggtttgaagatcaacccagattcttgcagtgaagatgatctcgctgtacataaaaatacaagccgcggtgattatcaaaccaaagaacagtgtgctgatgtgtttcaatatgtcctgccatatgcaaaagctctatctaaaactggcttggttaaattacggagagtgctgcgggctatacgtaaacactttccgcagccaccttatgacttatttgttaacaaccctattgataatttcttggatggacctgactcatgtgaaaaaatactctctgaaatttgtgaaagcaatgaatctagggaagctatcctgaatgtattgttcccaggtgaaagaggctatgaagcattcaaaaaactctccactgccagctctgagccttattcagatgtttatgagaacttatattatttcatagctcaagccgaagatattagtgccaccgacaagcatacaggttttgttttgaaaaaggaaggagaagaattcgttgaacagagtgccaatattttcaagtatgatttgttgtacaatccattgcggtttgaaagctggcagaagctttccaatctttatgatgaggtggaagttgatctgttgctcaatgatggtagtaaacatataagcatcttggattggcgaacaaacacggatttaatcagaagggttgagatgggccgtcgacatagtcgacgctgcctattgatgagttcactactggccaaaactgcccctgagcagagcgaggcacatgaactgttggctcttgtgtactacgatagccttcaaaatgtggtgcctttttatgatcaaagagctactttgccagtgaaggattcatcatgggagacattttgtaaaaattctatgaagcactttgagaaggcttttgaaatcaaggagcagtggcttcatgcgttttaccttgggaaactgttcgaccctgtttacaggattcatgcatcacgcttgaagttactttacactcaaggcaaacagaatcttgaagctatacaggttgttgctgactacacatataaccagtcaacaaaagaaaatgtcttgagcatgctggggtcaatgactaaggttttgcagtcatcttctgataaaacatctttagacactaaagaggaaaataagttttttgagtccgatatactggataaagtgtggcacatcctttatgatgattgtctgtatgctcttggtacttgtgtggaaggggaactcaagcatttccacaaggcgagatacaagcttgcgcaaggatattatagaagaggtgaagcaggggacctggaacgggctaaggaagagctctcgttctgtttcaaatcttctcggtcttcctttacagtaaacatgtgggagattgatggcactgttagaaaaggaaggaggaaaaatccaaatgtgggtggatccagaaagaatctggaggtcagtttgtcagaaagttcacggaaattcattacgtgcattagaaaatatatgatactctatttaaacctgctggagaagaacacggacctgtggactcttgagaaggcttatacttatctgcgaacagataagaggtttgcattgtgtttaggtgatattgttcctgttggtcttgggaagtatattctagttctaacggcagcaattcataatcctgagattcgtcgagcttctggtgatgcttctgttgagcaattacttgagaaaatgttcactgtattcatggatcatgcgaacatgtgggctgatataagcaatataccagaggtgaacagtccagaattatcagaaagcaatctttacagctatatccaccagtacatccatttgctcgagagtgatgtacgactagatgttctagaaggactaaacgagaagataagaaagcgtttcaagacaccgaagttatcaaatagtaacttcgctaagatatgcaagcatgcttctctggcatggtgccggtgtattctcatcaaactggcctcaatcactccactgcctgaatccgcagatgcaaccaatcagcctgcaccattatccaatgggcttctactctatgttgacttgcaacctgatgagcttcttatctcatcccctgatgggcctgctcaattcaaagggcttgacatgaactggtttgagacacttaacagaattaaaaacatcccggtcaagcaaacatccgaagataacttggagactgctgttacgttaatgaagagcacttataacttttatcgggagagcccttgtggaacatttccttcaggtatcaatctctacacggttacaccatcacaagctcctattgaagggctaccgccaaccgctgctgtagttgagacgctcgacttaagtattccaagaaaactccttctgtgggtatacactctggttcatggtcgttactcaaatatatcctccgttgtaaagtattgcgacgagatgaagttaagaagtaaaagaggaaccccagctgcgtctgcttcgtcacaagttgtgcagccagtgtcgcatagtaccgtttcttcccaagttgtatctaaagaaaagagctcccaagttgaacccgctgaagcagcacaaaatccttctgatctagctgccacttgcgttcctgcataccaagaagttggtggtgctagtgcctcgcaaagtgccattgaggcccagaaagctactgctgcggcatctcagctcactcgcagtggttcatcaagggcaatggaaaatgcacaggacggcggggagaggaagtaacgagatagagttcgattttttttatcctctatgctacatcgtatggatgcatatgatcctgcctgacgattctcaggtctcagctctccgtggctccgtgtgcaaatctctgccacgggcgtgttttaacgcctgattggatggttgcccgctggcgcgcccggccagcctcgtacggccacttcggacgcatctgcatcttcggaggtacccgcagatgtagatgaatggccgtaaaatggtttggtctgcgtctctttacatataaccaaataaaaactcagataaagttaactcatgtggtggtctatgttgagatgatgcgggtaaccaatcgaacggttaacaaattcaggtcgtatgtatatcctggtttacagttagtgtttcctaagtgcatttgtagattatagagctgtcaagattgaacgatacatctgtaaggtgttacaaatgctaaatgctaatcctgattttgtggctgatgctaaaaacctgtggactcttaattaccacagactgaactttccctcattttggcccaacaaatacaatagcagaggaagagtttcagttggatttggtggaacggtaggagcgtaaaatatcacttt

SEQ ID NO: 217020 - DNA, 6080 bp, Zea Mays
caggaatttgcgctctctcagaagtaccatgagggactcctcaagttgcaacaaaaagactatgcaaaagctcgtgaacttctcgaggatgttttaaaggacccactaatatcaaatgttcaggctgataacattggcagtgatcagcatttgctgcagctaaggtttttgacattgaaaaatcttgcatctgttttccttcaacaaggttttgagttctacgataatgctcttcactgttacctacaagctgtagagcttgattcaaatgattcagttgtctggaatcatctgggaacactttcttgttcaatgggtttgctgagcgtatcaagatgggcatttgagcaagggcttgtatgcagcccaaacaactggaactgcatggagaaattgttggaggtgcttatatcaattcgtgatgaagtcgcatgcctttctgtagcaaatttaatacttaatagttggccatcacatcatcgtgctttacatgtgaagaagaccattgaatgtgctgaaccggtaccttttgcacctcgtggtattgacatacttgaacccaagcatgcaaaactcatcttttcgaataaaagaaaatccgttgatgatgaaatctgtcaagaaatagggacaaagaagagtaaacacagtgctacattgcaattgaatgaagcaaaatggttggcccttttagatggtatcctaagcttaataagtgcaaacaccgagaaggctggtgaatataattgctcaaatactgttgataggtgttcaatcagtgagggtagtgccaaggggcttgcttataacattatagacgttgtcatatctacagatacattgaaaagtgtggaaactgctggtggaaatggaaatgattctcaccatggtgagattctgccatatgattgcaaagctacagttaaagagaaagatggtaattcagatagggaacatccccatgaaagacggagcacacgccttgagaggctgcgaagtcgcaaatctggaaaagatgaaaatggatctgatggtaaagatatatcccatgctatgacccagtttctagaatcatttattctaaaaggaccaagccctgtagaaaaggcttattgttctggaaatgccgatgcttcaaatcctgatactcataactatacatccaacgaggaggcaaatgatcttaagcaatttctatgcaagatatccaagaattttggccctcatcacattggttatatgttacttgaggagatggctcatctcaaagtgccattccaagattattttgtcaagttaattgaactggacaaacttactagaggctgggctgaagacagatctgcatcgtgcaatttatttctagctgaactgtactatgatcgggctttgtgttctggaagtccaccaacatcttctgagctgtctgattcatcttaccatctttgtaagatcattgaatcagtagctctggaactgccattcaacatatctgttagagaaatacattccaccaacttggatacggaaagtagcaggacaggtgaatcttcaagtgaattaatcgagagaagtcatgaaaatggtcacatcaacatgcttaatgaccaaaagtccaaacatgattcttcttcaaacatgaattgtgcattctggattcgcttcttctggctgagtggttgcctgtccctttcatcagactgcaaagagaaagcttataaggagttcaatattgccctgtcaatactaaaaaatagcaacaaaactaaaagctatggagaggtcattcttctacctcacaccaaacttgtaaaatcacttacaactgacaggattcttcgtgaaatcaacttgatcaggcttgaatctctactttggaataatgatgagaatatcaacaaaataactcatacagagttcatgcagttgctacctccacttttgctttccaccaaagatgcctacgttggaaatgcatatggtccacaaagagaaagcgagaatgttatttcacttgagttgtctgccttggatgtcttaatatctgcatgtgaaaaagcaaaaccaatgaacatccaggtatatcttgactcccatcgaagaaaaattcaagttctaactgtggcagccggcatggttggatctgtcacacccctgaaagcgaaaggttcaagcaatgtggaatttgtggaagcaatgaacaggaaccggctagaaaatgttgtggaagcagtcaaagatgtgtctcgaaatgccagtaaagcaaaagacataatcgatcaatgcgataattccgttgacttaattgttgcagtccatgatttgcttgctgagtatgggctctgttgtgctggaagagatggtgaaggggaggaagggatgttcctaaagttcgcaatcaaacatctcatggctctagatgtgaaactaaaatctcaactcaattcaaatgggatggaagaagatgcagttccaaaagacgtcagagcagaagacagtgtggccgatgaaccatcggttagtgacaataagcagaactccgatgatgaggaagaatcggagttagatgagattcagtcatgtcttgatagtgccttggaccaggcttttttctgcctgtatggtttgaagatcaacccagattcttgcagtgaagatgatctcgctgtacataaaaatacaagccgcggtgattatcaaaccaaagaacagtgtgctgatgtgtttcaatatgtcctgccatatgcaaaagctctatctaaaactggcttggttaaattacggagagtgctgcgggctatacgtaaacactttccgcagccaccttatgacttatttgttaacaaccctattgataatttcttggatggacctgactcatgtgaaaaaatactctctgaaatttgtgaaagcaatgaatctagggaagctatcctgaatgtattgttcccaggtgaaagaggctatgaagcattcaaaaaactctccactgccagctctgagccttattcagatgtttatgagaacttatattatttcatagctcaagccgaagatattagtgccaccgacaagcatacaggttttgttttgaaaaaggaaggagaagaattcgttgaacagagtgccaatattttcaagtatgatttgttgtacaatccattgcggtttgaaagctggcagaagctttccaatctttatgatgaggtggaagttgatctgttgctcaatgatggtagtaaacatataagcatcttggattggcgaacaaacacggatttaatcagaagggttgagatgggccgtcgacatagtcgacgctgcctattgatgagttcactactggccaaaactgcccctgagcagagcgaggcacatgaactgttggctcttgtgtactacgatagccttcaaaatgtggtgcctttttatgatcaaagagctactttgccagtgaaggattcatcatgggagacattttgtaaaaattctatgaagcactttgagaaggcttttgaaatcaaggagcagtggcttcatgcgttttaccttgggaaactgtgtgagaaactggggcattctttttctaaggcattatcatactacaacaaagccatgatgctgaatccaactgcagtcgaccctgtttacaggattcatgcatcacgcttgaagttactttacactcaaggcaaacagaatcttgaagctatacaggttgttgctgactacacatataaccagtcaacaaaagaaaatgtcttgagcatgctggggtcaatgactaaggttttgcagtcatcttctgataaaacatctttagacactaaagaggaaaataagttttttgagtccgatatactggataaagtgtggcacatcctttatgatgattgtctgtatgctcttggtacttgtgtggaaggggaactcaagcatttccacaaggcgagatacaagcttgcgcaaggatattatagaagaggtgaagcaggggacctggaacgggctaaggaagagctctcgttctgtttcaaatcttctcggtcttcctttacagtaaacatgtgggagattgatggcactgttagaaaaggaaggaggaaaaatccaaatgtgggtggatccagaaagaatctggaggtcagtttgtcagaaagttcacggaaattcattacgtgcattagaaaatatatgatactctatttaaacctgctggagaagaacacggacctgtggactcttgagaaggcttatacttatctgcgaacagataagaggtttgcattgtgtttaggtgatattgttcctgttggtcttgggaagtatattctagttctaacggcagcaattcataatcctgagattcgtcgagcttctggtgatgcttctgttgagcaattacttgagaaaatgttcactgtattcatggatcatgcgaacatgtgggctgatataagcaatataccagaggtgaacagtccagaattatcagaaagcaatctttacagctatatccaccagtacatccatttgctcgagagtgatgtacgactagatgttctagaaggactaaacgagaagataagaaagcgtttcaagacaccgaagttatcaaatagtaacttcgctaagatatgcaagcatgcttctctggcatggtgccggtgtattctcatcaaactggcctcaatcactccactgcctgaatccgcagatgcaaccaatcagcctgcaccattatccaatgggcttctactctatgttgacttgcaacctgatgagcttcttatctcatcccctgatgggcctgctcaattcaaagggcttgacatgaactggtttgagacacttaacagaattaaaaacatcccggtcaagcaaacatccgaagataacttggagactgctgttacgttaatgaagagcacttataacttttatcgggagagcccttgtggaacatttccttcaggtatcaatctctacacggttacaccatcacaagctcctattgaagggctaccgccaaccgctgctgtagttgagacgctcgacttaagtattccaagaaaactccttctgtgggtatacactctggttcatggtcgttactcaaatatatcctccgttgtaaagtattgcgacgagatgaagttaagaagtaaaagaggaaccccagctgcgtctgcttcgtcacaagttgtgcagccagtgtcgcatagtaccgtttcttcccaagttgtatctaaagaaaagagctcccaagttgaacccgctgaagcagcacaaaatccttctgatctagctgccacttgcgttcctgcataccaagaagttggtggtgctagtgcctcgcaaagtgccattgaggcccagaaagctactgctgcggcatctcagctcactcgcagtggttcatcaagggcaatggaaaatgcacaggacggcggggagaggaagtaacgagatagagttcgattttttttatcctctatgctacatcgtatggatgcatatgatcctgcctgacgattctcaggtctcagctctccgtggctccgtgtgcaaatctctgccacgggcgtgttttaacgcctgattggatggttgcccgctggcgcgcccggccagcctcgtacggccacttcggacgcatctgcatcttcggaggtacccgcagatgtagatgaatggccgtaaaatggtttggtctgcgtctctttacatataaccaaataaaaactcagataaagttaactcatgtggtggtctatgttgagatgatgcgggtaaccaatcgaacggttaacaaattcaggtcgtatgtatatcctggtttacagttagtgtttcctaagtgcatttgtagattatagagctgtcaagattgaacgatacatctgtaaggtgttacaaatgctaaatgctaatcctgattttgtggctgatgctaaaaacctgtggactcttaattaccacagactgaactttccctcattttggcccaacaaatacaatagcagaggaagagtttcagttggatttggtggaacggtaggagcgtaaaatatcacttt

SEQ ID NO: 217021 - DNA, 6511 bp, Zea Mays
gccaggaatttgcgctctctcagaagtaccatgagggactcctcaagttgcaacaaaaagactatgcaaaagctcgtgaacttctcgaggatgttttaaaggacccactaatatcaaatgttcaggctgataacattggcagtgatcagcatttgctgcagctaaggtttttgacattgaaaaatcttgcatctgttttccttcaacaaggttttgagttctacgataatgctcttcactgttacctacaagctgtagagcttgattcaaatgattcagttgtctggaatcatctgggaacactttcttgttcaatgggtttgctgagcgtatcaagatgggcatttgagcaagggcttgtatgcagcccaaacaactggaactgcatggagaaattgttggaggtgcttatatcaattcgtgatgaagtcgcatgcctttctgtagcaaatttaatacttaatagttggccatcacatcatcgtgctttacatgtgaagaagaccattgaatgtgctgaaccggtaccttttgcacctcgtggtattgacatacttgaacccaagcatgcaaaactcatcttttcgaataaaagaaaatccgttgatgatgaaatctgtcaagaaatagggacaaagaagagtaaacacagtgctacattgcaattgaatgaagcaaaatggttggcccttttagatggtatcctaagcttaataagtgcaaacaccgagaaggctggtgaatataattgctcaaatactgttgataggtgttcaatcagtgagggtagtgccaaggggcttgcttataacattatagacgttgtcatatctacagatacattgaaaagtgtggaaactgctggtggaaatggaaatgattctcaccatggtgagattctgccatatgattgcaaagctacagttaaagagaaagatggtaattcagatagggaacatccccatgaaagacggagcacacgccttgagaggctgcgaagtcgcaaatctggaaaagatgaaaatggatctgatggtaaagatatatcccatgctatgacccagtttctagaatcatttattctaaaaggaccaagccctgtagaaaaggcttattgttctggaaatgccgatgcttcaaatcctgatactcataactatacatccaacgaggaggcaaatgatcttaagcaatttctatgcaagatatccaagaattttggccctcatcacattggttatatgttacttgaggagatggctcatctcaaagtgccattccaagattattttgtcaagttaattgaactggacaaacttactagaggctgggctgaagacagatctgcatcgtgcaatttatttctagctgaactgtactatgatcgggctttgtgttctggaagtccaccaacatcttctgagctgtctgattcatcttaccatctttgtaagatcattgaatcagtagctctggaactgccattcaacatatctgttagagaaatacattccaccaacttggatacggaaagtagcaggacaggtgaatcttcaagtgaattaatcgagagaagtcatgaaaatggtcacatcaacatgcttaatgaccaaaagtccaaacatgattcttcttcaaacatgaattgtgcattctggattcgcttcttctggctgagtggttgcctgtccctttcatcagactgcaaagagaaagcttataaggagttcaatattgccctgtcaatactaaaaaatagcaacaaaactaaaagctatggagaggtcattcttctacctcacaccaaacttgtaaaatcacttacaactgacaggattcttcgtgaaatcaacttgatcaggcttgaatctctactttggaataatgatgagaatatcaacaaaataactcatacagagttcatgcagttgctacctccacttttgctttccaccaaagatgcctacgttggaaatgcatatggtccacaaagagaaagcgagaatgttatttcacttgagttgtctgccttggatgtcttaatatctgcatgtgaaaaagcaaaaccaatgaacatccaggtatatcttgactcccatcgaagaaaaattcaagttctaactgtggcagccggcatggttggatctgtcacacccctgaaagcgaaaggttcaagcaatgtggaatttgtggaagcaatgaacaggaaccggctagaaaatgttgtggaagcagtcaaagatgtgtctcgaaatgccagtaaagcaaaagacataatcgatcaatgcgataattccgtaccaagtatcactattgtgttaattcataagtatatcagtcaaggttatcaagtcgataagtcgagtcgagtcgacaaggcgtccattaagcgtcgccttagcgtcgctttagcgctaaggcgtgctcacagggcaagacgtctagctcgccttccgccgtggcgtaaggcgtccgccgcggcacaatgcgtccgctgcggcgatgggcaagatggctggagcccactaatgtctatcgttggtgatattcaatcattgctcttgacaatcatgtgtgctgctgtcaagataatactatcgagaaaactctcatgctctggaacctcctatcaggttgaccacttggaatgttcctgtctcatagatgcagccattgcattttgcaagctccagcaccttgatcctacaatatccatcaaaactcaggttgacttaattgttgcagtccatgatttgcttgctgagtatgggctctgttgtgctggaagagatggtgaaggggaggaagggatgttcctaaagttcgcaatcaaacatctcatggctctagatgtgaaactaaaatctcaactcaattcaaatgggatggaagaagatgcagttccaaaagacgtcagagcagaagacagtgtggccgatgaaccatcggttagtgacaataagcagaactccgatgatgaggaagaatcggagttagatgagattcagtcatgtcttgatagtgccttggaccaggcttttttctgcctgtatggtttgaagatcaacccagattcttgcagtgaagatgatctcgctgtacataaaaatacaagccgcggtgattatcaaaccaaagaacagtgtgctgatgtgtttcaatatgtcctgccatatgcaaaagctctatctaaaactggcttggttaaattacggagagtgctgcgggctatacgtaaacactttccgcagccaccttatgacttatttgttaacaaccctattgataatttcttggatggacctgactcatgtgaaaaaatactctctgaaatttgtgaaagcaatgaatctagggaagctatcctgaatgtattgttcccaggtgaaagaggctatgaagcattcaaaaaactctccactgccagctctgagccttattcagatgtttatgagaacttatattatttcatagctcaagccgaagatattagtgccaccgacaagcatacaggttttgttttgaaaaaggaaggagaagaattcgttgaacagagtgccaatattttcaagtatgatttgttgtacaatccattgcggtttgaaagctggcagaagctttccaatctttatgatgaggtggaagttgatctgttgctcaatgatggtagtaaacatataagcatcttggattggcgaacaaacacggatttaatcagaagggttgagatgggccgtcgacatagtcgacgctgcctattgatgagttcactactggccaaaactgcccctgagcagagcgaggcacatgaactgttggctcttgtgtactacgatagccttcaaaatgtggtgcctttttatgatcaaagagctactttgccagtgaaggattcatcatgggagacattttgtaaaaattctatgaagcactttgagaaggcttttgaaatcaaggagcagtggcttcatgcgttttaccttgggaaactgtgtgagaaactggggcattctttttctaaggcattatcatactacaacaaagccatgatgctgaatccaactgcagtcgaccctgtttacaggattcatgcatcacgcttgaagttactttacactcaaggcaaacagaatcttgaagctatacaggttgttgctgactacacatataaccagtcaacaaaagaaaatgtcttgagcatgctggggtcaatgactaaggttttgcagtcatcttctgataaaacatctttagacactaaagaggaaaataagttttttgagtccgatatactggataaagtgtggcacatcctttatgatgattgtctgtatgctcttggtacttgtgtggaaggggaactcaagcatttccacaaggcgagatacaagcttgcgcaaggatattatagaagaggtgaagcaggggacctggaacgggctaaggaagagctctcgttctgtttcaaatcttctcggtcttcctttacagtaaacatgtgggagattgatggcactgttagaaaaggaaggaggaaaaatccaaatgtgggtggatccagaaagaatctggaggtcagtttgtcagaaagttcacggaaattcattacgtgcattagaaaatatatgatactctatttaaacctgctggagaagaacacggacctgtggactcttgagaaggcttatacttatctgcgaacagataagaggtttgcattgtgtttaggtgatattgttcctgttggtcttgggaagtatattctagttctaacggcagcaattcataatcctgagattcgtcgagcttctggtgatgcttctgttgagcaattacttgagaaaatgttcactgtattcatggatcatgcgaacatgtgggctgatataagcaatataccagaggtgaacagtccagaattatcagaaagcaatctttacagctatatccaccagtacatccatttgctcgagagtgatgtacgactagatgttctagaaggactaaacgagaagataagaaagcgtttcaagacaccgaagttatcaaatagtaacttcgctaagatatgcaagcatgcttctctggcatggtgccggtgtattctcatcaaactggcctcaatcactccactgcctgaatccgcagatgcaaccaatcagcctgcaccattatccaatgggcttctactctatgttgacttgcaacctgatgagcttcttatctcatcccctgatgggcctgctcaattcaaagggcttgacatgaactggtttgagacacttaacagaattaaaaacatcccggtcaagcaaacatccgaagataacttggagactgctgttacgttaatgaagagcacttataacttttatcgggagagcccttgtggaacatttccttcaggtatcaatctctacacggttacaccatcacaagctcctattgaagggctaccgccaaccgctgctgtagttgagacgctcgacttaagtattccaagaaaactccttctgtgggtatacactctggttcatggtcgttactcaaatatatcctccgttgtaaagtattgcgacgagatgaagttaagaagtaaaagaggaaccccagctgcgtctgcttcgtcacaagttgtgcagccagtgtcgcatagtaccgtttcttcccaagttgtatctaaagaaaagagctcccaagttgaacccgctgaagcagcacaaaatccttctgatctagctgccacttgcgttcctgcataccaagaagttggtggtgctagtgcctcgcaaagtgccattgaggcccagaaagctactgctgcggcatctcagctcactcgcagtggttcatcaagggcaatggaaaatgcacaggacggcggggagaggaagtaacgagatagagttcgattttttttatcctctatgctacatcgtatggatgcatatgatcctgcctgacgattctcaggtctcagctctccgtggctccgtgtgcaaatctctgccacgggcgtgttttaacgcctgattggatggttgcccgctggcgcgcccggccagcctcgtacggccacttcggacgcatctgcatcttcggaggtacccgcagatgtagatgaatggccgtaaaatggtttggtctgcgtctctttacatataaccaaataaaaactcagataaagttaactcatgtggtggtctatgttgagatgatgcgggtaaccaatcgaacggttaacaaattcaggtcgtatgtatatcctggtttacagttagtgtttcctaagtgcatttgtagattatagagctgtcaagattgaacgatacatctgtaaggtgttacaaatgctaaatgctaatcctgattttgtggctgatgctaaaaacctgtggactcttaattaccacagactgaactttccctcattttggcccaacaaatacaatagcagaggaagagtttcagttggatttggtggaacggtaggagcgtaaaatatcacttt

SEQ ID NO: 217022 - DNA, 6578 bp, Zea Mays
gccaggaatttgcgctctctcagaagtaccatgagggactcctcaagttgcaacaaaaagactatgcaaaagctcgtgaacttctcgaggatgttttaaaggacccactaatatcaaatgttcaggctgataacattggcagtgatcagcatttgctgcagctaaggtttttgacattgaaaaatcttgcatctgttttccttcaacaaggttttgagttctacgataatgctcttcactgttacctacaagctgtagagcttgattcaaatgattcagttgtctggaatcatctgggaacactttcttgttcaatgggtttgctgagcgtatcaagatgggcatttgagcaagggcttgtatgcagcccaaacaactggaactgcatggagaaattgttggaggtgcttatatcaattcgtgatgaagtcgcatgcctttctgtagcaaatttaatacttaatagttggccatcacatcatcgtgctttacatgtgaagaagaccattgaatgtgctgaaccggtaccttttgcacctcgtggtattgacatacttgaacccaagcatgcaaaactcatcttttcgaataaaagaaaatccgttgatgatgaaatctgtcaagaaatagggacaaagaagagtaaacacagtgctacattgcaattgaatgaagcaaaatggttggcccttttagatggtatcctaagcttaataagtgcaaacaccgagaaggctggtgaatataattgctcaaatactgttgataggtgttcaatcagtgagggtagtgccaaggggcttgcttataacattatagacgttgtcatatctacagatacattgaaaagtgtggaaactgctggtggaaatggaaatgattctcaccatggtgagattctgccatatgattgcaaagctacagttaaagagaaagatggtaattcagatagggaacatccccatgaaagacggagcacacgccttgagaggctgcgaagtcgcaaatctggaaaagatgaaaatggatctgatggtaaagatatatcccatgctatgacccagtttctagaatcatttattctaaaaggaccaagccctgtagaaaaggcttattgttctggaaatgccgatgcttcaaatcctgatactcataactatacatccaacgaggaggcaaatgatcttaagcaatttctatgcaagatatccaagaattttggccctcatcacattggttatatgttacttgaggagatggctcatctcaaagtgccattccaagattattttgtcaagttaattgaactggacaaacttactagaggctgggctgaagacagatctgcatcgtgcaatttatttctagctgaactgtactatgatcgggctttgtgttctggaagtccaccaacatcttctgagctgtctgattcatcttaccatctttgtaagatcattgaatcagtagctctggaactgccattcaacatatctgttagagaaatacattccaccaacttggatacggaaagtagcaggacaggtgaatcttcaagtgaattaatcgagagaagtcatgaaaatggtcacatcaacatgcttaatgaccaaaagtccaaacatgattcttcttcaaacatgaattgtgcattctggattcgcttcttctggctgagtggttgcctgtccctttcatcagactgcaaagagaaagcttataaggagttcaatattgccctgtcaatactaaaaaatagcaacaaaactaaaagctatggagaggtcattcttctacctcacaccaaacttgtaaaatcacttacaactgacaggattcttcgtgaaatcaacttgatcaggcttgaatctctactttggaataatgatgagaatatcaacaaaataactcatacagagttcatgcagttgctacctccacttttgctttccaccaaagatgcctacgttggaaatgcatatggtccacaaagagaaagcgagaatgttatttcacttgagttgtctgccttggatgtcttaatatctgcatgtgaaaaagcaaaaccaatgaacatccaggtatatcttgactcccatcgaagaaaaattcaagttctaactgtggcagccggcatggttggatctgtcacacccctgaaagcgaaaggttcaagcaatgtggaatttgtggaagcaatgaacaggaaccggctagaaaatgttgtggaagcagtcaaagatgtgtctcgaaatgccagtaaagcaaaagacataatcgatcaatgcgataattccgtaccaagtatcactattgtgttaattcataagtatatcagtcaaggttatcaagtcgataagtcgagtcgagtcgacaaggcgtccattaagcgtcgccttagcgtcgctttagcgctaaggcgtgctcacagggcaagacgtctagctcgccttccgccgtggcgtaaggcgtccgccgcggcacaatgcgtccgctgcggcgatgggcaagatggctggagcccactaatgtctatcgttggtgatattcaatcattgctcttgacaatcatgtgtgctgctgtcaagataatactatcgagaaaactctcatgctctggaacctcctatcaggttgaccacttggaatgttcctgtctcatagatgcagccattgcattttgcaagctccagcaccttgatcctacaatatccatcaaaactcaggttgacttaattgttgcagtccatgatttgcttgctgagtatgggctctgttgtgctggaagagatggtgaaggggaggaagggatgttcctaaagttcgcaatcaaacatctcatggctctagatgtgaaactaaaatctcaactcaattcaaatgggatggaagaagatgcagttccaaaagacgtcagagcagaagacagtgtggccgatgaaccatcggttagtgacaataagcagaactccgatgatgaggaagaatcggagttagatgagattcagtcatgtcttgatagtgccttggaccaggcttttttctgcctgtatggtttgaagatcaacccagattcttgcagtgaagatgatctcgctgtacataaaaatacaagccgcggtgattatcaaaccaaagaacagtgtgctgatgtgtttcaatatgtcctgccatatgcaaaagctctatctaaaactggcttggttaaattacggagagtgctgcgggctatacgtaaacactttccgcagccaccttatgacttatttgttaacaaccctattgataatttcttggatggacctgactcatgtgaaaaaatactctctgaaatttgtgaaagcaatgaatctagggaagctatcctgaatgtattgttcccaggtgaaagaggctatgaagcattcaaaaaactctccactgccagctctgagccttattcagatgtttatgagaacttatattatttcatagctcaagccgaagatattagtgccaccgacaagcatacaggttttgttttgaaaaaggaaggagaagaattcgttgaacagagtgccaatattttcaagtatgatttgttgtacaatccattgcggtttgaaagctggcagaagctttccaatctttatgatgaggtggaagttgatctgttgctcaatgatggtagtaaacatataagcatcttggattggcgaacaaacacggatttaatcagaagggttgagatgggccgtcgacatagtcgacgctgcctattgatgagttcactactggccaaaactgcccctgagcagagcgaggcacatgaactgttggctcttgtgtactacgatagccttcaaaatgtggtgcctttttatgatcaaagagctactttgccagtgaaggattcatcatgggagacattttgtaaaaattctatgaagcactttgagaaggcttttgaaatcaaggagcagtggcttcatgcgttttaccttgggaaactgtgtgagaaactggggcattctttttctaaggcattatcatactacaacaaagccatgatgctgaatccaactgcagtcgaccctgtttacaggattcatgcatcacgcttgaagttactttacactcaaggcaaacagaatcttgaagctatacaggacttcatcttggatgcaattgtgggttgagaacaccctttacgcctttcatcaactacatcttcaggttgttgctgactacacatataaccagtcaacaaaagaaaatgtcttgagcatgctggggtcaatgactaaggttttgcagtcatcttctgataaaacatctttagacactaaagaggaaaataagttttttgagtccgatatactggataaagtgtggcacatcctttatgatgattgtctgtatgctcttggtacttgtgtggaaggggaactcaagcatttccacaaggcgagatacaagcttgcgcaaggatattatagaagaggtgaagcaggggacctggaacgggctaaggaagagctctcgttctgtttcaaatcttctcggtcttcctttacagtaaacatgtgggagattgatggcactgttagaaaaggaaggaggaaaaatccaaatgtgggtggatccagaaagaatctggaggtcagtttgtcagaaagttcacggaaattcattacgtgcattagaaaatatatgatactctatttaaacctgctggagaagaacacggacctgtggactcttgagaaggcttatacttatctgcgaacagataagaggtttgcattgtgtttaggtgatattgttcctgttggtcttgggaagtatattctagttctaacggcagcaattcataatcctgagattcgtcgagcttctggtgatgcttctgttgagcaattacttgagaaaatgttcactgtattcatggatcatgcgaacatgtgggctgatataagcaatataccagaggtgaacagtccagaattatcagaaagcaatctttacagctatatccaccagtacatccatttgctcgagagtgatgtacgactagatgttctagaaggactaaacgagaagataagaaagcgtttcaagacaccgaagttatcaaatagtaacttcgctaagatatgcaagcatgcttctctggcatggtgccggtgtattctcatcaaactggcctcaatcactccactgcctgaatccgcagatgcaaccaatcagcctgcaccattatccaatgggcttctactctatgttgacttgcaacctgatgagcttcttatctcatcccctgatgggcctgctcaattcaaagggcttgacatgaactggtttgagacacttaacagaattaaaaacatcccggtcaagcaaacatccgaagataacttggagactgctgttacgttaatgaagagcacttataacttttatcgggagagcccttgtggaacatttccttcaggtatcaatctctacacggttacaccatcacaagctcctattgaagggctaccgccaaccgctgctgtagttgagacgctcgacttaagtattccaagaaaactccttctgtgggtatacactctggttcatggtcgttactcaaatatatcctccgttgtaaagtattgcgacgagatgaagttaagaagtaaaagaggaaccccagctgcgtctgcttcgtcacaagttgtgcagccagtgtcgcatagtaccgtttcttcccaagttgtatctaaagaaaagagctcccaagttgaacccgctgaagcagcacaaaatccttctgatctagctgccacttgcgttcctgcataccaagaagttggtggtgctagtgcctcgcaaagtgccattgaggcccagaaagctactgctgcggcatctcagctcactcgcagtggttcatcaagggcaatggaaaatgcacaggacggcggggagaggaagtaacgagatagagttcgattttttttatcctctatgctacatcgtatggatgcatatgatcctgcctgacgattctcaggtctcagctctccgtggctccgtgtgcaaatctctgccacgggcgtgttttaacgcctgattggatggttgcccgctggcgcgcccggccagcctcgtacggccacttcggacgcatctgcatcttcggaggtacccgcagatgtagatgaatggccgtaaaatggtttggtctgcgtctctttacatataaccaaataaaaactcagataaagttaactcatgtggtggtctatgttgagatgatgcgggtaaccaatcgaacggttaacaaattcaggtcgtatgtatatcctggtttacagttagtgtttcctaagtgcatttgtagattatagagctgtcaagattgaacgatacatctgtaaggtgttacaaatgctaaatgctaatcctgattttgtggctgatgctaaaaacctgtggactcttaattaccacagactgaactttccctcattttggcccaacaaatacaatagcagaggaagagtttcagttggatttggtggaacggtaggagcgtaaaatatcacttt

SEQ ID NO: 217023 - DNA, 6443 bp, Zea Mays
aaaatgctgaatagcgagtagtatctgatttatatgttctgatatttcgtttcttgtggcaagagtgaaattttcagtgttgaatgttcttaatgcttgtctcattgtcattgtattactgagattaccttttgatgctgccaggaatttgcgctctctcagaagtaccatgagggactcctcaagttgcaacaaaaagactatgcaaaagctcgtgaacttctcgaggatgttttaaaggacccactaatatcaaatgttcaggctgataacattggcagtgatcagcatttgctgcagctaaggtttttgacattgaaaaatcttgcatctgttttccttcaacaaggttttgagttctacgataatgctcttcactgttacctacaagctgtagagcttgattcaaatgattcagttgtctggaatcatctgggaacactttcttgttcaatgggtttgctgagcgtatcaagatgggcatttgagcaagggcttgtatgcagcccaaacaactggaactgcatggagaaattgttggaggtgcttatatcaattcgtgatgaagtcgcatgcctttctgtagcaaatttaatacttaatagttggccatcacatcatcgtgctttacatgtgaagaagaccattgaatgtgctgaaccggtaccttttgcacctcgtggtattgacatacttgaacccaagcatgcaaaactcatcttttcgaataaaagaaaatccgttgatgatgaaatctgtcaagaaatagggacaaagaagagtaaacacagtgctacattgcaattgaatgaagcaaaatggttggcccttttagatggtatcctaagcttaataagtgcaaacaccgagaaggctggtgaatataattgctcaaatactgttgataggtgttcaatcagtgagggtagtgccaaggggcttgcttataacattatagacgttgtcatatctacagatacattgaaaagtgtggaaactgctggtggaaatggaaatgattctcaccatggtgagattctgccatatgattgcaaagctacagttaaagagaaagatggtaattcagatagggaacatccccatgaaagacggagcacacgccttgagaggctgcgaagtcgcaaatctggaaaagatgaaaatggatctgatggtaaagatatatcccatgctatgacccagtttctagaatcatttattctaaaaggaccaagccctgtagaaaaggcttattgttctggaaatgccgatgcttcaaatcctgatactcataactatacatccaacgaggaggcaaatgatcttaagcaatttctatgcaagatatccaagaattttggccctcatcacattggttatatgttacttgaggagatggctcatctcaaagtgccattccaagattattttgtcaagttaattgaactggacaaacttactagaggctgggctgaagacagatctgcatcgtgcaatttatttctagctgaactgtactatgatcgggctttgtgttctggaagtccaccaacatcttctgagctgtctgattcatcttaccatctttgtaagatcattgaatcagtagctctggaactgccattcaacatatctgttagagaaatacattccaccaacttggatacggaaagtagcaggacaggtgaatcttcaagtgaattaatcgagagaagtcatgaaaatggtcacatcaacatgcttaatgaccaaaagtccaaacatgattcttcttcaaacatgaattgtgcattctggattcgcttcttctggctgagtggttgcctgtccctttcatcagactgcaaagagaaagcttataaggagttcaatattgccctgtcaatactaaaaaatagcaacaaaactaaaagctatggagaggtcattcttctacctcacaccaaacttgtaaaatcacttacaactgacaggattcttcgtgaaatcaacttgatcaggcttgaatctctactttggaataatgatgagaatatcaacaaaataactcatacagagttcatgcagttgctacctccacttttgctttccaccaaagatgcctacgttggaaatgcatatggtccacaaagagaaagcgagaatgttatttcacttgagttgtctgccttggatgtcttaatatctgcatgtgaaaaagcaaaaccaatgaacatccaggtatatcttgactcccatcgaagaaaaattcaagttctaactgtggcagccggcatggttggatctgtcacacccctgaaagcgaaaggttcaagcaatgtggaatttgtggaagcaatgaacaggaaccggctagaaaatgttgtggaagcagtcaaagatgtgtctcgaaatgccagtaaagcaaaagacataatcgatcaatgcgataattccgatgggcaagatggctggagcccactaatgtctatcgttggtgatattcaatcattgctcttgacaatcatgtgtgctgctgtcaagataatactatcgagaaaactctcatgctctggaacctcctatcaggttgaccacttggaatgttcctgtctcatagatgcagccattgcattttgcaagctccagcaccttgatcctacaatatccatcaaaactcaggttgacttaattgttgcagtccatgatttgcttgctgagtatgggctctgttgtgctggaagagatggtgaaggggaggaagggatgttcctaaagttcgcaatcaaacatctcatggctctagatgtgaaactaaaatctcaactcaattcaaatgggatggaagaagatgcagttccaaaagacgtcagagcagaagacagtgtggccgatgaaccatcggttagtgacaataagcagaactccgatgatgaggaagaatcggagttagatgagattcagtcatgtcttgatagtgccttggaccaggcttttttctgcctgtatggtttgaagatcaacccagattcttgcagtgaagatgatctcgctgtacataaaaatacaagccgcggtgattatcaaaccaaagaacagtgtgctgatgtgtttcaatatgtcctgccatatgcaaaagctctatctaaaactggcttggttaaattacggagagtgctgcgggctatacgtaaacactttccgcagccaccttatgacttatttgttaacaaccctattgataatttcttggatggacctgactcatgtgaaaaaatactctctgaaatttgtgaaagcaatgaatctagggaagctatcctgaatgtattgttcccaggtgaaagaggctatgaagcattcaaaaaactctccactgccagctctgagccttattcagatgtttatgagaacttatattatttcatagctcaagccgaagatattagtgccaccgacaagcatacaggttttgttttgaaaaaggaaggagaagaattcgttgaacagagtgccaatattttcaagtatgatttgttgtacaatccattgcggtttgaaagctggcagaagctttccaatctttatgatgaggaagttgatctgttgctcaatgatggtagtaaacatataagcatcttggattggcgaacaaacacggatttaatcagaagggttgagatgggccgtcgacatagtcgacgctgcctattgatgagttcactactggccaaaactgcccctgagcagagcgaggcacatgaactgttggctcttgtgtactacgatagccttcaaaatgtggtgcctttttatgatcaaagagctactttgccagtgaaggattcatcatgggagacattttgtaaaaattctatgaagcactttgagaaggcttttgaaatcaaggagcagtggcttcatgcgttttaccttgggaaactgtgtgagaaactggggcattctttttctaaggcattatcatactacaacaaagccatgatgctgaatccaactgcagtcgaccctgtttacaggattcatgcatcacgcttgaagttactttacactcaaggcaaacagaatcttgaagctatacaggttgttgctgactacacatataaccagtcaacaaaagaaaatgtcttgagcatgctggggtcaatgactaaggttttgcagtcatcttctgataaaacatctttagacactaaagaggaaaataagttttttgagtccgatatactggataaagtgtggcacatcctttatgatgattgtctgtatgctcttggtacttgtgtggaaggggaactcaagcatttccacaaggcgagatacaagcttgcgcaaggatattatagaagaggtgaagcaggggacctggaacgggctaaggaagagctctcgttctgtttcaaatcttctcggtcttcctttacagtaaacatgtgggagattgatggcactgttagaaaaggaaggaggaaaaatccaaatgtgggtggatccagaaagaatctggaggtcagtttgtcagaaagttcacggaaattcattacgtgcattagaaaatatatgatactctatttaaacctgctggagaagaacacggacctgtggactcttgagaaggcttatacttatctgcgaacagataagaggtttgcattgtgtttaggtgatattgttcctgttggtcttgggaagtatattctagttctaacggcagcaattcataatcctgagattcgtcgagcttctggtgatgcttctgttgagcaattacttgagaaaatgttcactgtattcatggatcatgcgaacatgtgggctgatataagcaatataccagaggtgaacagtccagaattatcagaaagcaatctttacagctatatccaccagtacatccatttgctcgagagtgatgtacgactagatgttctagaaggactaaacgagaagataagaaagcgtttcaagacaccgaagttatcaaatagtaacttcgctaagatatgcaagcatgcttctctggcatggtgccggtgtattctcatcaaactggcctcaatcactccactgcctgaatccgcagatgcaaccaatcagcctgcaccattatccaatgggcttctactctatgttgacttgcaacctgatgagcttcttatctcatcccctgatgggcctgctcaattcaaagggcttgacatgaactggtttgagacacttaacagaattaaaaacatcccggtcaagcaaacatccgaagataacttggagactgctgttacgttaatgaagagcacttataacttttatcgggagagcccttgtggaacatttccttcaggtatcaatctctacacggttacaccatcacaagctcctattgaagggctaccgccaaccgctgctgtagttgagacgctcgacttaagtattccaagaaaactccttctgtgggtatacactctggttcatggtcgttactcaaatatatcctccgttgtaaagtattgcgacgagatgaagttaagaagtaaaagaggaaccccagctgcgtctgcttcgtcacaagttgtgcagccagtgtcgcatagtaccgtttcttcccaagttgtatctaaagaaaagagctcccaagttgaacccgctgaagcagcacaaaatccttctgatctagctgccacttgcgttcctgcataccaagaagttggtggtgctagtgcctcgcaaagtgccattgaggcccagaaagctactgctgcggcatctcagctcactcgcagtggttcatcaagggcaatggaaaatgcacaggacggcggggagaggaagtaacgagatagagttcgattttttttatcctctatgctacatcgtatggatgcatatgatcctgcctgacgattctcaggtctcagctctccgtggctccgtgtgcaaatctctgccacgggcgtgttttaacgcctgattggatggttgcccgctggcgcgcccggccagcctcgtacggccacttcggacgcatctgcatcttcggaggtacccgcagatgtagatgaatggccgtaaaatggtttggtctgcgtctctttacatataaccaaataaaaactcagataaagttaactcatgtggtggtctatgttgagatgatgcgggtaaccaatcgaacggttaacaaattcaggtcgtatgtatatcctggtttacagttagtgtttcctaagtgcatttgtagattatagagctgtcaagattgaacgatacatctgtaaggtgttacaaatgctaaatgctaatcctgattttgtggctgatgctaaaaacctgtggactcttaattaccacagactgaactttccctcattttggcccaacaaatacaatagcagaggaagagtttcagttggatttggtggaacggtaggagcgtaaaatatcacttt

SEQ ID NO: 217024 - DNA, 6319 bp, Zea Mays
atggagaactgcgagcgaacgataaaggggtttttgacattgaaaaatcttgcatctgttttccttcaacaaggttttgagttctacgataatgctcttcactgttacctacaagctgtagagcttgattcaaatgattcagttgtctggaatcatctgggaacactttcttgttcaatgggtttgctgagcgtatcaagatgggcatttgagcaagggcttgtatgcagcccaaacaactggaactgcatggagaaattgttggaggtgcttatatcaattcgtgatgaagtcgcatgcctttctgtagcaaatttaatacttaatagttggccatcacatcatcgtgctttacatgtgaagaagaccattgaatgtgctgaaccggtaccttttgcacctcgtggtattgacatacttgaacccaagcatgcaaaactcatcttttcgaataaaagaaaatccgttgatgatgaaatctgtcaagaaatagggacaaagaagagtaaacacagtgctacattgcaattgaatgaagcaaaatggttggcccttttagatggtatcctaagcttaataagtgcaaacaccgagaaggctggtgaatataattgctcaaatactgttgataggtgttcaatcagtgagggtagtgccaaggggcttgcttataacattatagacgttgtcatatctacagatacattgaaaagtgtggaaactgctggtggaaatggaaatgattctcaccatggtgagattctgccatatgattgcaaagctacagttaaagagaaagatggtaattcagatagggaacatccccatgaaagacggagcacacgccttgagaggctgcgaagtcgcaaatctggaaaagatgaaaatggatctgatggtaaagatatatcccatgctatgacccagtttctagaatcatttattctaaaaggaccaagccctgtagaaaaggcttattgttctggaaatgccgatgcttcaaatcctgatactcataactatacatccaacgaggaggcaaatgatcttaagcaatttctatgcaagatatccaagaattttggccctcatcacattggttatatgttacttgaggagatggctcatctcaaagtgccattccaagattattttgtcaagttaattgaactggacaaacttactagaggctgggctgaagacagatctgcatcgtgcaatttatttctagctgaactgtactatgatcgggctttgtgttctggaagtccaccaacatcttctgagctgtctgattcatcttaccatctttgtaagatcattgaatcagtagctctggaactgccattcaacatatctgttagagaaatacattccaccaacttggatacggaaagtagcaggacaggtgaatcttcaagtgaattaatcgagagaagtcatgaaaatggtcacatcaacatgcttaatgaccaaaagtccaaacatgattcttcttcaaacatgaattgtgcattctggattcgcttcttctggctgagtggttgcctgtccctttcatcagactgcaaagagaaagcttataaggagttcaatattgccctgtcaatactaaaaaatagcaacaaaactaaaagctatggagaggtcattcttctacctcacaccaaacttgtaaaatcacttacaactgacaggattcttcgtgaaatcaacttgatcaggcttgaatctctactttggaataatgatgagaatatcaacaaaataactcatacagagttcatgcagttgctacctccacttttgctttccaccaaagatgcctacgttggaaatgcatatggtccacaaagagaaagcgagaatgttatttcacttgagttgtctgccttggatgtcttaatatctgcatgtgaaaaagcaaaaccaatgaacatccaggtatatcttgactcccatcgaagaaaaattcaagttctaactgtggcagccggcatggttggatctgtcacacccctgaaagcgaaaggttcaagcaatgtggaatttgtggaagcaatgaacaggaaccggctagaaaatgttgtggaagcagtcaaagatgtgtctcgaaatgccagtaaagcaaaagacataatcgatcaatgcgataattccgatgggcaagatggctggagcccactaatgtctatcgttggtgatattcaatcattgctcttgacaatcatgtgtgctgctgtcaagataatactatcgagaaaactctcatgctctggaacctcctatcaggttgaccacttggaatgttcctgtctcatagatgcagccattgcattttgcaagctccagcaccttgatcctacaatatccatcaaaactcaggttgacttaattgttgcagtccatgatttgcttgctgagtatgggctctgttgtgctggaagagatggtgaaggggaggaagggatgttcctaaagttcgcaatcaaacatctcatggctctagatgtgaaactaaaatctcaactcaattcaaatgggatggaagaagatgcagttccaaaagacgtcagagcagaagacagtgtggccgatgaaccatcggttagtgacaataagcagaactccgatgatgaggaagaatcggagttagatgagattcagtcatgtcttgatagtgccttggaccaggcttttttctgcctgtatggtttgaagatcaacccagattcttgcagtgaagatgatctcgctgtacataaaaatacaagccgcggtgattatcaaaccaaagaacagtgtgctgatgtgtttcaatatgtcctgccatatgcaaaagctctatctaaaactggcttggttaaattacggagagtgctgcgggctatacgtaaacactttccgcagccaccttatgacttatttgttaacaaccctattgataatttcttggatggacctgactcatgtgaaaaaatactctctgaaatttgtgaaagcaatgaatctagggaagctatcctgaatgtattgttcccaggtgaaagaggctatgaagcattcaaaaaactctccactgccagctctgagccttattcagatgtttatgagaacttatattatttcatagctcaagccgaagatattagtgccaccgacaagcatacaggttttgttttgaaaaaggaaggagaagaattcgttgaacagagtgccaatattttcaagtatgatttgttgtacaatccattgcggtttgaaagctggcagaagctttccaatctttatgatgaggtggtatcttttacctctaccaattaactggatctgttttcttatatcaatcaattctgttgcataaccagtgttattatgacaggaagttgatctgttgctcaatgatggtagtaaacatataagcatcttggattggcgaacaaacacggatttaatcagaagggttgagatgggccgtcgacatagtcgacgctgcctattgatgagttcactactggccaaaactgcccctgagcagagcgaggcacatgaactgttggctcttgtgtactacgatagccttcaaaatgtggtgcctttttatgatcaaagagctactttgccagtgaaggattcatcatgggagacattttgtaaaaattctatgaagcactttgagaaggcttttgaaatcaaggagcagtggcttcatgcgttttaccttgggaaactgtgtgagaaactggggcattctttttctaaggcattatcatactacaacaaagccatgatgctgaatccaactgcagtcgaccctgtttacaggattcatgcatcacgcttgaagttactttacactcaaggcaaacagaatcttgaagctatacaggacttcatcttggatgcaattgtgggttgagaacaccctttacgcctttcatcaactacatcttcaggttgttgctgactacacatataaccagtcaacaaaagaaaatgtcttgagcatgctggggtcaatgactaaggttttgcagtcatcttctgataaaacatctttagacactaaagaggaaaataagttttttgagtccgatatactggataaagtgtggcacatcctttatgatgattgtctgtatgctcttggtacttgtgtggaaggggaactcaagcatttccacaaggcgagatacaagcttgcgcaaggatattatagaagaggtgaagcaggggacctggaacgggctaaggaagagctctcgttctgtttcaaatcttctcggtcttcctttacagtaaacatgtgggagattgatggcactgttagaaaaggaaggaggaaaaatccaaatgtgggtggatccagaaagaatctggaggtcagtttgtcagaaagttcacggaaattcattacgtgcattagaaaatatatgatactctatttaaacctgctggagaagaacacggacctgtggactcttgagaaggcttatacttatctgcgaacagataagaggtttgcattgtgtttaggtgatattgttcctgttggtcttgggaagtatattctagttctaacggcagcaattcataatcctgagattcgtcgagcttctggtgatgcttctgttgagcaattacttgagaaaatgttcactgtattcatggatcatgcgaacatgtgggctgatataagcaatataccagaggtgaacagtccagaattatcagaaagcaatctttacagctatatccaccagtacatccatttgctcgagagtgatgtacgactagatgttctagaaggactaaacgagaagataagaaagcgtttcaagacaccgaagttatcaaatagtaacttcgctaagatatgcaagcatgcttctctggcatggtgccggtgtattctcatcaaactggcctcaatcactccactgcctgaatccgcagatgcaaccaatcagcctgcaccattatccaatgggcttctactctatgttgacttgcaacctgatgagcttcttatctcatcccctgatgggcctgctcaattcaaagggcttgacatgaactggtttgagacacttaacagaattaaaaacatcccggtcaagcaaacatccgaagataacttggagactgctgttacgttaatgaagagcacttataacttttatcgggagagcccttgtggaacatttccttcaggtatcaatctctacacggttacaccatcacaagctcctattgaagggctaccgccaaccgctgctgtagttgagacgctcgacttaagtattccaagaaaactccttctgtgggtatacactctggttcatggtcgttactcaaatatatcctccgttgtaaagtattgcgacgagatgaagttaagaagtaaaagaggaaccccagctgcgtctgcttcgtcacaagttgtgcagccagtgtcgcatagtaccgtttcttcccaagttgtatctaaagaaaagagctcccaagttgaacccgctgaagcagcacaaaatccttctgatctagctgccacttgcgttcctgcataccaagaagttggtggtgctagtgcctcgcaaagtgccattgaggcccagaaagctactgctgcggcatctcagctcactcgcagtggttcatcaagggcaatggaaaatgcacaggacggcggggagaggaagtaacgagatagagttcgattttttttatcctctatgctacatcgtatggatgcatatgatcctgcctgacgattctcaggtctcagctctccgtggctccgtgtgcaaatctctgccacgggcgtgttttaacgcctgattggatggttgcccgctggcgcgcccggccagcctcgtacggccacttcggacgcatctgcatcttcggaggtacccgcagatgtagatgaatggccgtaaaatggtttggtctgcgtctctttacatataaccaaataaaaactcagataaagttaactcatgtggtggtctatgttgagatgatgcgggtaaccaatcgaacggttaacaaattcaggtcgtatgtatatcctggtttacagttagtgtttcctaagtgcatttgtagattatagagctgtcaagattgaacgatacatctgtaaggtgttacaaatgctaaatgctaatcctgattttgtggctgatgctaaaaacctgtggactcttaattaccacagactgaactttccctcattttggcccaacaaatacaatagcagaggaagagtttcagttggatttggtggaacggtaggagcgtaaaatatcacttt

SEQ ID NO: 217025 - DNA, 4477 bp, Zea Mays
atggagaactgcgagcgaacgataaaggggtttttgacattgaaaaatcttgcatctgttttccttcaacaaggttttgagttctacgataatgctcttcactgttacctacaagctgtagagcttgattcaaatgattcagttgtctggaatcatctgggaacactttcttgttcaatgggtttgctgagcgtatcaagatgggcatttgagcaagggcttgtatgcagcccaaacaactggaactgcatggagaaattgttggaggtgcttatatcaattcgtgatgaagtcgcatgcctttctgtagcaaatttaatacttaatagttggccatcacatcatcgtgctttacatgtgaagaagaccattgaatgtgctgaaccggatgggcaagatggctggagcccactaatgtctatcgttggtgatattcaatcattgctcttgacaatcatgtgtgctgctgtcaagataatactatcgagaaaactctcatgctctggaacctcctatcaggttgaccacttggaatgttcctgtctcatagatgcagccattgcattttgcaagctccagcaccttgatcctacaatatccatcaaaactcaggttgacttaattgttgcagtccatgatttgcttgctgagtatgggctctgttgtgctggaagagatggtgaaggggaggaagggatgttcctaaagttcgcaatcaaacatctcatggctctagatgtgaaactaaaatctcaactcaattcaaatgggatggaagaagatgcagttccaaaagacgtcagagcagaagacagtgtggccgatgaaccatcggttagtgacaataagcagaactccgatgatgaggaagaatcggagttagatgagattcagtcatgtcttgatagtgccttggaccaggcttttttctgcctgtatggtttgaagatcaacccagattcttgcagtgaagatgatctcgctgtacataaaaatacaagccgcggtgattatcaaaccaaagaacagtgtgctgatgtgtttcaatatgtcctgccatatgcaaaagctctatctaaaactggcttggttaaattacggagagtgctgcgggctatacgtaaacactttccgcagccaccttatgacttatttgttaacaaccctattgataatttcttggatggacctgactcatgtgaaaaaatactctctgaaatttgtgaaagcaatgaatctagggaagctatcctgaatgtattgttcccaggtgaaagaggctatgaagcattcaaaaaactctccactgccagctctgagccttattcagatgtttatgagaacttatattatttcatagctcaagccgaagatattagtgccaccgacaagcatacaggttttgttttgaaaaaggaaggagaagaattcgttgaacagagtgccaatattttcaagtatgatttgttgtacaatccattgcggtttgaaagctggcagaagctttccaatctttatgatgaggtggaagttgatctgttgctcaatgatggtagtaaacatataagcatcttggattggcgaacaaacacggatttaatcagaagggttgagatgggccgtcgacatagtcgacgctgcctattgatgagttcactactggccaaaactgcccctgagcagagcgaggcacatgaactgttggctcttgtgtactacgatagccttcaaaatgtggtgcctttttatgatcaaagagctactttgccagtgaaggattcatcatgggagacattttgtaaaaattctatgaagcactttgagaaggcttttgaaatcaaggagcagtggcttcatgcgttttaccttgggaaactgtgtgagaaactggggcattctttttctaaggcattatcatactacaacaaagccatgatgctgaatccaactgcagtcgaccctgtttacaggattcatgcatcacgcttgaagttactttacactcaaggcaaacagaatcttgaagctatacaggttgttgctgactacacatataaccagtcaacaaaagaaaatgtcttgagcatgctggggtcaatgactaaggttttgcagtcatcttctgataaaacatctttagacactaaagaggaaaataagttttttgagtccgatatactggataaagtgtggcacatcctttatgatgattgtctgtatgctcttggtacttgtgtggaaggggaactcaagcatttccacaaggcgagatacaagcttgcgcaaggatattatagaagaggtgaagcaggggacctggaacgggctaaggaagagctctcgttctgtttcaaatcttctcggtcttcctttacagtaaacatgtgggagattgatggcactgttagaaaaggaaggaggaaaaatccaaatgtgggtggatccagaaagaatctggaggtcagtttgtcagaaagttcacggaaattcattacgtgcattagaaaatatatgatactctatttaaacctgctggagaagaacacggacctgtggactcttgagaaggcttatacttatctgcgaacagataagagggtacctcccaactacactaactatgcgaggctatactttttctgcacattaaagaattccttttcctttctcttctgtagtttgcattgtgtttaggtgatattgttcctgttggtcttgggaagtatattctagttctaacggcagcaattcataatcctgagattcgtcgagcttctggtgatgcttctgttgagcaattacttgagaaaatgttcactgtattcatggatcatgcgaacatgtgggctgatataagcaatataccagaggtgaacagtccagaattatcagaaagcaatctttacagctatatccaccagtacatccatttgctcgagagtgatgtacgactagatgttctagaaggactaaacgagaagataagaaagcgtttcaagacaccgaagttatcaaatagtaacttcgctaagatatgcaagcatgcttctctggcatggtgccggtgtattctcatcaaactggcctcaatcactccactgcctgaatccgcagatgcaaccaatcagcctgcaccattatccaatgggcttctactctatgttgacttgcaacctgatgagcttcttatctcatcccctgatgggcctgctcaattcaaagggcttgacatgaactggtttgagacacttaacagaattaaaaacatcccggtcaagcaaacatccgaagataacttggagactgctgttacgttaatgaagagcacttataacttttatcgggagagcccttgtggaacatttccttcaggtatcaatctctacacggttacaccatcacaagctcctattgaagggctaccgccaaccgctgctgtagttgagacgctcgacttaagtattccaagaaaactccttctgtgggtatacactctggttcatggtcgttactcaaatatatcctccgttgtaaagtattgcgacgagatgaagttaagaagtaaaagaggaaccccagctgcgtctgcttcgtcacaagttgtgcagccagtgtcgcatagtaccgtttcttcccaagttgtatctaaagaaaagagctcccaagttgaacccgctgaagcagcacaaaatccttctgatctagctgccacttgcgttcctgcataccaagaagttggtggtgctagtgcctcgcaaagtgccattgaggcccagaaagctactgctgcggcatctcagctcactcgcagtggttcatcaagggcaatggaaaatgcacaggacggcggggagaggaagtaacgagatagagttcgattttttttatcctctatgctacatcgtatggatgcatatgatcctgcctgacgattctcaggtctcagctctccgtggctccgtgtgcaaatctctgccacgggcgtgttttaacgcctgattggatggttgcccgctggcgcgcccggccagcctcgtacggccacttcggacgcatctgcatcttcggaggtacccgcagatgtagatgaatggccgtaaaatggtttggtctgcgtctctttacatataaccaaataaaaactcagataaagttaactcatgtggtggtctatgttgagatgatgcgggtaaccaatcgaacggttaacaaattcaggtcgtatgtatatcctggtttacagttagtgtttcctaagtgcatttgtagattatagagctgtcaagattgaacgatacatctgtaaggtgttacaaatgctaaatgctaatcctgattttgtggctgatgctaaaaacctgtggactcttaattaccacagactgaactttccctcattttggcccaacaaatacaatagcagaggaagagtttcagttggatttggtggaacggtaggagcgtaaaatatcacttt

SEQ ID NO: 217026 - DNA, 6029 bp, Zea Mays
atggagaactgcgagcgaacgataaaggggtttttgacattgaaaaatcttgcatctgttttccttcaacaaggttttgagttctacgataatgctcttcactgttacctacaagctgtagagcttgattcaaatgattcagttgtctggaatcatctgggaacactttcttgttcaatgggtttgctgagcgtatcaagatgggcatttgagcaagggcttgtatgcagcccaaacaactggaactgcatggagaaattgttggaggtgcttatatcaattcgtgatgaagtcgcatgcctttctgtagcaaatttaatacttaatagttggccatcacatcatcgtgctttacatgtgaagaagaccattgaatgtgctgaaccggtaccttttgcacctcgtggtattgacatacttgaacccaagcatgcaaaactcatcttttcgaataaaagaaaatccgttgatgatgaaatctgtcaagaaatagggacaaagaagagtaaacacagtgctacattgcaattgaatgaagcaaaatggttggcccttttagatggtatcctaagcttaataagtgcaaacaccgagaaggctggtgaatataattgctcaaatactgttgataggtgttcaatcagtgagggtagtgccaaggggcttgcttataacattatagacgttgtcatatctacagatacattgaaaagtgtggaaactgctggtggaaatggaaatgattctcaccatggtgagattctgccatatgattgcaaagctacagttaaagagaaagatggtaattcagatagggaacatccccatgaaagacggagcacacgccttgagaggctgcgaagtcgcaaatctggaaaagatgaaaatggatctgatggtaaagatatatcccatgctatgacccagtttctagaatcatttattctaaaaggaccaagccctgtagaaaaggcttattgttctggaaatgccgatgcttcaaatcctgatactcataactatacatccaacgaggaggcaaatgatcttaagcaatttctatgcaagatatccaagaattttggccctcatcacattggttatatgttacttgaggagatggctcatctcaaagtgccattccaagattattttgtcaagttaattgaactggacaaacttactagaggctgggctgaagacagatctgcatcgtgcaatttatttctagctgaactgtactatgatcgggctttgtgttctggaagtccaccaacatcttctgagctgtctgattcatcttaccatctttgtaagatcattgaatcagtagctctggaactgccattcaacatatctgttagagaaatacattccaccaacttggatacggaaagtagcaggacaggtgaatcttcaagtgaattaatcgagagaagtcatgaaaatggtcacatcaacatgcttaatgaccaaaagtccaaacatgattcttcttcaaacatgaattgtgcattctggattcgcttcttctggctgagtggttgcctgtccctttcatcagactgcaaagagaaagcttataaggagttcaatattgccctgtcaatactaaaaaatagcaacaaaactaaaagctatggagaggtcattcttctacctcacaccaaacttgtaaaatcacttacaactgacaggattcttcgtgaaatcaacttgatcaggcttgaatctctactttggaataatgatgagaatatcaacaaaataactcatacagagttcatgcagttgctacctccacttttgctttccaccaaagatgcctacgttggaaatgcatatggtccacaaagagaaagcgagaatgttatttcacttgagttgtctgccttggatgtcttaatatctgcatgtgaaaaagcaaaaccaatgaacatccaggtatatcttgactcccatcgaagaaaaattcaagttctaactgtggcagccggcatggttggatctgtcacacccctgaaagcgaaaggttcaagcaatgtggaatttgtggaagcaatgaacaggaaccggctagaaaatgttgtggaagcagtcaaagatgtgtctcgaaatgccagtaaagcaaaagacataatcgatcaatgcgataattccgatgggcaagatggctggagcccactaatgtctatcgttggtgatattcaatcattgctcttgacaatcatgtgtgctgctgtcaagataatactatcgagaaaactctcatgctctggaacctcctatcaggttgaccacttggaatgttcctgtctcatagatgcagccattgcattttgcaagctccagcaccttgatcctacaatatccatcaaaactcaggttgacttaattgttgcagtccatgatttgcttgctgagtatgggctctgttgtgctggaagagatggtgaaggggaggaagggatgttcctaaagttcgcaatcaaacatctcatggctctagatgtgaaactaaaatctcaactcaattcaaatgggatggaagaagatgcagttccaaaagacgtcagagcagaagacagtgtggccgatgaaccatcggttagtgacaataagcagaactccgatgatgaggaagaatcggagttagatgagattcagtcatgtcttgatagtgccttggaccaggcttttttctgcctgtatggtttgaagatcaacccagattcttgcagtgaagatgatctcgctgtacataaaaatacaagccgcggtgattatcaaaccaaagaacagtgtgctgatgtgtttcaatatgtcctgccatatgcaaaagctctatctaaaactggcttggttaaattacggagagtgctgcgggctatacgtaaacactttccgcagccaccttatgacttatttgttaacaaccctattgataatttcttggatggacctgactcatgtgaaaaaatactctctgaaatttgtgaaagcaatgaatctagggaagctatcctgaatgtattgttcccaggtgaaagaggctatgaagcattcaaaaaactctccactgccagctctgagccttattcagatgtttatgagaacttatattatttcatagctcaagccgaagatattagtgccaccgacaagcatacaggttttgttttgaaaaaggaaggagaagaattcgttgaacagagtgccaatattttcaagtatgatttgttgtacaatccattgcggtttgaaagctggcagaagctttccaatctttatgatgaggaagttgatctgttgctcaatgatggtagtaaacatataagcatcttggattggcgaacaaacacggatttaatcagaagggttgagatgggccgtcgacatagtcgacgctgcctattgatgagttcactactggccaaaactgcccctgagcagagcgaggcacatgaactgttggctcttgtgtactacgatagccttcaaaatgtggtgcctttttatgatcaaagagctactttgccagtgaaggattcatcatgggagacattttgtaaaaattctatgaagcactttgagaaggcttttgaaatcaaggagcagtggcttcatgcgttttaccttgggaaactgtgtgagaaactggggcattctttttctaaggcattatcatactacaacaaagccatgatgctgaatccaactgcagtcgaccctgtttacaggattcatgcatcacgcttgaagttactttacactcaaggcaaacagaatcttgaagctatacaggttgttgctgactacacatataaccagtcaacaaaagaaaatgtcttgagcatgctggggtcaatgactaaggttttgcagtcatcttctgataaaacatctttagacactaaagaggaaaataagttttttgagtccgatatactggataaagtgtggcacatcctttatgatgattgtctgtatgctcttggtacttgtgtggaaggggaactcaagcatttccacaaggcgagatacaagcttgcgcaaggatattatagaagaggtgaagcaggggacctggaacgggctaaggaagagctctcgttctgtttcaaatcttctcggtcttcctttacagtaaacatgtgggagattgatggcactgttagaaaaggaaggaggaaaaatccaaatgtgggtggatccagaaagaatctggagtttgcattgtgtttaggtgatattgttcctgttggtcttgggaagtatattctagttctaacggcagcaattcataatcctgagattcgtcgagcttctggtgatgcttctgttgagcaattacttgagaaaatgttcactgtattcatggatcatgcgaacatgtgggctgatataagcaatataccagaggtgaacagtccagaattatcagaaagcaatctttacagctatatccaccagtacatccatttgctcgagagtgatgtacgactagatgttctagaaggactaaacgagaagataagaaagcgtttcaagacaccgaagttatcaaatagtaacttcgctaagatatgcaagcatgcttctctggcatggtgccggtgtattctcatcaaactggcctcaatcactccactgcctgaatccgcagatgcaaccaatcagcctgcaccattatccaatgggcttctactctatgttgacttgcaacctgatgagcttcttatctcatcccctgatgggcctgctcaattcaaagggcttgacatgaactggtttgagacacttaacagaattaaaaacatcccggtcaagcaaacatccgaagataacttggagactgctgttacgttaatgaagagcacttataacttttatcgggagagcccttgtggaacatttccttcaggtatcaatctctacacggttacaccatcacaagctcctattgaagggctaccgccaaccgctgctgtagttgagacgctcgacttaagtattccaagaaaactccttctgtgggtatacactctggttcatggtcgttactcaaatatatcctccgttgtaaagtattgcgacgagatgaagttaagaagtaaaagaggaaccccagctgcgtctgcttcgtcacaagttgtgcagccagtgtcgcatagtaccgtttcttcccaagttgtatctaaagaaaagagctcccaagttgaacccgctgaagcagcacaaaatccttctgatctagctgccacttgcgttcctgcataccaagaagttggtggtgctagtgcctcgcaaagtgccattgaggcccagaaagctactgctgcggcatctcagctcactcgcagtggttcatcaagggcaatggaaaatgcacaggacggcggggagaggaagtaacgagatagagttcgattttttttatcctctatgctacatcgtatggatgcatatgatcctgcctgacgattctcaggtctcagctctccgtggctccgtgtgcaaatctctgccacgggcgtgttttaacgcctgattggatggttgcccgctggcgcgcccggccagcctcgtacggccacttcggacgcatctgcatcttcggaggtacccgcagatgtagatgaatggccgtaaaatggtttggtctgcgtctctttacatataaccaaataaaaactcagataaagttaactcatgtggtggtctatgttgagatgatgcgggtaaccaatcgaacggttaacaaattcaggtcgtatgtatatcctggtttacagttagtgtttcctaagtgcatttgtagattatagagctgtcaagattgaacgatacatctgtaaggtgttacaaatgctaaatgctaatcctgattttgtggctgatgctaaaaacctgtggactcttaattaccacagactgaactttccctcattttggcccaacaaatacaatagcagaggaagagtttcagttggatttggtggaacggtaggagcgtaaaatatcacttt

SEQ ID NO: 217027 - DNA, 1779 bp, Zea Mays
gggcggccgactgcagaggaggggcggcttcaggatgggcaagatggctggagcccactaatgtctatcgttggtgatattcaatcattgctcttgacaatcatgtgtgctgctgtcaagataatactatcgagaaaactctcatgctctggaacctcctatcaggttgaccacttggaatgttcctgtctcatagatgcagccattgcattttgcaagctccagcaccttgatcctacaatatccatcaaaactcaggttgacttaattgttgcagtccatgatttgcttgctgagtatgggctctgttgtgctggaagagatggtgaaggggaggaagggatgttcctaaagttcgcaatcaaacatctcatggctctagatgtgaaactaaaatctcaactcaattcaaatgggatggaagaagatgcagttccaaaagacgtcagagcagaagacagtgtggccgatgaaccatcggttagtgacaataagcagaactccgatgatgaggaagaatcggagttagatgagattcagtcatgtcttgatagtgccttggaccaggcttttttctgcctgtatggtttgaagatcaacccagattcttgcagtgaagatgatctcgctgtacataaaaatacaagccgcggtgattatcaaaccaaagaacagtgtgctgatgtgtttcaatatgtcctgccatatgcaaaagctctatctaaaactggcttggttaaattacggagagtgctgcgggctatacgtaaacactttccgcagccaccttatgacttatttgttaacaaccctattgataatttcttggatggacctgactcatgtgaaaaaatactctctgaaatttgtgaaagcaatgaatctagggaagctatcctgaatgtattgttcccaggtgaaagaggctatgaagcattcaaaaaactctccactgccagctctgagccttattcagatgtttatgagaacttatattatttcatagctcaagccgaagatattagtgccaccgacaagcatacaggttttgttttgaaaaaggaaggagaagaattcgttgaacagagtgccaatattttcaagtatgatttgttgtacaatccattgcggtttgaaagctggcagaagctttccaatctttatgatgaggtggaagttgatctgttgctcaatgatggtagtaaacatataagcatcttggattggcgaacaaacacggatttaatcagaagggttgagatgggccgtcgacatagtcgacgctgcctattgatgagttcactactggccaaaactgcccctgagcagagcgaggcacatgaactgttggctcttgtgtactacgatagccttcaaaatgtggtgcctttttatgatcaaagagctactttgccagtgaaggattcatcatgggagacattttgtaaaaattctatgaagcactttgagaaggcttttgaaatcaaggagcagtggcttcatgcgttttaccttgggaaactgtgtgagaaactggggcattctttttctaaggcattatcatactacaacaaagccatgatgctgaatccaactgcagtcgaccctgtttacaggattcatgcatcacgcttgaagttactttacactcaaggcaaacagaatcttgaagctatacaggaatcaggttgttgccgtgacctactgcccacaactgacctggcctggcttttcgtgaacttggcatgttatattagctgtctaacagctgtgggatga

SEQ ID NO: 217028 - DNA, 4090 bp, Zea Mays
atgcttgtctcattgtcattgtattactgagattaccttttgatgctgccaggaatttgcgctctctcagaagtaccatgagggactcctcaagttgcaacaaaaagactatgcaaaagctcgtgaacttctcgaggatgttttaaaggacccactaatatcaaatgttcaggctgataacattggcagtgatcagcatttgctgcagctaaggtttttgacattgaaaaatcttgcatctgttttccttcaacaaggttttgagttctacgataatgctcttcactgttacctacaagctgtagagcttgattcaaatgattcagttgtctggaatcatctgggaacactttcttgttcaatgggtttgctgagcgtatcaagatgggcatttgagcaagggcttgtatgcagcccaaacaactggaactgcatggagaaattgttggaggtgcttatatcaattcgtgatgaagtcgcatgcctttctgtagcaaatttaatacttaatagttggccatcacatcatcgtgctttacatgtgaagaagaccattgaatgtgctgaaccggtaccttttgcacctcgtggtattgacatacttgaacccaagcatgcaaaactcatcttttcgaataaaagaaaatccgttgatgatgaaatctgtcaagaaatagggacaaagaagagtaaacacagtgctacattgcaattgaatgaagcaaaatggttggcccttttagatggtatcctaagcttaataagtgcaaacaccgagaaggctggtgaatataattgctcaaatactgttgataggtgttcaatcagtgagggtagtgccaaggggcttgcttataacattatagacgttgtcatatctacagatacattgaaaagtgtggaaactgctggtggaaatggaaatgattctcaccatggtgagattctgccatatgattgcaaagctacagttaaagagaaagatggtaattcagatagggaacatccccatgaaagacggagcacacgccttgagaggctgcgaagtcgcaaatctggaaaagatgaaaatggatctgatggtaaagatatatcccatgctatgacccagtttctagaatcatttattctaaaaggaccaagccctgtagaaaaggcttattgttctggaaatgccgatgcttcaaatcctgatactcataactatacatccaacgaggaggcaaatgatcttaagcaatttctatgcaagatatccaagaattttggccctcatcacattggttatatgttacttgaggagatggctcatctcaaagtgccattccaagattattttgtcaagttaattgaactggacaaacttactagaggctgggctgaagacagatctgcatcgtgcaatttatttctagctgaactgtactatgatcgggctttgtgttctggaagtccaccaacatcttctgagctgtctgattcatcttaccatctttgtaagatcattgaatcagtagctctggaactgccattcaacatatctgttagagaaatacattccaccaacttggatacggaaagtagcaggacaggtgaatcttcaagtgaattaatcgagagaagtcatgaaaatggtcacatcaacatgcttaatgaccaaaagtccaaacatgattcttcttcaaacatgaattgtgcattctggattcgcttcttctggctgagtggttgcctgtccctttcatcagactgcaaagagaaagcttataaggagttcaatattgccctgtcaatactaaaaaatagcaacaaaactaaaagctatggagaggtcattcttctacctcacaccaaacttgtaaaatcacttacaactgacaggattcttcgtgaaatcaacttgatcaggcttgaatctctactttggaataatgatgagaatatcaacaaaataactcatacagagttcatgcagttgctacctccacttttgctttccaccaaagatgcctacgttggaaatgcatatggtccacaaagagaaagcgagaatgttatttcacttgagttgtctgccttggatgtcttaatatctgcatgtgaaaaagcaaaaccaatgaacatccaggtatatcttgactcccatcgaagaaaaattcaagttctaactgtggcagccggcatggttggatctgtcacacccctgaaagcgaaaggttcaagcaatgtggaatttgtggaagcaatgaacaggaaccggctagaaaatgttgtggaagcagtcaaagatgtgtctcgaaatgccagtaaagcaaaagacataatcgatcaatgcgataattccgatgggcaagatggctggagcccactaatgtctatcgttggtgatattcaatcattgctcttgacaatcatgtgtgctgctgtcaagataatactatcgagaaaactctcatgctctggaacctcctatcaggttgaccacttggaatgttcctgtctcatagatgcagccattgcattttgcaagctccagcaccttgatcctacaatatccatcaaaactcaggttgacttaattgttgcagtccatgatttgcttgctgagtatgggctctgttgtgctggaagagatggtgaaggggaggaagggatgttcctaaagttcgcaatcaaacatctcatggctctagatgtgaaactaaaatctcaactcaattcaaatgggatggaagaagatgcagttccaaaagacgtcagagcagaagacagtgtggccgatgaaccatcggttagtgacaataagcagaactccgatgatgaggaagaatcggagttagatgagattcagtcatgtcttgatagtgccttggaccaggcttttttctgcctgtatggtttgaagatcaacccagattcttgcagtgaagatgatctcgctgtacataaaaatacaagccgcggtgattatcaaaccaaagaacagtgtgctgatgtgtttcaatatgtcctgccatatgcaaaagctctatctaaaactggcttggttaaattacggagagtgctgcgggctatacgtaaacactttccgcagccaccttatgacttatttgttaacaaccctattgataatttcttggatggacctgactcatgtgaaaaaatactctctgaaatttgtgaaagcaatgaatctagggaagctatcctgaatgtattgttcccaggtgaaagaggctatgaagcattcaaaaaactctccactgccagctctgagccttattcagatgtttatgagaacttatattatttcatagctcaagccgaagatattagtgccaccgacaagcatacaggttttgttttgaaaaaggaaggagaagaattcgttgaacagagtgccaatattttcaagtatgatttgttgtacaatccattgcggtttgaaagctggcagaagctttccaatctttatgatgaggtggaagttgatctgttgctcaatgatggtagtaaacatataagcatcttggattggcgaacaaacacggatttaatcagaagggttgagatgggccgtcgacatagtcgacgctgcctattgatgagttcactactggccaaaactgcccctgagcagagcgaggcacatgaactgttggctcttgtgtactacgatagccttcaaaatgtggtgcctttttatgatcaaagagctactttgccagtgaaggattcatcatgggagacattttgtaaaaattctatgaagcactttgagaaggcttttgaaatcaaggagcagtggcttcatgcgttttaccttgggaaactgtgtgagaaactggggcattctttttctaaggcattatcatactacaacaaagccatgatgctgaatccaactgcagtcgaccctgtttacaggattcatgcatcacgcttgaagttactttacactcaaggcaaacagaatcttgaagctatacaggaatcaggttgttgccgtgacctactgcccacaactgacctggcctggcttttcgtgaacttggcatgttatattagctgtctaacagctgtgggatga

SEQ ID NO: 217029 - DNA, 3226 bp, Zea Mays
tgttgtttccaaaaggctggtaaaagatgctctaacaaatctgaattgggtggctgatataaggggtgcactttcagttagggcgcttgcacaggttttggatctctgtgacttgctggagggcttagttcttcaacctgggattcctgataagcattcttggaagttcagcgcgtcgggggattactcctctagttctgcctaccaggttcttctccttggagctgttgagtttaggccggctgaacggatttggaagacctgggcaccaaggaaatgcaaattttttatgtggctggttgtgcatgatagatgttggacagctgacaggttggcaaaaaggggaatggatcatcccgtctgctgtccgctttgtgaccaggcggatgaaactattaatcacttattggtcgagtgcagctttgcgaggcagttttggttccttttccttcggtctggggacttccaggtgctctgtccctctgcaggggatggctgctttgactcttggtgggagaagagtgccgaggtggtgggcaagcctttgtcggatggtttcaactcgctgaaattgcaggaatgccctttgggaacatacaaaaatgttactggatcttctaaatctttatgctttccatgccctccgggtgaactccctcatcgtgctatatacacaaatgttcgaggaggtgctgctgaaactccatgtccatacagatgcgtgtctgacagatatcgcatgcctcactgttatacagctctggaggagttaatatatacttttgggggaccttggctatttggtctatttctttcaggcctccttatcttgttagctcttgttttaagtgttgctcgtatgaagtttgttggcactgatgagttacctgggccggcaccaactcatcaagggtcccaaattgatcattcctttcccttcctagaatcactaaatgaggtcattgaaactaatagggctgaagagtcacaaggtcatgtacacaggatgtatttcatgggtcccaacaccttcagtgaaccttggcatctcccacacagtccgccagaacaaataacagagatcgtatatgaagatgcatttaatagatttgtcgatgagataaacacccttgcagcttatcaatggtgggaaggatctatttacagtatcctctgtatacttgcctaccccctggcttggtcatggcagcagtggcgtaggagaaagaaattacagagacttcgtgaatttgttcgctctgaatatgatcattcatgcttaaagtcttgccgttcacgtgcactctacgaaggcctcaaggtgactgcaaccccagatctaatgctagggtatttagatttcttccttgggggagatgaaaaaaggcctgatcttccacctcgtcttcgtcaaaggtttccaatgtccctgatctttggaggtgatggaagttacatggctccgttttcacttaatagtgacagtgtgcttactagtcttatgagccaggaactcgtgccatatctgttacaggctgttccctcatggatatggcaccgtcttgtagctggattgaatgcacagctgcgtttggtccgtggtggaaatctgaaagtaacgtttcttccggtcatcaactggcttgaatctcatgcaaatccctctttagctgagaatggtatccgtgttgatcttgcctggttccaagctacagcattagggtactgccaacttggtcttcttgtttatgctgttgaaggagaagctgcacttaccgaacctgatggaagccctagagtaaaaatagagcaacacacacccacacagaacatgctcgctgatactcaactaagtcagtccaggattaaggatgctctaatgcgcaaaaggatcactggtggagttctcaatagtaatagcttaaggacactaaaagacaggagagatttgttttacccattttctcatatcttgcacaattcgaaaccagttgggcatcaggatcttgttggtttggtaatctcaatactgcttcttgcagatttcagcttagttttgcttacttttctccagctgtattcatattctatggtcgatgttctcttggttttgtttattctaccgcttgggattttgtcgccttttcctgccggtataaatgctctatttagtcatggaccgaggcggtcagcaggccttgctcgtgtgtatgcattgtggaacataacttcactggtcaatgttgttgtggctttcatatgtggttttgtacattataagttatcaaccaaaacacacccgagcgtgcagccctggaacctgggaacggatgaaagcggttggtggctcttcccaaccggactcatgctgttgaaatgcattcaagcaaggcttgttgattggcacgttgctaatttagagattcaagaccgtgcggtatatagcaatgacccaaacatattttggcagtcatgacccctgttgtaactgagggtccttctgggaagctttttacaactcgattttttgggagttgataaaaggaagagtgcgggcaaaggcctttctttattgaccaggcaaaagaaggaactacagaggttatatagatgcgtacttccgcatcccccgctgatcatgtgcagttgcaaacggtgttctgttgtatatataaaaggtgttcttgatccattctttgtaggatttagacaccatagagtttgtttataagcaatgtgaaagctaacctaaagagacatggggggatgtggatttgttgttcttttgctaccatgccctggcccttgatgtttgttgagatgggcagaggggcaactcaagtcatcgagatgcaaacgcctcttgttgtatgcgatcagatgggtaaaacaattatattattaacatgttccatggtcttcgctgacagcaaggctggtaaagctgtgagaaatcggtgtggtctgggtgatgtgccgtttgcagctttgcaattcatcgagggatgcaaaaaccttctgacatatctgacgctgtgtcacttgcagacctgtagtggtggatggatggctaagtgggtcacctaaacaaaaccgggtgctatgtactcggcagagaatgtcctcgacgatggatggacaactttaggggctgtttggaactggttttaagtctaaaaccaccgtaaattacggatctgtaaaattttacaatcctagatccaag

SEQ ID NO: 217030 - DNA, 2227 bp, Zea Mays
cttgggatcactgatctttggcttttgagcgtggcgcttcgagctaggtggccttggctccagagaaccgatcactctaagccttggtcggttctccctgttcaggcctgtggtacggtggaagccttgatcaatgttgcagttgtgtctcaattgggtgctgctgaaactccatgtccatacagatgcgtgtctgacagatatcgcatgcctcactgttatacagctctggaggagttaatatatacttttgggggaccttggctatttggtctatttctttcaggcctccttatcttgttagctcttgttttaagtgttgctcgtatgaagtttgttggcactgatgagttacctgggccggcaccaactcatcaagggtcccaaattgatcattcctttcccttcctagaatcactaaatgaggtcattgaaactaatagggctgaagagtcacaaggtcatgtacacaggatgtatttcatgggtcccaacaccttcagtgaaccttggcatctcccacacagtccgccagaacaaataacagagatcgtatatgaagatgcatttaatagatttgtcgatgagataaacacccttgcagcttatcaatggtgggaaggatctatttacagtatcctctgtatacttgcctaccccctggcttggtcatggcagcagtggcgtaggagaaagaaattacagagacttcgtgaatttgttcgctctgaatatgatcattcatgcttaaagtcttgccgttcacgtgcactctacgaaggcctcaaggtgactgcaaccccagatctaatgctagggtatttagatttcttccttgggggagatgaaaaaaggcctgatcttccacctcgtcttcgtcaaaggtttccaatgtccctgatctttggaggtgatggaagttacatggctccgttttcacttaatagtgacagtgtgcttactagtcttatgagccaggctgttccctcatggatatggcaccgtcttgtagctggattgaatgcacagctgcgtttggtccgtggtggaaatctgaaagtaacgtttcttccggtcatcaactggcttgaatctcatgcaaatccctctttagctgagaatggtatccgtgttgatcttgcctggttccaagctacagcattagggtactgccaacttggtcttcttgtttatgctgttgaaggagaagctgcacttaccgaacctgatggaagccctagagtaaaaatagagcaacacacacccacacagaacatgctcgctgatactcaactaagtcagtccaggattaaggatgctctaatgcgcaaaaggatcactggtggagttctcaatagtaatagcttaaggacactaaaagacaggagagatttgttttacccattttctcatatcttgcacaattcgaaaccagttgggcatcaggatcttgttggtttggtaatctcaatactgcttcttgcagatttcagcttagttttgcttacttttctccagctgtattcatattctatggtcgatgttctcttggttttgtttattctaccgcttgggattttgtcgccttttcctgccggtataaatgctctatttagtcatggaccgaggcggtcagcaggccttgctcgtgtgtatgcattgtggaacataacttcactggtcaatgttgttgtggctttcatatgtggttttgtacattataagttatcaaccaaaacacacccgagcgtgcagccctggaacctgggaacggatgaaagcggttggtggctcttcccaaccggactcatgctgttgaaatgcattcaagcaaggcttgttgattggcacgttgctaatttagagattcaagaccgtgcgatgggtaaaacaattatattattaacatgttccatggtcttcgctgacagcaaggctggtaaagctgtgagaaatcggtgtggtctgggtgatgtgccgtttgcagctttgcaattcatcgagggatgcaaaaaccttctgacatatctgacgctgtgtcacttgcagacctgtagtggtggatggatggctaagtgggtcacctaaacaaaaccgggtgctatgtactcggcagagaatgtcctcgacgatggatggacaactttaggggctgtttggaactggttttaagtctaaaaccaccgtaaattacggatctgtaaaattttacaatcctagatccaag

SEQ ID NO: 217031 - DNA, 4383 bp, Zea Mays
gggattgcaatttcagaaattttgggctgctcaattcagccctcattacccttttgccaaagcttgagggtgcagcccttgtgaaggacttccgtccgatcagcctcatacatagcttcgccaagctggtaacaaagatgatggcaaataggctggctggacacttgggtgcaatggtttcacccaatcagacggcttttatcaaaaaaaggttcattcttgacaacttcatattggtgcagcgtacggccagatatctccatcaacaaagacaagctcgtatcctcttcaagttagacatttctaaggcttttgattcggtgtcatggccgtttctcattgaggttttgaggaaaatggggtttgggcagatttggtgtgatgttgtgtgtggactgttggcttcttcctccacaagaattttgctaaatggcgttcctggggagatcatttcacaccagaggggccttaggcaaggagacccactatcccctatgttgttcattttggttatggatgttctgaacttgctcattcaaaaggcttccgatgaagggttacttcagcagttatcttctgggactttacatcacaggctttctctctacgcggatgacgcggtggtttttcttaggccggtggcttcagacatcagtttggtcctggagatccttcggctttttggggaagcctcggggctcaagaccaatgtcctgaaaagtagtgtgttccccattcgttgtaccgaagatgatttgttgcgggtccaagcttctctcccctgccccatttctgattttccgtgtcaatatcttggactgcccctgtccttgggaaagctttcaaaggcccagttacaggcattggtggacaaggcagctagtgttctcccaggttggaaggccgacctgatgacaaaggcgggtcgtgctgtttatgttcagtttgttctcacagcaaaaatgatttatgctgcgatggctttggacctccctatttggaccatcaaagctattgacaagataagaagaggtttcctttggaaaggaagaaaacaagccaatggtggtcactgtttagtggcgtggggtaaggtcactaggcctaaagctctgggcggccttgggatcactgatctttggcttttgagcgtggcgcttcgagctaggtggccttggctccagagaaccgatcactctaagccttggtcggttctccctgttcaggcctgtggtacggtggaagccttgatcaatgttgcagttgtgtctcaattgggtgatggacaggatatcctcttttggaaggatcggtggctgaatggtagaagcatcagtgaggtggcacctgaggttcttgagcatgtatctaagtgtgttgtttccaaaaggctggtaaaagatgctctaacaaatctgaattgggtggctgatataaggggtgcactttcagttagggcgcttgcacaggttttggatctctgtgacttgctggagggcttagttcttcaacctgggattcctgataagcattcttggaagttcagcgcgtcgggggattactcctctagttctgcctaccaggttcttctccttggagctgttgagtttaggccggctgaacggagtgctctgtccctctgcaggggatggctgctttgactcttggtgggagaagagtgccgaggtggtgggcaagcctttgtcggatggtttcaactcgctgaaattgcaggaatgccctttgggaacatacaaaaatgttactggatcttctaaatctttatgctttccatgccctccgggtgaactccctcatcgtgctatatacacaaatgttcgaggaggtgctgctgaaactccatgtccatacagatgcgtgtctgacagatatcgcatgcctcactgttatacagctctggaggagttaatatatacttttgggggaccttggctatttggtctatttctttcaggcctccttatcttgttagctcttgttttaagtgttgctcgtatgaagtttgttggcactgatgagttacctgggccggcaccaactcatcaagggtcccaaattgatcattcctttcccttcctagaatcactaaatgaggtcattgaaactaatagggctgaagagtcacaaggtcatgtacacaggatgtatttcatgggtcccaacaccttcagtgaaccttggcatctcccacacagtccgccagaacaaataacagagatcgtatatgaagatgcatttaatagatttgtcgatgagataaacacccttgcagcttatcaatggtgggaaggatctatttacagtatcctctgtatacttgcctaccccctggcttggtcatggcagcagtggcgtaggagaaagaaattacagagacttcgtgaatttgttcgctctgaatatgatcattcatgcttaaagtcttgccgttcacgtgcactctacgaaggcctcaaggtgactgcaaccccagatctaatgctagggtatttagatttcttccttgggggagatgaaaaaaggcctgatcttccacctcgtcttcgtcaaaggtttccaatgtccctgatctttggaggtgatggaagttacatggctccgttttcacttaatagtgacagtgtgcttactagtcttatgagccaggaactcgtgccatatctgttacaggctgttccctcatggatatggcaccgtcttgtagctggattgaatgcacagctgcgtttggtccgtggtggaaatctgaaagtaacgtttcttccggtcatcaactggcttgaatctcatgcaaatccctctttagctgagaatggtatccgtgttgatcttgcctggttccaagctacagcattagggtactgccaacttggtcttcttgtttatgctgttgaaggagaagctgcacttaccgaacctgatggaagccctagagtaaaaatagagcaacacacacccacacagaacatgctcgctgatactcaactaagtcagtccaggattaaggatgctctaatgcgcaaaaggatcactggtggagttctcaatagtaatagcttaaggacactaaaagacaggagagatttgttttacccattttctcatatcttgcacaattcgaaaccagttgggcatcaggatcttgttggtttggtaatctcaatactgcttcttgcagatttcagcttagttttgcttacttttctccagctgtattcatattctatggtcgatgttctcttggttttgtttattctaccgcttgggattttgtcgccttttcctgccggtataaatgctctatttagtcatggaccgaggcggtcagcaggccttgctcgtgtgtatgcattgtggaacataacttcactggtcaatgttgttgtggctttcatatgtggttttgtacattataagttatcaaccaaaacacacccgagcgtgcagccctggaacctgggaacggatgaaagcggttggtggctcttcccaaccggactcatgctgttgaaatgcattcaagcaaggcttgttgattggcacgttgctaatttagagattcaagaccgtgcggtatatagcaatgacccaaacatattttggcagtcatgacccctgttgtaactgagggtccttctgggaagctttttacaactcgattttttgggagttgataaaaggaagagtgcgggcaaaggcctttctttattgaccaggcaaaagaaggaactacagaggttatatagatgcgtacttccgcatcccccgctgatcatgtgcagttgcaaacggtgttctgttgtatatataaaaggtgttcttgatccattctttgtaggatttagacaccatagagtttgtttataagcaatgtgaaagctaacctaaagagacatggggggatgtggatttgttgttcttttgctaccatgccctggcccttgatgtttgttgagatgggcagaggggcaactcaagtcatcgagatgcaaacgcctcttgttgtatgcgatcagatgggtaaaacaattatattattaacatgttccatggtcttcgctgacagcaaggctggtaaagctgtgagaaatcggtgtggtctgggtgatgtgccgtttgcagctttgcaattcatcgagggatgcaaaaaccttctgacatatctgacgctgtgtcacttgcagacctgtagtggtggatggatggctaagtgggtcacctaaacaaaaccgggtgctatgtactcggcagagaatgtcctcgacgatggatggacaactttaggggctgtttggaactggttttaagtctaaaaccaccgtaaattacggatctgtaaaattttacaatcctagatccaag

SEQ ID NO: 217032 - DNA, 3756 bp, Zea Mays
gtggcaagatcagtgcctctgggggtgatggtttggctgggggaggtggagggcgagtttctattaacgtttttagtagacatgatgacacccagatttttgttcatgcagggggaaggagttcaggctgtccagataatgcaggagctgctggaactctttatgaagcagtaccaaagagtcttattgtcagcaacaacaatttgagtacacagacagatactcttcttttagagtttccaaatcaaccactgtggacaaatgtttttgtaagaaatcgtgccaaagttgctgtccccttgctctggagtcgcgttcaggtccaagggcaacttagccttctttctggtgctattctaacttttggtctcactggttatccatactcggagtttgaactgatggctgaggagcttcttatgagtgactcaataattaaggtgttcggtgctttgagaatgtctgtaaagatgctcctaatgtggaactccagaatggaaattgatggcggtggagattcgatagttgcaacttctttgttagatgctagcaacctgatagttctgaaggaatcatctgtgatacactctaatgctaatcttggagtccgtggccaaggtgtcctgaatttgtctggggacggagacacaattgaggcacaacgccttattctatcgctgttctacagcatacaagttggacctggttctgttttacggggcccacttgtaaacagaagtagcgatgatgtggccccaaagctgaattgtgaagcagatagctgtcctgtggaaataatacatccaccagaagattgcaatctaaattcttcattgtcgtttacccttcaggtatgccgtgttgaagatattgatgtatggggtgtcgtacaaggaactgtaattcatttcaatagggcaagaagtgtcactgtgcatacatctgggaccatcagcgcaacaggctttggctgtcgatctggagtaggacaagggaaaatgttaagaagcggtgtatgtggtggtggtggacatggtggcaaaggtgggaatggtttttataagggagaccttgctgagggtggagctatctatggcaatgctgatctaccctgtgaacttggcagcggcagtgggaatgactccacagagttgtccacagctggcgggggtataatagtgatgggctcatgggattattctttgccaagtcttgccctctatggttcagtagaatcaaatggtggcagctatgctagtggctctgttggaggacctggtggtggttctgggggcacaattcttctatttgtgcacactttgtccttagctgaaagctctgtcctttcaagtgttggtggcttcggaagtactggtagtggtggaggtggagggggaaggattcattttcattggtctaacattcctactggagatgaatatgtgcctgttgcagctgttaagggatcaatacttacaagtggaggagtcagcaaagggttaggatattccggtggcaatggaacggtcacaggaaaagcttgcccaaagggtctttatggtacattttgcaaggaatgccctttgggaacatacaaaaatgttactggatcttctaaatctttatgctttccatgccctccgggtgaactccctcatcgtgctatatacacaaatgttcgaggaggtgctgctgaaactccatgtccatacagatgcgtgtctgacagatatcgcatgcctcactgttatacagctctggaggagttaatatatacttttgggggaccttggctatttggtctatttctttcaggcctccttatcttgttagctcttgttttaagtgttgctcgtatgaagtttgttggcactgatgagttacctgggccggcaccaactcatcaagggtcccaaattgatcattcctttcccttcctagaatcactaaatgaggtcattgaaactaatagggctgaagagtcacaaggtcatgtacacaggatgtatttcatgggtcccaacaccttcagtgaaccttggcatctcccacacagtccgccagaacaaataacagagatcgtatatgaagatgcatttaatagatttgtcgatgagataaacacccttgcagcttatcaatggtgggaaggatctatttacagtatcctctgtatacttgcctaccccctggcttggtcatggcagcagtggcgtaggagaaagaaattacagagacttcgtgaatttgttcgctctgaatatgatcattcatgcttaaagtcttgccgttcacgtgcactctacgaaggcctcaaggtgactgcaaccccagatctaatgctagggtatttagatttcttccttgggggagatgaaaaaaggcctgatcttccacctcgtcttcgtcaaaggtttccaatgtccctgatctttggaggtgatggaagttacatggctccgttttcacttaatagtgacagtgtgcttactagtcttatgagccaggctgttccctcatggatatggcaccgtcttgtagctggattgaatgcacagctgcgtttggtccgtggtggaaatctgaaagtaacgtttcttccggtcatcaactggcttgaatctcatgcaaatccctctttagctgagaatggtatccgtgttgatcttgcctggttccaagctacagcattagggtactgccaacttggtcttcttgtttatgctgttgaaggagaagctgcacttaccgaacctgatggaagccctagagtaaaaatagagcaacacacacccacacagaacatgctcgctgatactcaactaagtcagtccaggattaaggatgctctaatgcgcaaaaggatcactggtggagttctcaatagtaatagcttaaggacactaaaagacaggagagatttgttttacccattttctcatatcttgcacaattcgaaaccagttgggcatcaggatcttgttggtttggtaatctcaatactgcttcttgcagatttcagcttagttttgcttacttttctccagctgtattcatattctatggtcgatgttctcttggttttgtttattctaccgcttgggattttgtcgccttttcctgccggtataaatgctctatttagtcatggaccgaggcggtcagcaggccttgctcgtgtgtatgcattgtggaacataacttcactggtcaatgttgttgtggctttcatatgtggttttgtacattataagttatcaaccaaaacacacccgagcgtgcagccctggaacctgggaacggatgaaagcggttggtggctcttcccaaccggactcatgctgttgaaatgcattcaagcaaggcttgttgattggcacgttgctaatttagagattcaagaccgtgcgatgggtaaaacaattatattattaacatgttccatggtcttcgctgacagcaaggctggtaaagctgtgagaaatcggtgtggtctgggtgatgtgccgtttgcagctttgcaattcatcgagggatgcaaaaaccttctgacatatctgacgctgtgtcacttgcagacctgtagtggtggatggatggctaagtgggtcacctaaacaaaaccgggtgctatgtactcggcagagaatgtcctcgacgatggatggacaactttaggggctgtttggaactggttttaagtctaaaaccaccgtaaattacggatctgtaaaattttacaatcctagatccaag

SEQ ID NO: 217033 - DNA, 5189 bp, Zea Mays
aaatagctaaacccaaatcgataccaaacccagcccggaacgcacgccccccgccgccatcgccggcggccagccactacaagcgcggtgtccggaacctgtactgtactaccaaccccaacagcctggactctgatgagccccagttcatggcctgccatctctcccccctcttcaatctccgactcttgctgctgctcggcgctgtcctcggaaacgccgtccttgtccgcgccggcggggcggaggcgtcagatcgggctgagccggacccgtactcgatcctgacgtggcacgactactcgccgccgtcgcccccactcccgcccccggacccggcgtcgtcgacggcgacctgtgagggagacctccacgggaagggggacttccgcacgcactgcgaggtcttcgaggaggtggaactgggcgacgatatctacatcacggggaacggcagcctcgtgctcctctctggcgcctccctgacctgcgagaaggtcgggtgcgttatatctgccaatctctccggcgaggtgcacctcagccgcggcgtgcgcgtcagagccggcagggtctcgttggttgccaccaacatcacagtcgccgacacggtcgttgtgaacaccaccgcgctcgctggcgccccccctgaccggaccagtggcgttcccacagggacgcacggcgacggtggcgggcacggtggccgtggcgccagctgcttcgtcaaggaagggcagactcaggaggattcatggggtggtgatgcctatgcatggtctgacctcgaacacccttggagctacgggagcaaagggggctcgaccagtgttgagaaggactacggtggtgccggtggtggcatcgtgtggctgtttgctgatgatctggtcatgaatggcacagtgctcgccgccggtggggatagcaatgagaagggtggaggtggttctgggggaagcatctttataagggctgcatcgatgtatggtggtggcaagatcagtgcctctgggggtgatggtttggctgggggaggtggagggcgagtttctattaacgtttttagtagacatgatgacacccagatttttgttcatgggggaaggagttcaggctgtccagataatgcaggagctgctggaactctttatgaagcagtaccaaagagtcttattgtcagcaacaacaatttgagtacacagacagatactcttcttttagagtttccaaatcaaccactgtggacaaatgtttttgtaagaaatcgtgccaaagttgctgtccccttgctctggagtcgcgttcaggtccaagggcaacttagccttctttctggtgctattctaacttttggtctcactggttatccatactcggagtttgaactgatggctgaggagcttcttatgagtgactcaataattaaggtgttcggtgctttgagaatgtctgtaaagatgctcctaatgtggaactccagaatggaaattgatggcggtggagattcgatagttgcaacttctttgttagatgctagcaacctgatagttctgaaggaatcatctgtgatacactctaatgctaatcttggagtccgtggccaaggtgtcctgaatttgtctggggacggagacacaattgaggcacaacgccttattctatcgctgttctacagcatacaagttggacctggttctgttttacggggcccacttgtaaacagaagtagcgatgatgtggccccaaagctgaattgtgaagcagatagctgtcctgtggaaataatacatccaccagaagattgcaatctaaattcttcattgtcgtttacccttcaggtatgccgtgttgaagatattgatgtatggggtgtcgtacaaggaactgtaattcatttcaatagggcaagaagtgtcactgtgcatacatctgggaccatcagcgcaacaggctttggctgtcgatctggagtaggacaagggaaaatgttaagaagcggtgtatgtggtggtggtggacatggtggcaaaggtgggaatggtttttataagggagaccttgctgagggtggagctatctatggcaatgctgatctaccctgtgaacttggcagcggcagtgggaatgactccacagagttgtccacagctggcgggggtataatagtgatgggctcatgggattattctttgccaagtcttgccctctatggttcagtagaatcaaatggtggcagctatgctagtggctctgttggaggacctggtggtggttctgggggcacaattcttctatttgtgcacactttgtccttagctgaaagctctgtcctttcaagtgttggtggcttcggaagtactggtagtggtggaggtggagggggaaggattcattttcattggtctaacattcctactggagatgaatatgtgcctgttgcagctgttaagggatcaatacttacaagtggaggagtcagcaaagggttaggatattccggtggcaatggaacggtcacaggaaaagcttgcccaaagggtctttatggtacattttgcaaggaatgccctttgggaacatacaaaaatgttactggatcttctaaatctttatgctttccatgccctccgggtgaactccctcatcgtgctatatacacaaatgttcgaggaggtgctgctgaaactccatgtccatacagatgcgtgtctgacagatatcgcatgcctcactgttatacagctctggaggagttaatatatacttttgggggaccttggctatttggtctatttctttcaggcctccttatcttgttagctcttgttttaagtgttgctcgtatgaagtttgttggcactgatgagttacctgggccggcaccaactcatcaagggtcccaaattgatcattcctttcccttcctagaatcactaaatgaggtcattgaaactaatagggctgaagagtcacaaggtcatgtacacaggatgtatttcatgggtcccaacaccttcagtgaaccttggcatctcccacacagtccgccagaacaaataacagagatcgtatatgaagatgcatttaatagatttgtcgatgagataaacacccttgcagcttatcaatggtgggaaggatctatttacagtatcctctgtatacttgcctaccccctggcttggtcatggcagcagtggcgtaggagaaagaaattacagagacttcgtgaatttgttcgctctgaatatgatcattcatgcttaaagtcttgccgttcacgtgcactctacgaaggcctcaaggtgactgcaaccccagatctaatgctagggtatttagatttcttccttgggggagatgaaaaaaggcctgatcttccacctcgtcttcgtcaaaggtttccaatgtccctgatctttggaggtgatggaagttacatggctccgttttcacttaatagtgacagtgtgcttactagtcttatgagccaggctgttccctcatggatatggcaccgtcttgtagctggattgaatgcacagctgcgtttggtccgtggtggaaatctgaaagtaacgtttcttccggtcatcaactggcttgaatctcatgcaaatccctctttagctgagaatggtatccgtgttgatcttgcctggttccaagctacagcattagggtactgccaacttggtcttcttgtttatgctgttgaaggagaagctgcacttaccgaacctgatggaagccctagagtaaaaatagagcaacacacacccacacagaacatgctcgctgatactcaactaagtcagtccaggattaaggatgctctaatgcgcaaaaggatcactggtggagttctcaatagtaatagcttaaggacactaaaagacaggagagatttgttttacccattttctcatatcttgcacaattcgaaaccagttgggcatcaggatcttgttggtttggtaatctcaatactgcttcttgcagatttcagcttagttttgcttacttttctccagctgtattcatattctatggtcgatgttctcttggttttgtttattctaccgcttgggattttgtcgccttttcctgccggtataaatgctctatttagtcatggaccgaggcggtcagcaggccttgctcgtgtgtatgcattgtggaacataacttcactggtcaatgttgttgtggctttcatatgtggttttgtacattataagttatcaaccaaaacacacccgagcgtgcagccctggaacctgggaacggatgaaagcggttggtggctcttcccaaccggactcatgctgttgaaatgcattcaagcaaggcttgttgattggcacgttgctaatttagagattcaagaccgtgcggtatatagcaatgacccaaacatattttggcagtcatgacccctgttgtaactgagggtccttctgggaagctttttacaactcgattttttgggagttgataaaaggaagagtgcgggcaaaggcctttctttattgaccaggcaaaagaaggaactacagaggttatatagatgcgtacttccgcatcccccgctgatcatgtgcagttgcaaacggtgttctgttgtatatataaaaggtgttcttgatccattctttgtaggatttagacaccatagagtttgtttataagcaatgtgaaagctaacctaaagagacatggggggatgtggatttgttgttcttttgctaccatgccctggcccttgatgtttgttgagatgggcagaggggcaactcaagtcatcgagatgcaaacgcctcttgttgtatgcgatcagatgggtaaaacaattatattattaacatgttccatggtcttcgctgacagcaaggctggtaaagctgtgagaaatcggtgtggtctgggtgatgtgccgtttgcagctttgcaattcatcgagggatgcaaaaaccttctgacatatctgacgctgtgtcacttgcagacctgtagtggtggatggatggctaagtgggtcacctaaacaaaaccgggtgctatgtactcggcagagaatgtcctcgacgatggatggacaactttaggggctgtttggaactggttttaagtctaaaaccaccgtaaattacggatctgtaaaattttacaatcctagatccaag

SEQ ID NO: 217034 - DNA, 5080 bp, Zea Mays
aaatagctaaacccaaatcgataccaaacccagcccggaacgcacgccccccgccgccatcgccggcggccagccactacaagcgcggtgtccggaacctgtactgtactaccaaccccaacagcctggactctgatgagccccagttcatggcctgccatctctcccccctcttcaatctccgactcttgctgctgctcggcgctgtcctcggaaacgccgtccttgtccgcgccggcggggcggaggcgtcagatcgggctgagccggacccgtactcgatcctgacgtggcacgactactcgccgccgtcgcccccactcccgcccccggacccggcgtcgtcgacggcgacctgtgagggagacctccacgggaagggggacttccgcacgcactgcgaggtcttcgaggaggtggaactgggcgacgatatctacatcacggggaacggcagcctcgtgctcctctctggcgcctccctgacctgcgagaaggtcgggtgcgttatatctgccaatctctccggcgaggtgcacctcagccgcggcgtgcgcgtcagagccggcagggtctcgttggttgccaccaacatcacagtcgccgacacggtcgttgtgaacaccaccgcgctcgctggcgccccccctgaccggaccagtggcgttcccacagggacgcacggcgacggtggcgggcacggtggccgtggcgccagctgcttcgtcaaggaagggcagactcaggaggattcatggggtggtgatgcctatgcatggtctgacctcgaacacccttggagctacgggagcaaagggggctcgaccagtgttgagaaggactacggtggtgccggtggtggcatcgtgtggctgtttgctgatgatctggtcatgaatggcacagtgctcgccgccggtggggatagcaatgagaagggtggaggtggttctgggggaagcatctttataagggctgcatcgatgtatggtggtggcaagatcagtgcctctgggggtgatggtttggctgggggaggtggagggcgagtttctattaacgtttttagtagacatgatgacacccagatttttgttcatgggggaaggagttcaggctgtccagataatgcaggagctgctggaactctttatgaagcagtaccaaagagtcttattgtcagcaacaacaatttgagtacacagacagatactcttcttttagagtttccaaatcaaccactgtggacaaatgtttttgtaagaaatcgtgccaaagttgctgtccccttgctctggagtcgcgttcaggtccaagggcaacttagccttctttctggtgctattctaacttttggtctcactggttatccatactcggagtttgaactgatggctgaggagcttcttatgagtgactcaataattaaggtgttcggtgctttgagaatgtctgtaaagatgctcctaatgtggaactccagaatggaaattgatggcggtggagattcgatagttgcaacttctttgttagatgctagcaacctgatagttctgaaggaatcatctgtgatacactctaatgctaatcttggagtccgtggccaaggtgtcctgaatttgtctggggacggagacacaattgaggcacaacgccttattctatcgctgttctacagcatacaagttggacctggttctgttttacggggcccacttgtaaacagaagtagcgatgatgtggccccaaagctgaattgtgaagcagatagctgtcctgtggaaataatacatccaccagaagattgcaatctaaattcttcattgtcgtttacccttcaggtatgccgtgttgaagatattgatgtatggggtgtcgtacaaggaactgtaattcatttcaatagggcaagaagtgtcactgtgcatacatctgggaccatcagcgcaacaggctttggctgtcgatctggagtaggacaagggaaaatgttaagaagcggtgtatgtggtggtggtggacatggtggcaaaggtgggaatggtttttataagggagaccttgctgagggtggagctatctatggcaatgctgatctaccctgtgaacttggcagcggcagtgggaatgactccacagagttgtccacagctggcgggggtataatagtgatgggctcatgggattattctttgccaagtcttgccctctatggttcagtagaatcaaatggtggcagctatgctagtggctctgttggaggacctggtggtggttctgggggcacaattcttctatttgtgcacactttgtccttagctgaaagctctgtcctttcaagtgttggtggcttcggaagtactggtagtggtggaggtggagggggaaggattcattttcattggtctaacattcctactggagatgaatatgtgcctgttgcagctgttaagggatcaatacttacaagtggaggagtcagcaaagggttaggatattccggtggcaatggaacggtcacaggaaaagcttgcccaaagggtctttatggtacattttgcaaggaggtgctgctgaaactccatgtccatacagatgcgtgtctgacagatatcgcatgcctcactgttatacagctctggaggagttaatatatacttttgggggaccttggctatttggtctatttctttcaggcctccttatcttgttagctcttgttttaagtgttgctcgtatgaagtttgttggcactgatgagttacctgggccggcaccaactcatcaagggtcccaaattgatcattcctttcccttcctagaatcactaaatgaggtcattgaaactaatagggctgaagagtcacaaggtcatgtacacaggatgtatttcatgggtcccaacaccttcagtgaaccttggcatctcccacacagtccgccagaacaaataacagagatcgtatatgaagatgcatttaatagatttgtcgatgagataaacacccttgcagcttatcaatggtgggaaggatctatttacagtatcctctgtatacttgcctaccccctggcttggtcatggcagcagtggcgtaggagaaagaaattacagagacttcgtgaatttgttcgctctgaatatgatcattcatgcttaaagtcttgccgttcacgtgcactctacgaaggcctcaaggtgactgcaaccccagatctaatgctagggtatttagatttcttccttgggggagatgaaaaaaggcctgatcttccacctcgtcttcgtcaaaggtttccaatgtccctgatctttggaggtgatggaagttacatggctccgttttcacttaatagtgacagtgtgcttactagtcttatgagccaggctgttccctcatggatatggcaccgtcttgtagctggattgaatgcacagctgcgtttggtccgtggtggaaatctgaaagtaacgtttcttccggtcatcaactggcttgaatctcatgcaaatccctctttagctgagaatggtatccgtgttgatcttgcctggttccaagctacagcattagggtactgccaacttggtcttcttgtttatgctgttgaaggagaagctgcacttaccgaacctgatggaagccctagagtaaaaatagagcaacacacacccacacagaacatgctcgctgatactcaactaagtcagtccaggattaaggatgctctaatgcgcaaaaggatcactggtggagttctcaatagtaatagcttaaggacactaaaagacaggagagatttgttttacccattttctcatatcttgcacaattcgaaaccagttgggcatcaggatcttgttggtttggtaatctcaatactgcttcttgcagatttcagcttagttttgcttacttttctccagctgtattcatattctatggtcgatgttctcttggttttgtttattctaccgcttgggattttgtcgccttttcctgccggtataaatgctctatttagtcatggaccgaggcggtcagcaggccttgctcgtgtgtatgcattgtggaacataacttcactggtcaatgttgttgtggctttcatatgtggttttgtacattataagttatcaaccaaaacacacccgagcgtgcagccctggaacctgggaacggatgaaagcggttggtggctcttcccaaccggactcatgctgttgaaatgcattcaagcaaggcttgttgattggcacgttgctaatttagagattcaagaccgtgcggtatatagcaatgacccaaacatattttggcagtcatgacccctgttgtaactgagggtccttctgggaagctttttacaactcgattttttgggagttgataaaaggaagagtgcgggcaaaggcctttctttattgaccaggcaaaagaaggaactacagaggttatatagatgcgtacttccgcatcccccgctgatcatgtgcagttgcaaacggtgttctgttgtatatataaaaggtgttcttgatccattctttgtaggatttagacaccatagagtttgtttataagcaatgtgaaagctaacctaaagagacatggggggatgtggatttgttgttcttttgctaccatgccctggcccttgatgtttgttgagatgggcagaggggcaactcaagtcatcgagatgcaaacgcctcttgttgtatgcgatcagatgggtaaaacaattatattattaacatgttccatggtcttcgctgacagcaaggctggtaaagctgtgagaaatcggtgtggtctgggtgatgtgccgtttgcagctttgcaattcatcgagggatgcaaaaaccttctgacatatctgacgctgtgtcacttgcagacctgtagtggtggatggatggctaagtgggtcacctaaacaaaaccgggtgctatgtactcggcagagaatgtcctcgacgatggatggacaactttaggggctgtttggaactggttttaagtctaaaaccaccgtaaattacggatctgtaaaattttacaatcctagatccaag

SEQ ID NO: 217035 - DNA, 4202 bp, Zea Mays
gggacggagtatttctctctatatatacggaaacaggtttggaaataaatacacctctctctctataaataaagcagtaagtatcgtgggaatcgttttaaaaaatcctatagtatcgcaatcggtttttattttgttaccgtgaacccatggctaccggggaggatgagaaggcggcggggcgcgtggcgttgcaccggctgttcgtgttcgcggacaggacggacgcggcgctcatggccgtgggcgccgtcgccgcggtggcgaacgggatggtgcagccgatcatggccttcatcttcggcgacgtcattgacgccttcggctccggagccaccgacggcgtcgtacgcagggtcgtccaggtgatcatgaacttcgtttatcttgccgttggatcaggagtagcttcaaccctccaggtatcatgttggacaatcgccggagaaagacaggcggcacgaatcagagccatgtatctcaaggcaattctgaggcaggacattgcgttctttgacatggaaatgagtgctgggcaggcagttgagaggatggcaggggacacattcctcatccaagacgccattggagaaaaggttgggaaggccatacaactcctttctactttcattggtggattcatcattgcattcacgagaggatggctcctggcccttgtcatgctttcaagcgtccctccgattgccattgccggtgcaattgtttcaaagttgatgacagggctctccacccgaatgcaagcaaactacagtgatgctggaaacgtggtggagcaaactcttggtgccattaggacggttgtttcattcaatggcgagaatcaggctataacaaaatataacatgttcataagaaaggcgtaccggtcttctctgcaagaaggtgctgtaaatgcccttggattcggttctgtgatagcaatcttattttcaagttatggcttggctgtttggtatggatctaagctgatagtcgagcgaggttacaatggtggcatggtcatttctgttatcatgtctgtcatgatcggagcaatgtaagatttctgttatcatttaaaattttcttaaacgaacaatgacaatgacaataagcgagctatatatgtttctgtccttaggccaggcaacacgatcagtgacagcttttgcagaaggccaaggagcagcacatagaatgttcaagataattgaacgcaagccagatattgacatagatgataacacaggtatcatattggaggatgtcaagggtgatgttcaactgaaggacgtgtacttcagctatcccaccaggcctgaacatttgattttcgatggattctcgttgcaagtacaaagtggaacaacaatggccctggttggtgacagcggcagtgggaaatcgaccgtgatcagtttggtagaaaggttctatgacccacaggctggagaagtcttgattgacggggtcgacattagaggaatgaagcttggatggatgagaggaaaaattggtcttgtcaaccaagagccggtgctattctcaactacaatcagggaaaacattgcctatggaacagaaaagccaacacttgaagatatcaatagagcgatacagctcgctaatgctgctatattcatcgacaagttaccaaatggtcttgacacaatggtgggggaacatggaactcagctgtctggagggcagaaacagagaatagcaattgctagagcaatcataaagaaccctaagatcttgctactggatgaagcaaccagtgcgttggatatggaatcggagcgggtggttcaggaagcattggttaggataatggttgaaaggacaacaattgttgttgctcatcgcctaagcacggtgaggaatgctgatgtgatatctgtcctacaacacgggaagatggtggaacaaggttcacacgttgacctgatgaagctacctggaggagcttacactcagctgattcgtctacacgagactcaacaagaggcagaagatgtccaccctgacatggaaatttccaggagatcaacaagtaaaggctcctcctcttttgggcagtctatccctgctccacttggctcacccgatccaacggaagtcagtggtgctcctgacacagaggaaggagctacagacagagtgaaagtgggtaggtctcagaagaaagcttcgatcgccagactcttcaagctcaacaagccagagactcttgtccttgcacttggttctatagctgccgtagcgcatggcactatatttcctatctacggcacgctgatttccactgcgataaaggtgttctatgaaccgccacaagagctactgaagggctccagattctgggcaggcatgtttgctctgctaggcgcttgcgcgtttgttctgattccagtgcagtacttcctgttcggactagcaggcgggaagctcgtggagcgcgtacgctcgatgacgttccgaagtatcatgcgccaagaaatcagttggtttgataaaccagaacactcaagcggatcaatttgcgcgaggctgtctaccgatgctctgaatgtgaagcgactagtcggggacaatctagcactgaatgtccagaccgcatcgaccatcatgtcaggcttcaccatagcaatggtggcgaactggaagctggcgctggtcatcacagtcgtgatcccttttgtggctttccaagcctacgctcaaatgctgttcctgaaaggtcttaacagaaacgcaaagctgaggtacgaggaagcaagtcaggtagcaacggacgcggtcggtggcatcaggaccgtggcgtcgttctgcgccgagagtaaggtgatggacgcctacgagaacaagtgcgagtcgccgaggaggcaagggatgaaggaaggcgtcgttggtggcttggggttcggcttctcgttcgtcgtcttctacctgacgtacgctctgtgcttctacgttggcgcaaggttcgtccaccaagggacagcaacgttcccagaagtgtttagggttttcttcgtgctggctttggccacaagtggggtctcgcagacgagtgcggctggggcagacagtgccaaggccaacgactcggccgtctccatctttgcaatccttgaccgtgaatccaagatcgactacagcagcgaggagggcgtgaccatcgcgagcgtgaggggcgacgtcgacttccagaaagtctgcttcaagtacccgttgagaccgaacgtccagatcttcaaggatttttcactgaggattccttccggaaagactgtcgcgctggtcggagagagtggaagcggcaagtcgacggtgatcgccctgctcgaaaggttctacgacccggaatccggcaagatcttcatcgacggcgtggagcttgggaccctcaaggtgagctggcttcggcagcaggctgggctcgtcgcgcaagagccggtgctgttcaacgacacgatccgcgccaacatagcctacgggaagcaaggcggggtggtgtcggaggaagaggtcgtggctgccgccgaagcagccaacgcgcacgggttcatcgccgcgctgcccgacggctacgacaccgtcgtgggcgagagagggagccggctgtcgggcgggcagaagcagcgcgtcgccatcgcacgggccgtcgttaaggaccccaggctgctgctgctggacgaggccacgagcgcgctggacgtggagtcggagcgcgtggttcaggaggccctagaccgggtgatggttgggaggaccaccgtggtggtggcgcatcgcctgtccacgatcagaggcgcggatgtcatcgccgtcttgaaggacggggcggttttggagaagggcaggcacgaagaactgatgcaggtgaaggacggagcctatgcttcgcttcttgagctcagttctagttctgcatgatcagaggggtagttggcagaatggaggcgtgtctgcattttttagattaataaggaaccaaagtattccagactccagacgcgtgcttgtgcacggataactagttaatcgcacaggtcactacggcaaaaacatgtatttggtgacgtgtttccgattttatgttgccaattaaatctgtttagcgactcctaaaaaagatatcactaatagaaccattttagtgacgcgtttttataaatacgtgtcattgattgaac

SEQ ID NO: 217036 - DNA, 3607 bp, Zea Mays
gtgatcatgaacttcgtttatcttgccgttggatcaggagtagcttcaaccctccaggtatcatgttggacaatcgccggagaaagacaggcggcacgaatcagagccatgtatctcaaggcaattctgaggcaggacattgcgttctttgacatggaaatgagtgctgggcaggcagttgagaggatggcaggggacacattcctcatccaagacgccattggagaaaaggttgggaaggccatacaactcctttctactttcattggtggattcatcattgcattcacgagaggatggctcctggcccttgtcatgctttcaagcgtccctccgattgccattgccggtgcaattgtttcaaagttgatgacagggctctccacccgaatgcaagcaaactacagtgatgctggaaacgtggtggagcaaactcttggtgccattaggacggttgtttcattcaatggcgagaatcaggctataacaaaatataacatgttcataagaaaggcgtaccggtcttctctgcaagaaggtccttaggccaggcaacacgatcagtgacagcttttgcagaaggccaaggagcagcacatagaatgttcaagataattgaacgcaagccagatattgacatagatgataacacaggtatcatattggaggatgtcaagggtgatgttcaactgaaggacgtgtacttcagctatcccaccaggcctgaacatttgattttcgatggattctcgttgcaagtacaaagtggaacaacaatggccctggttggtgacagcggcagtgggaaatcgaccgtgatcagtttggtagaaaggttctatgacccacaggctggagaagtcttgattgacggggtcgacattagaggaatgaagcttggatggatgagaggaaaaattggtcttgtcaaccaagagccggtgctattctcaactacaatcagggaaaacattgcctatggaacagaaaagccaacacttgaagatatcaatagagcgatacagctcgctaatgctgctatattcatcgacaagttaccaaatggtcttgacacaatggtgggggaacatggaactcagctgtctggagggcagaaacagagaatagcaattgctagagcaatcataaagaaccctaagatcttgctactggatgaagcaaccagtgcgttggatatggaatcggagcgggtggttcaggaagcattggttaggataatggttgaaaggacaacaattgttgttgctcatcgcctaagcacggtgaggaatgctgatgtgatatctgtcctacaacacgggaagatggtggaacaaggttcacacgttgacctgatgaagctacctggaggagcttacactcagctgattcgtctacacgagactcaacaagaggcagaagatgtccaccctgacatggaaatttccaggagatcaacaagtaaaggctcctcctcttttgggcagtctatccctgctccacttggctcacccgatccaacggaagtcagtggtgctcctgacacagaggaaggagctacagacagagtgaaagtgggtaggtctcagaagaaagcttcgatcgccagactcttcaagctcaacaagccagagactcttgtccttgcacttggttctatagctgccgtagcgcatggcactatatttcctatctacggcacgctgatttccactgcgataaaggtgttctatgaaccgccacaagagctactgaagggctccagattctgggcaggcatgtttgctctgctaggcgcttgcgcgtttgttctgattccagtgcagtacttcctgttcggactagcaggcgggaagctcgtggagcgcgtacgctcgatgacgttccgaagtatcatgcgccaagaaatcagttggtttgataaaccagaacactcaagcggatcaatttgcgcgaggctgtctaccgatgctctgaatgtgaagcgactagtcggggacaatctagcactgaatgtccagaccgcatcgaccatcatgtcaggcttcaccatagcaatggtggcgaactggaagctggcgctggtcatcacagtcgtgatcccttttgtggctttccaagcctacgctcaaatgctgttcctgaaaggtcttaacagaaacgcaaagctgaggtacgaggaagcaagtcaggtagcaacggacgcggtcggtggcatcaggaccgtggcgtcgttctgcgccgagagtaaggtgatggacgcctacgagaacaagtgcgagtcgccgaggaggcaagggatgaaggaaggcgtcgttggtggcttggggttcggcttctcgttcgtcgtcttctacctgacgtacgctctgtgcttctacgttggcgcaaggttcgtccaccaagggacagcaacgttcccagaagtgtttagggttttcttcgtgctggctttggccacaagtggggtctcgcagacgagtgcggctggggcagacagtgccaaggccaacgactcggccgtctccatctttgcaatccttgaccgtgaatccaagatcgactacagcagcgaggagggcgtgaccatcgcgagcgtgaggggcgacgtcgacttccagaaagtctgcttcaagtacccgttgagaccgaacgtccagatcttcaaggatttttcactgaggattccttccggaaagactgtcgcgctggtcggagagagtggaagcggcaagtcgacggtgatcgccctgctcgaaaggttctacgacccggaatccggcaagatcttcatcgacggcgtggagcttgggaccctcaaggtgagctggcttcggcagcaggctgggctcgtcgcgcaagagccggtgctgttcaacgacacgatccgcgccaacatagcctacgggaagcaaggcggggtggtgtcggaggaagaggtcgtggctgccgccgaagcagccaacgcgcacgggttcatcgccgcgctgcccgacggctacgacaccgtcgtgggcgagagagggagccggctgtcgggcgggcagaagcagcgcgtcgccatcgcacgggccgtcgttaaggaccccaggctgctgctgctggacgaggccacgagcgcgctggacgtggagtcggagcgcgtggttcaggaggccctagaccgggtgatggttgggaggaccaccgtggtggtggcgcatcgcctgtccacgatcagaggcgcggatgtcatcgccgtcttgaaggacggggcggttttggagaagggcaggcacgaagaactgatgcaggtgaaggacggagcctatgcttcgcttcttgagctcagttctagttctgcatgatcagaggggtagttggcagaatggaggcgtgtctgcattttttagattaataaggaaccaaagtattccagactccagacgcgtgcttgtgcacggataactagttaatcgcacaggtcactacggcaaaaacatgtatttggtgacgtgtttccgattttatgttgccaattaaatctgtttagcgactcctaaaaaagatatcactaatagaaccattttagtgacgcgtttttataaatacgtgtcattgattgaac

SEQ ID NO: 217037 - DNA, 689 bp, Zea Mays
gtaatattatgtggagaaaaggaagcagagaaggtcgggtccgcagcctccccctctcgcagatccccacctgctccgccgccggccaccgcgttgctcccctcggcagccaggatgacagaagcaccatttctgccgcgtgagaggctcttcaagcagcaacattacttccagaacttgaccaagcacacctacctgaaagggcgctacgacgtgatcacatctgtcgccatcccccttgcactcgctgcctccagcatgttcatgattgggcgtggagtttataacatgtctcatggggttgggaagaaagagtgatcttccactggttaactattgtttctgcttgtcatggaagtcataccgtcgagactgcgaagtcctcttcgcttgcaaaataatacggccaaataacaattcgactacattttcgcatcaattttctgtttgtatttgtgggtgtgaagtggcagtaacttgaaaatcagcactgtcactgttttggttagttactccattcctttcgtcttttgtgtcccctttcaatagaagcaagctggccttgtacttcctccattcttttttttagttgtcacggtttagttcaaaaaaatgaactagcgggcgacaattatttagttcaaaaatgctctgttcatcaacatgcacgtaacgtaaggggtctgtgg

SEQ ID NO: 217038 - DNA, 1365 bp, Zea Mays
atgcgcaagcagctgggcgcagcaggcttgctggcggagctgcgcatggggttccggcagttggcagacccgatcgcgcctccgcctgttcggctgtcccctgtgccctgcggcctgcggccctgcccaacacccaacgcactgccgctacccagctacggcagcgggcagccacctgcctgtccgccgtgtccggctgtcccctgcccaggcgcccagcccaacggccaacgcagagaacgcacgaagtatgaatcaggttttcaaaagcgtaagaaacaaaaaagaatagagggtttaattcagtctcaaaaaggagctatggatagattcgttattaaagaatcacaagtatcccctgtgaatcagccagctgatggaggccctgcaattgatagtactgctgctaacaacgaggttgatgatgttcctattgataacacaaacgtagggatgggcaataatagtgataatttgaatacttcagcgtctatgaatgatgtgacagttgcatcagcagaacgaagcttttctaaattgaagctattgaagtcatatttgcgctctacaatgttacaacaaagacttactgatttggcccagatatcacttgagagtgaattattggagaagattgaatatgagcgtattattgaagaattcatttcaagtaacaccaaaaagaatgaagttgttcaaataaatatgatacaacaaagcgttgaatagggtctcggattatgccggcccggccctgtggccgagatggcgctcgccgaggtggctgccatgatgtaggtgggcgccgacgacgacggtgacgcactcattcttgcgacgctcgggatgcagcggcggaggatgagctcatttttgtcgaccgggagcttgatgttggcgctggggctggccggagccctatcaagcgcagggtggagttcaagctaccagagagctgcgactgagcaacacatgaaaagctgggaccagattcaagagggatagaggcaagcagccaacacgcagaagctcacctgctcaggacaacaccagggatctacggtttcttgcactgtactgcatcacattccatcgcaagaacaaaaccatcccgctccttgcaaacatccaaagatacaagttttcacggatgtagtctagtttagatatgttagatattatgtctacaatatttcataaactttatcaggagttatgtgcgtatattatggtaatgacgatagaacaatcatgtgtcgatgttgatgtttcttatgttatgttaacgacaacctgggaaccgtaatggataaactgtaatgttttctatgtttttaacgtcatgtgtgttattttttatttgat

SEQ ID NO: 217039 - DNA, 1790 bp, Zea Mays
ccgcaatccactagcgtcgagccattacaactgctgactatcagctcacacacctccgttcgtaatagcatagtagccacgctctactcgtcttagctctcgaagtgccactgcagtcttcgccggccagctcgatcgccgcacaatggcgtcacagcagcaaaccaggaagcagcaggccaccaagggccaccaggaggccgaccgaggccaggcgatgaacctggaggagatcggcaagtaccgcgccgaggcgcagcagcggtcggcggacgccatccgcgccgccgaggaccggttccacaaggccaacaaccagcaggcgcgcggcgccggggcgcgcgggactgtcaccgtggcccaggcgcccgtcgccactgtggtcccgtatcaggagagcgtgaagcaggtggagacggagagccacggccgcggtagccacggctctgagccgcagcagtggctggcggacgccgcggccgatgccagggagaggtgcaacaaggccctggggacgagcccggccgccgctcacgaaggcaaggcgtcggccgcccacgcgacggctggcgcagctccacaccagcaaaccaagaacgagcaggagggtggtcaagtccacggccatctaacaaggcaggacgagatggggaagcacggcagcgaggcgcagaagaactcgaccgcggaggccgcacgtgccgcggtggagaagcacgacggaggcagggagaccggtgcggccgcgggacagggcgtgaaggacacggcggcgaagcacgacaagtacggggagaccggcgcgaccgcgggacgaaagagtgtaaaggacacggcgtcgcgcgcggctggcgccacggcggactacgcctcggccaagggcgccgatgccaaggataccggcgcgagcggcgcgcaggccgcggaggagaagacccaggaggccacggggaaagcggccgactacaccaagcaggcggccgcgaaggtgaaggatctcactgccggtgcggccgggacgaccatggagtacgcgaagcaggccaaggaaccggcgtcccagacggcggacaataaggctcgcgacatcaccggacagcacaaggacaccaccggcgacatggcgcgtaaggccgcggacacggccgtacaggccaaggacaaggtgagggacacggccgtatccatggttcagaaggcgggcgataccgccgtacgtgccaaggacacggcgtgggatgcggccggcggcatggcgcagaggtcgagagacaccggtgcccaggccggtgacaaggcggaggacgtcacttggcgcgctgagcaggaggcaggggagttgaaagagagagcgtcagggaccgtcaagaccggcggtggcgcttcgacgacgaaggcgaagggtggcggcgacgagaacacgacggtagtgggcgacgtcctggaggcggtgggcgcgacggtggttgggctcgcgaagcacaccaaggggatcgtggccggcgaggaggagctcgtcccagtcggaggtgagaaagggaagtcaccggaggagaagaccaagctcgcgtgatggagtgcttctttgggtggttggcggggaagtctctgggttcagtcgcctgtatgggttccgccctgtaccgcttttaagacacgtccatctgtgtatagtatagtagaataatgttgtcggtcggtgtgtgtgtccgtccggtgcggccgtgcggggccggtgtgaactgcgatctcgtacgagtgcagctatccataatatagtgtgtttataa

SEQ ID NO: 217040 - DNA, 2101 bp, Zea Mays
ctagcgtcgagccattacaactgctgactatcagctcacacacctccgttcgtaatagcatagtagccacgctctactcgtcttagctctcgaagtgccactgcagtcttcgccggccagctcgatcgccgcacaatggcgtcacagcagcaaaccaggaagcagcaggccaccaagggccaccaggaggccgaccgaggccaggcgatgaacctggaggagatcggcaagtaccgcgccgaggcgcagcagcggtcggcggacgccatccgcgccgccgaggaccggttccacaaggccaacaaccagcaggcgcgcggcgccggggcgcgcgggactgtcaccgtggcccaggcgcccgtcgccactgtggtcccgtatcaggagagcgtgaagcaggtggagacggagagccacggccgcggtagccacggctctgagccgcagcagtggctggcggacgccgcggccgatgccagggagaggtgcaacaaggccctggggacgagcccggccgccgctcacgaaggcaaggcgtcggccgcccacgcgacggctggcgcagctccacaccagcaaaccaagaacgagcaggagggtggtcaagtccacggccatctaacaaggcaggacgagatggggaagcacggcagcgaggcgcagaagaactcgaccgcggaggccgcacgtgccgcggtggagaagcacgacggaggcagggagaccggtgcggccgcgggacagggcgtgaaggacacggcggcgaagcacgacaagtacggggagaccggcgcgaccgcgggacgaaagagtgtaaaggacacggcgtcgcgcgcggctggcgccacggcggactacgcctcggccaagggcgccgatgccaaggataccggcgcgagcggcgcgcaggccgcggaggagaagacccaggaggccacggggaaagcggccgactacaccaagcaggcggccgcgaaggtgaaggatctcactgccggtgcggccgggacgaccatggagtacgcgaagcaggcggcggtgaaaggcaaggacgtgacgctgagcaccggtgagacggccgcggagtacgccaaggccgcggccgagaaggcgaaggaggcagcggtggcaacgggaaagacgacggccgggtacacgcagcaggcagccgtgaaggccaaggacgcgacggtctccacgggcgcgcaggtggcgcagaaggccacggaggtgacggccgacaccgcgcgcaaggtggcggagtacgccaaggagaaggcggagcaaggcaaggagcgcgcggcccgcgccgccgacgaggtggaggagccagggagtggcgcaaccgcgcaggccaaggaaccggcgtcccagacggcggacaataaggctcgcgacatcaccggacagcacaaggacaccaccggcgacatggcgcgtaaggccgcggacacggccgtacaggccaaggacaaggtgagggacacggccgtatccatggttcagaaggcgggcgataccgccgtacgtgccaaggacacggcgtgggatgcggccggcggcatggcgcagaggtcgagagacaccggtgcccaggccggtgacaaggcggaggacgtcacttggcgcgctgagcaggaggcaggggagttgaaagagagagcgtcagggaccgtcaagaccggcggtggcgcttcgacgacgaaggcgaagggtggcggcgacgagaacacgacggtagtgggcgacgtcctggaggcggtgggcgcgacggtggttgggctcgcgaagcacaccaaggggatcgtggccggcgaggaggagctcgtcccagtcggaggtgagaaagggaagtcaccggaggagaagaccaagctcgcgtgatggagtgcttctttgggtggttggcggggaagtctctgggttcagtcgcctgtatgggttccgccctgtaccgcttttaagacacgtccatctgtgtatagtatagtagaataatgttgtcggtcggtgtgtgtgtccgtccggtgcggccgtgcggggccggtgtgaactgcgatctcgtacgagtgcagctatccataatatagtgtgtttataa

SEQ ID NO: 217041 - DNA, 2935 bp, Zea Mays
gtcttctccctcaacgcccagaggactccgtgatgccggttcttggcccgggaaagcggcttcgtcggccacctaagtgcaggcaaccgtcggtcctgatgacttgaaatgcggcagcccttctacggcctcccacccagatgaagatgcagcttgtggaaccggaaggctcgaaggggatgggttctcctgggtgctcggagatagtcgaactggtggacgagccgaaagatgctcgttcgtgtgggcttacccacttgagggtgagggtcaagccagtggggcaggagcttggggcacggtcgtgctcggtggaggatgatcttgaccagctcatcagatcgatcaacgtgcgcacgtcggcgagggcttctgggcagacgagcacggataggcggcttattgcgcttgggaagtcgccagtgtcgagctcagagattgtggagtccgtgagcctgaagcaggccctgaggaagatgtgcatctcacaggcgtcggagatggcagccatgaagagactgtcaaaaccgacaggggtgtccaccccttctgattctggagcaatcaagaagctacatggctctgttgcagttcaaaccaatgaggagcaagatgacaagagtaaggcagggaaagtttctgtgaagcctgagaaatcggcaggaagttcagtgggtaagccaagtgaaatcagtaaggggcagagcaagagctcagccaagaagaatttgagatcagcatctcctaccacagggaatgttcataaaaccagaatccaagatgtgatcagtaacaagtcatcagagggagttgaaggtatttctgtagaagtaactctgccaaagcagagaaaaggtaaatcaatgaaaacatctagcccccgggctgttcctgtaggtggctcacggttggtgaggccaatgtttcggaataaaacctcgacgaaaaagaaggtgaaacctgaacctgctatagtgcccgcatcacacaagcattgtgagacgaaaggtcctaaatctcacactagtaaacatcaggagtcccttcaggatgaacccagaaccccagcgccaactgacaagaaggctgctgtcagctccaccactgttgatggagctgattttggcactaaaggatgtggtgtcggtgtgatccatggctcgaaggttggtgagttgttaagatcaaaggagaagggagaatgctcccaaagctctaagagtagcattggtgattatagcaccagcacaagcatcagtgaggacagttatggcagcttcagtgctaacagaagcaggcctcacatgtcaaaggatgtgagatggggagccatcaggcgcatggctatccaacaagggagcttgggattaaagaacttcaagcttctcaaacaacttggttgtggggatattggcactgtttatttggctgagttagtgggctcagactgcatgttcgcattgaaggttatggacatcgagtacctcataagcagaaagaaaatgctcagagcacaaactgagagggagatactgcaaatgctcgaccacccattccttccaaccctgtattctcatttcacgacggacaacctttcttgtctggtaatggagttttgccctggtggtgacctacatgttcttaggcagaagcaacctaccaaaaccttttcggaagcagctgcaagattttatgtcgctgaagtcctcttagccttggagtatctccatatgttgggggtcatataccgtgatctgaagccagagaacatccttgttcgtgaagatgggcacatcatgctctcagactttgatctgtcgctgaggtgctcagtgagcccaatgcttgtgagaacatcatcagtagacagagatgagccaagtaggccttctggtccctgtgcacaaagctgcattgatcccctgtgtatccagccatcgtggagcaattcgtcttgcttcacgcccagtctggtttcatctacaccgtcaaggacacggaggactagagctgaacccctgaagaaaccatcacttccacagctcgttgttgagcctacggaagcaaggtcaaattcgtttgttgggacccatgaatatcttgccccagagatcattcgaggagatggccatggcagctcggttgattggtggactcttggaatcttcctttacgaattactctatggcaagacaccattcaggggaccggacaatgacgaaacactctcaaatgtgatctcacagggcttgaagttccctgacagtccagcattaagcttccacgctcgagatctgatcagagggctgcttgtgaaagaaccggagtaccggcttggctcgtcgagaggagctgctgagattaagcggcatcccttcttcgaaggtctgaactgggccttgatccggtggacttcaccaccagagaccccgaaaaatattgatactgcagcaacactcgcgggaacacgcaagaaaaaggaaggcaaatgtctggaattccggctgaatggcgacgacatcgagttcgagctcttttagttgtagctgtagtggtagtcccaatgatatatcagtaccacgtaagcgcaagagtagtctttagtcccccttccttgcagatttctgttcatccttggtcatttcggacgttgggaagtaaggtaaggttggctgataagcatgtaactttatgcgttgttaatactatccaatattagaagacgctgttggaaaattcctgggcatgtgcgagatgcaactagtagaaacagcacctttgtgttgctggatgaaacagtctgtgcgtaccttgataacgctgggaaatagtgactcgaagtcgaagtgaggcctgtaactttatttcatgttaattggtgaaacaaatcttagatatacacaaatgtatctaaaacatatataaacaaaaaaca

SEQ ID NO: 217042 - DNA, 2971 bp, Zea Mays
gtaagagaaaacggccggacgttggaaaccaagatctacggaatcttcaggctttaacagactccgtgatgccggttcttggcccgggaaagcggcttcgtcggccacctaagtgcaggcaaccgtcggtcctgatgacttgaaatgcggcagcccttctacggcctcccacccagatgaagatgcagcttgtggaaccggaaggctcgaaggggatgggttctcctgggtgctcggagatagtcgaactggtggacgagccgaaagatgctcgttcgtgtgggcttacccacttgagggtgagggtcaagccagtggggcaggagcttggggcacggtcgtgctcggtggaggatgatcttgaccagctcatcagatcgatcaacgtgcgcacgtcggcgagggcttctgggcagacgagcacggataggcggcttattgcgcttgggaagtcgccagtgtcgagctcagagattgtggagtccgtgagcctgaagcaggccctgaggaagatgtgcatctcacaggcgtcggagatggcagccatgaagagactgtcaaaaccgacaggggtgtccaccccttctgattctggagcaatcaagaagctacatggctctgttgcagttcaaaccaatgaggagcaagatgacaagagtaaggcagggaaagtttctgtgaagcctgagaaatcggcaggaagttcagtgggtaagccaagtgaaatcagtaaggggcagagcaagagctcagccaagaagaatttgagatcagcatctcctaccacagggaatgttcataaaaccagaatccaagatgtgatcagtaacaagtcatcagagggagttgaaggtatttctgtagaagtaactctgccaaagcagagaaaaggtaaatcaatgaaaacatctagcccccgggctgttcctgtaggtggctcacggttggtgaggccaatgtttcggaataaaacctcgacgaaaaagaaggtgaaacctgaacctgctatagtgcccgcatcacacaagcattgtgagacgaaaggtcctaaatctcacactagtaaacatcaggagtcccttcaggatgaacccagaaccccagcgccaactgacaagaaggctgctgtcagctccaccactgttgatggagctgattttggcactaaaggatgtggtgtcggtgtgatccatggctcgaaggttggtgagttgttaagatcaaaggagaagggagaatgctcccaaagctctaagagtagcattggtgattatagcaccagcacaagcatcagtgaggacagttatggcagcttcagtgctaacagaagcaggcctcacatgtcaaaggatgtgagatggggagccatcaggcgcatggctatccaacaagggagcttgggattaaagaacttcaagcttctcaaacaacttggttgtggggatattggcactgtttatttggctgagttagtgggctcagactgcatgttcgcattgaaggttatggacatcgagtacctcataagcagaaagaaaatgctcagagcacaaactgagagggagatactgcaaatgctcgaccacccattccttccaaccctgtattctcatttcacgacggacaacctttcttgtctggtaatggagttttgccctggtggtgacctacatgttcttaggcagaagcaacctaccaaaaccttttcggaagcagctgcaagattttatgtcgctgaagtcctcttagccttggagtatctccatatgttgggggtcatataccgtgatctgaagccagagaacatccttgttcgtgaagatgggcacatcatgctctcagactttgatctgtcgctgaggtgctcagtgagcccaatgcttgtgagaacatcatcagtagacagagatgagccaagtaggccttctggtccctgtgcacaaagctgcattgatcccctgtgtatccagccatcgtggagcaattcgtcttgcttcacgcccagtctggtttcatctacaccgtcaaggacacggaggactagagctgaacccctgaagaaaccatcacttccacagctcgttgttgagcctacggaagcaaggtcaaattcgtttgttgggacccatgaatatcttgccccagagatcattcgaggagatggccatggcagctcggttgattggtggactcttggaatcttcctttacgaattactctatggcaagacaccattcaggggaccggacaatgacgaaacactctcaaatgtgatctcacagggcttgaagttccctgacagtccagcattaagcttccacgctcgagatctgatcagagggctgcttgtgaaagaaccggagtaccggcttggctcgtcgagaggagctgctgagattaagcggcatcccttcttcgaaggtctgaactgggccttgatccggtggacttcaccaccagagaccccgaaaaatattgatactgcagcaacactcgcgggaacacgcaagaaaaaggaaggcaaatgtctggaattccggctgaatggcgacgacatcgagttcgagctcttttagttgtagctgtagtggtagtcccaatgatatatcagtaccacgtaagcgcaagagtagtctttagtcccccttccttgcagatttctgttcatccttggtcatttcggacgttgggaagtaaggtaaggttggctgataagcatgtaactttatgcgttgttaatactatccaatattagaagacgctgttggaaaattcctgggcatgtgcgagatgcaactagtagaaacagcacctttgtgttgctggatgaaacagtctgtgcgtaccttgataacgctgggaaatagtgactcgaagtcgaagtgaggcctgtaactttatttcatgttaattggtgaaacaaatcttagatatacacaaatgtatctaaaacatatataaacaaaaaaca

SEQ ID NO: 217043 - DNA, 3999 bp, Zea Mays
ccaggatgtaaaaccactactttgcagcttttcatatccacaccaatagaaaaaaaattaggcttgctagtaaaatctcacatgttcatgttgctacgtctttccactgatggtggcatggtgctacttttttttttcagtgcgctgaaaatgatagaagcaggaagggagaggatgcgaaattggcattgtaattcggtctcttgctacctccaagcgagaagataattacaggtcgcgtctcgtagcgtccacccacgccgacgccggactgtgcgcattcttcgggaacgggacagaggagagaggcgagcgagcaacgagacgctgcgctgaccgcccgccccgcccgcgcccattcctcctcccactccatcctcctcctccgcagcccgcgcttcgccgctcgcgcctccttcccatcctcttcttttcaccgccacccctcttcgctctttcggagccaccgtgagtgcgccgcggcttcatcttgctgatcgtgtccgtggcttcttgatactccgtgactgtctccgtccgaagcgagtgagcaagccgaccaacagcggctgagattcgctgcaacgtcggtatcaaaaggtgtccgagcggttgagattcgcgtgccatgtccggattcagtgccgcggccaacgcagcggcggctgagcggtgcgcgctcgcgttccgcgcacggcccgcggcctcctcgccagcgaagcggcagcagcagccgcagccagcgtccctccgacgcagcgggggccagcgccgccccacgacgctctccgcctctagccgcggccccgtcgtgccgcgcgccgtcgccacgtccgcggaccgcgcgtcccccgaccttatcggaaagttcacgctggattccaactccgagctccaggtcgcagtgaacccagcgccgcagggtttggtgtcagagattagcctggaggtgaccaacacaagcggttccctgattttgcattggggagcccttcgcccggacaagagagattggatcctcccgtccagaaaacctgatggaacgacagtgtacaagaacagggctctcaggacaccttttgtaaaggtgataactccactctaaggattgagatagatgatcctggggtgcacgccattgagttcctcatctttgacgagacacagaacaaatggtttaaaaacaatggccagaattttcaggttcagttccagtcgagccgccatcagggtactggtgcatctggtgcctcctcttctgctacttctaccttggtgccagaggatcttgtgcagatccaagcttaccttcggtgggaaagaaggggaaagcagtcatacacaccagagcaagaaaaggaggagtatgaagctgcacgagctgagttaatagaggaagtaaacagaggtgtttctttagagaagcttcgagctaaattgacaaaagcacctgaagcacctgagtcggatgaaagtaaatcttctgcatctcgaatgcccatcggtaaacttccagaggatcttgtacaggtgcaggcttatataaggtgggagcaagcgggcaagccaaactatcctcctgagaagcaactggtagaatttgaggaagcaaggaaggaactgcaggctgaggtggacaagggaatctctattgatcagttgaggcagaaaattttgaaaggaaacattgagagtaaagtttccaagcagctgaagaacaagaagtacttctctgtagaaaggattcagcgcaaaaagagagatatcacacaacttctcagtaaacataagcatacacttgtggaagataaagtagaggttgtaccaaaacaaccaactgttcttgatctcttcaccaagtctttacatgagaaggatggctgtgaagttctaagcagaaagctcttcaagttcggcgataaagagatactggcaatttctaccaaggttcaaaataaaacagaagttcacttggcaacaaaccataccgacccacttattcttcactggtctttggcaaaaaatgctggagaatggaaggcaccttctccaaatatattgccatctggttccacattgctggacaaggcgtgtgaaactgaatttactaaatctgaattggatggtttgcattaccaggttgttgagatagagcttgatgatggaggatacaaaggaatgccatttgttcttcggtctggtgaaacatggataaaaaataatggttctgattttttcctagatttcagcacccatgatgtcagaaatattaagttaaagggcaatggtgatgctggtaaaggtactgctaaggcattgctggagagaatagcagatctggaggaagatgcccagcgatctcttatgcacagattcaatattgcagcagatctagctgaccaagccagagatgctggacttttgggtattgttgggctttttgtttggattagattcatggctaccaggcaactaacatggaataagaactataatgtgaagccacgtgagataagcaaagcacaggataggtttacagatgatcttgagaatatgtacaaagcttatccacagtacagagagatattaagaatgataatggctgctgttggtcgcggaggtgaaggtgatgttggtcaacgcattcgtgatgagatattagtaatacagagaaataatgactgcaaaggtggaatgatggaagaatggcaccagaaattgcacaacaatacaagcccagatgatgtagtgatatgccaggccttaattgattatatcaagagtgactttgatataagcgtttactgggacaccttgaacaaaaatggcataaccaaagagcgtctcttgagctatgatcgtgctattcattcagaaccaaatttcagaagtgaacagaaggcgggtttactccgtgacctgggaaattacatgagaagcctaaaggctgtgcattctggtgctgatcttgaatctgctatagcaagttgtatgggatacaaatcagagggtgaaggtttcatggttggtgttcagatcaatccagtgaagggtttaccatctggatttccggagttgcttgaatttgtgcttgaacatgttgaggataaatcagcggaaccacttcttgaggggctattggaagctcgagttgaactgcgccctttgcttcttgattcgcgtgaacgcatgaaagatcttatatttttggacattgctcttgattctaccttcaggacagcaattgaaaggtcatatgaggagctgaatgatgcagccccagagaaaataatgtacttcatcagtcttgtccttgaaaatcttgcgctttcaattgacgacaatgaagacatcctgtattgtttaaagggatggaaccaagccttggaaatggctaagcaaaaagacgaccaatgggcgctctatgctaaagcatttcttgacagaaacagacttgcccttgcgagcaagggagaacaataccataatatgatgcagccctctgctgagtatcttggctcgttactcagcatagaccaatgggcagtcaatatcttcacagaagaaattatacgcggtggatcagctgctactctgtctgctcttctgaaccgatttgatcctgttttaaggaatgttgctcacctcggaagttggcaggttataagcccggttgaagtatcaggttatgtggttgtggttgatgagttacttgctgtccagaacaaatcttatgataaaccaaccatccttgtggcaaagagtgtcaagggagaggaagaaataccagatggagtagttggtgtaattacacctgatatgccagatgttctgtctcatgtgtcagtccgagcaaggaatagcaaggtactgtttgcgacctgttttgaccacaccactctatctgaacttgaaggatatgatcagaaactgttttccttcaagcctacttctgcagatataacctatagcccatctggaataatctgttagatgccc

SEQ ID NO: 217044 - DNA, 5511 bp, Zea Mays
ccaggatgtaaaaccactactttgcagcttttcatatccacaccaatagaaaaaaaattaggcttgctagtaaaatctcacatgttcatgttgctacgtctttccactgatggtggcatggtgctacttttttttttcagtgcgctgaaaatgatagaagcaggaagggagaggatgcgaaattggcattgtaattcggtctcttgctacctccaagcgagaagataattacaggtcgcgtctcgtagcgtccacccacgccgacgccggactgtgcgcattcttcgggaacgggacagaggagagaggcgagcgagcaacgagacgctgcgctgaccgcccgccccgcccgcgcccattcctcctcccactccatcctcctcctccgcagcccgcgcttcgccgctcgcgcctccttcccatcctcttcttttcaccgccacccctcttcgctctttcggagccaccgtgagtgcgccgcggcttcatcttgctgatcgtgtccgtggcttcttgatactccgtgactgtctccgtccgaagcgagtgagcaagccgaccaacagcggctgagattcgctgcaacgtcggtatcaaaaggtgtccgagcggttgagattcgcgtgccatgtccggattcagtgccgcggccaacgcagcggcggctgagcggtgcgcgctcgcgttccgcgcacggcccgcggcctcctcgccagcgaagcggcagcagcagccgcagccagcgtccctccgacgcagcgggggccagcgccgccccacgacgctctccgcctctagccgcggccccgtcgtgccgcgcgccgtcgccacgtccgcggaccgcgcgtcccccgaccttatcggaaagttcacgctggattccaactccgagctccaggtcgcagtgaacccagcgccgcagggtttggtgtcagagattagcctggaggtgaccaacacaagcggttccctgattttgcattggggagcccttcgcccggacaagagagattggatcctcccgtccagaaaacctgatggaacgacagtgtacaagaacagggctctcaggacaccttttgtaaagtcaggtgataactccactctaaggattgagatagatgatcctggggtgcacgccattgagttcctcatctttgacgagacacagaacaaatggtttaaaaacaatggccagaattttcaggttcagttccagtcgagccgccatcagggtactggtgcatctggtgcctcctcttctgctacttctaccttggtgccagaggatcttgtgcagatccaagcttaccttcggtgggaaagaaggggaaagcagtcatacacaccagagcaagaaaaggaggagtatgaagctgcacgagctgagttaatagaggaagtaaacagaggtgtttctttagagaagcttcgagctaaattgacaaaagcacctgaagcacctgagtcggatgaaagtaaatcttctgcatctcgaatgcccatcggtaaacttccagaggatcttgtacaggtgcaggcttatataaggtgggagcaagcgggcaagccaaactatcctcctgagaagcaactggtagaatttgaggaagcaaggaaggaactgcaggctgaggtggacaagggaatctctattgatcagttgaggcagaaaattttgaaaggaaacattgagagtaaagtttccaagcagctgaagaacaagaagtacttctctgtagaaaggattcagcgcaaaaagagagatatcacacaacttctcagtaaacataagcatacacttgtggaagataaagtagaggttgtaccaaaacaaccaactgttcttgatctcttcaccaagtctttacatgagaaggatggctgtgaagttctaagcagaaagctcttcaagttcggcgataaagagatactggcaatttctaccaaggttcaaaataaaacagaagttcacttggcaacaaaccataccgacccacttattcttcactggtctttggcaaaaaatgctggagaatggaaggcaccttctccaaatatattgccatctggttccacattgctggacaaggcgtgtgaaactgaatttactaaatctgaattggatggtttgcattaccaggttgttgagatagagcttgatgatggaggatacaaaggaatgccatttgttcttcggtctggtgaaacatggataaaaaataatggttctgattttttcctagatttcagcacccatgatgtcagaaatattaagttaaagggcaatggtgatgctggtaaaggtactgctaaggcattgctggagagaatagcagatctggaggaagatgcccagcgatctcttatgcacagattcaatattgcagcagatctagctgaccaagccagagatgctggacttttgggtattgttgggctttttgtttggattagattcatggctaccaggcaactaacatggaataagaactataatgtgaagccacgtgagataagcaaagcacaggataggtttacagatgatcttgagaatatgtacaaagcttatccacagtacagagagatattaagaatgataatggctgctgttggtcgcggaggtgaaggtgatgttggtcaacgcattcgtgatgagatattagtaatacagagaaataatgactgcaaaggtggaatgatggaagaatggcaccagaaattgcacaacaatacaagcccagatgatgtagtgatatgccaggccttaattgattatatcaagagtgactttgatataagcgtttactgggacaccttgaacaaaaatggcataaccaaagagcgtctcttgagctatgatcgtgctattcattcagaaccaaatttcagaagtgaacagaaggcgggtttactccgtgacctgggaaattacatgagaagcctaaaggctgtgcattctggtgctgatcttgaatctgctatagcaagttgtatgggatacaaatcagagggtgaaggtttcatggttggtgttcagatcaatccagtgaagggtttaccatctggatttccggagttgcttgaatttgtgcttgaacatgttgaggataaatcagcggaaccacttcttgaggggctattggaagctcgagttgaactgcgccctttgcttcttgattcgcgtgaacgcatgaaagatcttatatttttggacattgctcttgattctaccttcaggacagcaattgaaaggtcatatgaggagctgaatgatgcagccccagagaaaataatgtacttcatcagtcttgtccttgaaaatcttgcgctttcaattgacgacaatgaagacatcctgtattgtttaaagggatggaaccaagccttggaaatggctaagcaaaaagacgaccaatgggcgctctatgctaaagcatttcttgacagaaacagacttgcccttgcgagcaagggagaacaataccataatatgatgcagccctctgctgagtatcttggctcgttactcagcatagaccaatgggcagtcaatatcttcacagaagaaattatacgcggtggatcagctgctactctgtctgctcttctgaaccgatttgatcctgttttaaggaatgttgctcacctcggaagttggcaggttataagcccggttgaagtatcaggttatgtggttgtggttgatgagttacttgctgtccagaacaaatcttatgataaaccaaccatccttgtggcaaagagtgtcaagggagaggaagaaataccagatggagtagttggtgtaattacacctgatatgccagatgttctgtctcatgtgtcagtccgagcaaggaatagcaaggtactgtttgcgacctgttttgaccacaccactctatctgaacttgaaggatatgatcagaaactgttttccttcaagcctacttctgcagatataacctatagggagatcacagagagtgaacttcagcaatcaagttctccaaatgcagaagttggccatgcagtaccatctatttcattggccaagaagaaatttcttggaaaatatgcaatatcagccgaagaattctctgaggaaatggttggggccaagtctcggaatatagcatacctcaaaggaaaagtaccttcatgggtcggtgtcccaacgtcagttgcgataccatttggcacttttgagaaggttttgtcagatgggcttaataaggaagtagcacagagcatagagaagcttaagatcagacttgcccaagaagattttagtgctctaggtgaaataagaaaagtcgtccttaatcttactgctcctatgcaattggttaatgagctgaaggagaggatgctaggctctggaatgccctggcctggtgatgaaggagacaagcgttgggagcaagcatggatggctattaaaaaggtttgggcatcaaaatggaacgaaagagcatattttagcacacgcaaggtgaaacttgatcatgagtacctttcgatggctgttctcgtgcaagaagttgtgaatgcagattatgcttttgtcattcataccacaaacccatcgtctggagattcttctgagatatatgctgaagtggtgaaagggcttggcgagaccctcgtgggagcctatcctggtcgtgctatgagctttgtttgcaaaaaagatgaccttgactctcccaagttacttggttacccaagcaagccaattggtctcttcataaggcaatcaatcatcttccgttccgactccaacggtgaggacctggaaggttatgctggagcaggattatatgatagtgtaccgatggatgaggaggatgaggttgtacttgattatacaactgaccctcttatagtagaccgtggattccgaagctcaatcctctcaagcatagcacgggctggccatgccatcgaggagctatatggttctcctcaggacgtcgagggagtagtgaaggatggaaaaatctatgtagtccagacaagaccacagatgtagtatgtatgcatctattagacagctcaataagcactgttgtacgcttgtatggttgggacatatgggcgttatggcatgtatagttgtatgcctagatgtacaacacgtgtactcgtatatatatatataaatgctgaaacaagcattggtcctgtactgtagtttctacatttcattgtcaccaataattaagtgtactcctatggctgggagtctatgaaaatggacgtgttgacttattgggtaataaataatttatatatatacttgtgcaagaattttctcaatatgttgcaaagtgtaaccagcttctcaggagttatatcggttggagcagtgtgctcgggtacagcttcttatttcaatgtctccagtgggcgtcttacctctatgtttgtgtttttttttaagtgcagaaatagagaaagttcttgcaaatatctactctatgaaaaggacagctatttggaaat

SEQ ID NO: 217045 - DNA, 1158 bp, Zea Mays
cttgatggcacatcatcaacttggacaatatctggctggggagatcacagagagtgaacttcagcaatcaagttctccaaatgcagaagttggccatgcagtaccatctatttcattggccaagaagaaatttcttggaaaatatgcaatatcagccgaagaattctctgaggaaatggttggggccaagtctcggaatatagcatacctcaaaggaaaagtaccttcatgggtcggtgtcccaacgtcagttgcgataccatttggcacttttgagaaggttttgtcagatgggcttaataaggaagtagcacagagcatagagaagcttaagatcagacttgcccaagaagattttagtgctctaggtgaaataagaaaagtcgtccttaatcttactgctcctatgcaattggttaatgagctgaaggagaggatgctaggctctggaatgccctggcctggtgatgaaggagacaagcgttgggagcaagcatggatggctattaaaaaggtttgggcatcaaaatggaacgaaagagcatattttagcacacgcaaggtgaaacttgatcatgagtacctttcgatggctgttctcgtgcaagaagttgtgaatgcagattatgcttttgtcattcataccacaaacccatcgtctggagattcttctgagatatatgctgaagtggtgaaagggcttggcgagaccctcgtgggagcctatcctggtcgtgctatgagctttgtttgcaaaaaagatgaccttgactctcccaagttacttggttacccaagcaagccaattggtctcttcataaggcaatcaatcatcttccgttccgactccaacggtgaggacctggaaggttatgctggagcaggattatatgatagtgtaccgatggatgaggaggatgaggttgtacttgattatacaactgaccctcttatagtagaccgtggattccgaagctcaatcctctcaagcatagcacgggctggccatgccatcgaggagctatatggttctcctcaggacgtcgagggagtagtgaaggatggaaaaatctatgtagtccagacaagaccacagatgtaaaatagagaaagttcttgcaaatatctactctatgaaaaggacagctatttggaaat

SEQ ID NO: 217046 - DNA, 862 bp, Zea Mays
ttcccggaaaatgtacgaaatctacagtcacgataggggctacacattagatgcctgttcaccaatataagcaaatgatacaaaataaatacacattggtattcacataacaaaaggaactgaaatacagcataccttctcagcaaggatccgatcaccaacatcaaatgttgggaacattgacctggatgggatggacctcggctcagctagggatgatttatagagcagtggcacggtcacagcggcaaagacggtcttcgcatcatctgagcatgagctcacccaccttgagagccaaccggtcttccttcccacccctgcaccaacaggaagactagcaccactcttcttcaccattccagctgcaccagaggcaatgacccctcttccaatcccagctgaacctgaggcgatgctagcactatcaaccaatgcttgtatgccgaccttggaaggagcagcaacagcaggtgacggcactggacggggcgatggagcggctgcgcgtggtgcaggacgaggcgatggtgcagctgtacgcggtgtaggtgcagccgttgcacctgctgggcgtcctgagctgcgcgacgtcgttgcagcagcgactatgtcgctacaggggagccacttgctcgcctgcaggaacgggaggagcgacgcagggttgagcccggttgatattgacggcgacgcaacaagggaggatgcaccagcaatgccgccagtcgatcccatcccagacgcgaacaccgacagcagccccacggccagcgacgctggggggtcatccaccggcggcggcgccttcgcggaacacgatcgcggcagcaacagtgctggcgaattgcttgaagaagac

SEQ ID NO: 217047 - DNA, 1540 bp, Zea Mays
atccctaatttttactccacaccagtgaaacacgacccgctggccgctggccgctgccacgctcccacgcccgagcccgagcccgggaccacgaggcagccagaagacgcgcgcgcccctctcgggtctcggccgcgccgtcgcgctcaccaggtctccaccatcaccagagtggcggcgctctctcctatcgcggcgagcgacggcggcgatgggaggaggggagatggcggggtggctgaaggcactggcgtacagcgccgggggcgtagcggtggccggcctagcggcgttggttgcgctgcaggagcgcctcgtctacgtgcccgtgctcccgggtctggcgcgctcgtaccccatcacgcccgcccgcctcggcctcatctacgaggatgtctggctccgtgccgcggacggcgtgcggctccactcctggttcatccgtcactcccccagctaccgaggtccaaccattctgttcttccaagaaaatgctggcaacatcgctcaccgtttggaatttgttcgactaatgatgcagcgactacagtgcaatgtttttatgctttcttatagagggtatggtgagagtgatggttatccttctcagaaagggatcacatatgatgcacaggctgcacttgaccatctagctcagaggaatgacatcgacacaaccaggatagttatctttggaagatctttaggaggtgctgttggagcagttcttgccaaaaacaatcctgacaaggtggccactctaatactggaaaatacatttacatccatactggatatggctggtattatgcttcccttcttaagatggttcataggcgggagctcttctaaaggtccaaaacttttaaactgtgttgttcgctctccatggaatacacttgatattgttggagaggtcaaacaacccattctcttcctttctggattgcaagatgaactagtcccccctccacacatgaagatgttatatgacaaagcttctgatcataacagaaattgcagatttgttgattttcctagtggtatgcatatggatacctggatgtctggaggggaccgctactggaggacaatccaattgttcttggatcaatacgctcctggagtgcagaatcatgatgccagcttcaaaagtgaaattaccgaggatggcaattattctgctccattgtacctgaagcaaccgaagttgtgaatatttttcgaggatattctccaccatgctctgccgctacatttgcccctggaacttaagttatttgcccatgaaccgaatatatatcctcttgattgaatgtatgaatgatattttttttctcctttgctagtatttggaacattcctaaaaatgtggctgtatgacagcccgatagataggctgtaagctcattggctgaactatttggttttgtgattttgattgtttcctttttcgatgttaaagcatctagacctttaatatgtttggatgacacaagattattgtgattaatgtatgttttgcagaagtgttgaagtt

SEQ ID NO: 217048 - DNA, 2183 bp, Zea Mays
tgcgtgtcacccccgtgttggcctggcagcacgacctcatcacggcacggcgtccttaagcttcccttccggccttcccccacctcccacccgcgatctccgcgaccgcaagcagctcggcaggcaggcctccaccgctccaccacctccactcggtctacgtgctccgtcaccaaacccacccgggccaacgccgaagcaaccccccctccgtcctccccagatccggcgccgcctccgccctcacttacactagcacgcacggcggacacgtcgcctcccccgcgcgatctgatgcaggcgcacgcggtggccagcggcgatgcggtggaagcttaactcctccgtctacaagcgcgtgccgtccagggaaaccgccatggaacccgacgtcgagacgccaatgagaatgacggacggcggcggcagcggcgcggggccgtcgtggcgcatgtcgttgccgcatgtctgtgtcgccacgctcacctcgttcctctttggataccactccggggtggtgaacgagcccttggaggtcatctccgctgaccttggcttcgccggcaacactcttgctgaagggctcgtggtgagtatctgtttgggaggagcttttgttgggtgcctcttcagcggctccatcgcagatggtattgggcgacgccgtgcgttccagctcagtgcgctgcctatgattattggtgctgccataagtgctctctccaatagtttggagggtatgctccttggaagatttttggtaggaacagggatgggattgggtccaccagtagcttcactttatataacggaggtttctccttctacagtgaggggtacatatggtagctttgttcagattgcaacctgccttggaattatagtatcactactcattggtacacctgtcaaagatattgatagatggtggagagtgtgtttctgggttgccgttatcccagcaactttacaagctctcggtatggagttttgtgctgagagccctcagtggctttataagtgtggaaaaataagtgaagcagagatgcaatttgaaaagcttttaggtccccttcatgtaaaatctgccatggcagaactttctagatatgaaagagtagatgatggagaaagtgtcaagtactcagagttgttctatggtcgccacttcaatgttgtttttattggcacaacgctctttgctttacaacagttatccggcataaattctgtgttctatttctcatcaactgtattcagaagtgtgggggtgccctctaaccttgccaacatatgcatggggatttctaatctatcaggatcaattgtagcaatgcttctaatggacaagctaggtagaaaagtgcttctttcagggagttttcttgggatggcttttgcaatggggcttcaggctgttggagcaaaccgtcagtatcttggttctgcatgtgtatatctttcagttggtggcattctgttgtttgtcttgtcattttcactaggagcaggccctgtcccaggacttcttttgcctgagattttccctaataaaatccgagctaaggctatggctctctgcatgtctgtacattggatcgtgaacttctttgttagtttgatgttcttgcgtcttctggagcaacttggtccacagcttctctacacaatattttcgtcagtctgtgtggtagcctcaatatttgtgaggcgccatgtgttggagacgaagggaaagactttacaagagatagaggtttcactcctgcaaccacaataaaggtacatatttgacgtggctggaaccttgggcaggctgtttgctgaacagaaacaagctggccctgcagaagttgattcctgaagtcatcggcaacgccctacaaatggtctcagggaagttccagatatgcgcctgcgacagctagggcggtgtttccatagagcatcatgtactgaagttatgcctgtatcgcccgccctagataggatattttcatacttgtgttgtcatctgttctatctatgagtcgtaatatcagaaaaaaaaggtactactgttttaccgttgatgagcacagttgaaaaaaggaactatcatcttcattttacatgtatgtactcagtaaccatactccgaataataacactgcatggagattccttgttagacggtaaaagaa

SEQ ID NO: 217049 - DNA, 2122 bp, Zea Mays
tgcgtgtcacccccgtgttggcctggcagcacgacctcatcacggcacggcgtccttaagcttcccttccggccttcccccacctcccacccgcgatctccgcgaccgcaagcagctcggcaggcaggcctccaccgctccaccacctccactcggtctacgtgctccgtcaccaaacccacccgggccaacgccgaagcaaccccccctccgtcctccccagatccggcgccgcctccgccctcacttacactagcacgcacggcggacacgtcgcctcccccgcgcgatctgatgcaggcgcacgcggtggccagcggcgatgcggtggaagcttaactcctccgtctacaagcgcgtgccgtccagggaaaccgccatggaacccgacgtcgagacgccaatgagaatgacggacggcggcggcagcggcgcggggccgtcgtggcgcatgtcgttgccgcatgtctgtgtcgccacgctcacctcgttcctctttggataccactccggggtggtgaacgagcccttggaggtcatctccgctgaccttggcttcgccggcaacactcttgctgaagggctcgtggtgagtatctgtttgggaggagcttttgttgggtgcctcttcagcggctccatcgcagatggtattgggcgacgccgtgcgttccagctcagtgcgctgcctatgattattggtgctgccataagtgctctctccaatagtttggagggtatgctccttggaagatttttggtaggaacagggatgggattgggtccaccagtagcttcactttatataacggagtgaggggtacatatggtagctttgttcagattgcaacctgccttggaattatagtatcactactcattggtacacctgtcaaagatattgatagatggtggagagtgtgtttctgggttgccgttatcccagcaactttacaagctctcggtatggagttttgtgctgagagccctcagtggctttataagtgtggaaaaataagtgaagcagagatgcaatttgaaaagcttttaggtccccttcatgtaaaatctgccatggcagaactttctagatatgaaagagtagatgatggagaaagtgtcaagtactcagagttgttctatggtcgccacttcaatgttatccggcataaattctgtgttctatttctcatcaactgtattcagaagtgtgggggtgccctctaaccttgccaacatatgcatggggatttctaatctatcaggatcaattgtagcaatgcttctaatggacaagctaggtagaaaagtgcttctttcagggagttttcttgggatggcttttgcaatggggcttcaggctgttggagcaaaccgtcagtatcttggttctgcatgtgtatatctttcagttggtggcattctgttgtttgtcttgtcattttcactaggagcaggccctgtcccaggacttcttttgcctgagattttccctaataaaatccgagctaaggctatggctctctgcatgtctgtacattggatcgtgaacttctttgttagtttgatgttcttgcgtcttctggagcaacttggtccacagcttctctacacaatattttcgtcagtctgtgtggtagcctcaatatttgtgaggcgccatgtgttggagacgaagggaaagactttacaagagatagaggtttcactcctgcaaccacaataaaggtacatatttgacgtggctggaaccttgggcaggctgtttgctgaacagaaacaagctggccctgcagaagttgattcctgaagtcatcggcaacgccctacaaatggtctcagggaagttccagatatgcgcctgcgacagctagggcggtgtttccatagagcatcatgtactgaagttatgcctgtatcgcccgccctagataggatattttcatacttgtgttgtcatctgttctatctatgagtcgtaatatcagaaaaaaaaggtactactgttttaccgttgatgagcacagttgaaaaaaggaactatcatcttcattttacatgtatgtactcagtaaccatactccgaataataacactgcatggagattccttgttagacggt

SEQ ID NO: 217050 - DNA, 3370 bp, Zea Mays
cgccgctgcgtgtaccttcctcttccagccgcgtcgaacccgagcgcgaagcatccacgacgacgcccccaacagaatacaaaaataataataaaaaaacccacaggtcacgaatggataggtagatcgctcgaagcgattgaaaaatctgcctccgacaattcctagcgcgattcagcagctgcctcggatcggatcggatcggattggaccggcgccggaagaggagaggaggcgtgggggggttcggggcctgcctcgctgccgcccatgtcccgcatgaaacacctgctacgcaagctccacctcgccgggggccccgccggggccggggccgggggcgcggcgcccgaccaccaccgctcgaggcaccgccgctcggggcatccgacgccgccgccgccgggggcggcggtagcggcccccgagccgccgcaaccggcggttactcctgccgcggctgtgtcgatcgcccccgcggtggaggagcctagaggcctcgaggcggaggcggccacgacgcggctggaagaggactaccaggtgcgcctcgcgctcgccatctccgcgtccgaccacgcggggctcgtcgacgcggactccgtccagatccgcgcggcagagctcatcagcctcggggccggcgcggggtccggacacgaccggagccccgcggaggccctctccgcgaggtactggaaccacagcgtagtcaactacgacgagcagctccccgatggcttctacgacgtctgtggcgcgcagctgcatcccggattccaggccaaattcccctcgctcgaatacctcagggctgtcccgcttgggcgtgatgccccgttcctggccattttggtggatcgggagcacgaccctgccctaaaacgactggaagatagggctgcacagattgctgcgcagactagggcaggacatggtggtgctgcttcagctgagcttgcgcagaagattgtgggtctcattgttaatgcgatgggcggtctggttgaggatgctgatggtatgaacagggagtggagcatcaagagccacgagctctctctccagctaaacagtgtcgttcttccacttggctcgcttcgggttgggctgtcgcggcacagatcactgctatttaaggtacttgctgaccgagttaacctaccatgtaagcttctgaaaggaatatgttataccgggacagatgaaggagctgttaacttggtcaaagttgattttgacagcatggaatatattattgatttgatgggagctccaggcaccttaatcccttcagacatttctgggagtcagtttcaggactccaacaatagccaattgagcagtgatgccattgaagagagtgtagcagaattgtgcttagcccttgagcagattaatggtggatatgagaacaaaaatactattggaggatgctcatctggtcacagttctattttagcgctcacgagttcacacctgggagatttatctcagacagaacttaaacaaaatgttgtttctgagaaaaaaaatgatggggatatttctgagcatgttaaggtcgatgatgtttccaagtatattgtgcctgaagtagtggacccacagtttgcacaaaatttgcatgacttacttttggagagtggtgcattgctaccctcggatttattatctgatcaaaataatcatgacattcacgagaaagagagtacaggatggttattagttgctcaaacaacacaaaatttgccaaatgcttttgtagctaaagattcgtcatcgcctgatgaagatgaacaaccccgtgcagaaaatacagaagcagccatcagagatttggatttgcatggtcatactgctagtgttatttccaatgaggatcaaatggttgctggttctttggtgaacatgtcaggaagtagcaatggaaatttggacacgttgagttggtctagtgtaaaaacgatcagctctgttatagatgatatcgctgaatacgaaataccatgggaagatcttgatattggagaacgtattggtttaggatcatttggggaagtttatcgtgcagactggaatggcacggaggttgcagtgaagaaatttcttgaccaggatttatcaggtgtttcactagagcaatttaaatgtgaagtgagaatcatgtcaaggctaaggcatcccaatgttgttcttttcttgggatatgtgacacaatcgcctaatctctctatattaactgagtacctcccaagggggagcctatatcgtctgttgcataggccaaatagtcgaattgatgaagtacggaggctaaaaatggcattcgatgtggcaaaagggatgaactacctgcactctagccatcctaccattgttcaccgtgacctgaaatcccccaatcttttagtggataaaaattgggttgttaaggtgtctgactttggcatgtccaggttgaaacatcatacttttctttcctctaagtcaactgctggaacaagtggatggcacctgaggtactacgaaatgaaccatctaatgagaagtgtgatgtctacagctttggagtaatcctgtgggaactagcaactatgcgtgtgccatggagtgggttgaatccaatgcaagttgtaggagcagttggattccagaacaggcgactagagatccccaaggatgtggatccacaggtggctagcataatatcttcatgttgggatagcgatccgagcaaaaggccgtcgttctcccagctcttgtcccctctaaagcaactacaacatttagttgttacagaaagctgctgacatgcgtttcctgggacaaatctcaggatacatatattcaagtatttaagctctgttacagggctaaaattttcttttttgaagctcgtggaggagtctctgcggtatagatgtgtttgggcgaaggttctgcacatcagtaatcatcaccttgtgaaaatgcgagtctctgaagccgtgcaaaggcgctgctggagaaagcgtagtgtgtagtctcaagtgaagaaaagtggtgcgacacaaagtgttctgtgccatggtaaataattgttcagttctggatttgaacgggtgataaattcaccacaaagataggatcttgaagttttttccccttgccttacaaaagatggaaagtgaagtgaaaaaaaattcacggtgtctgcaaaaagtcgcagcccgatgccacgtgaaaatgtatatgatgtaatacagttgctttggaaaggcaaacataaagttcacagttttgttcgataatggtgtgtttggttttccttcttaagaaaagaattgatatttatctcataagctaataaagctaaattggaggaatc

SEQ ID NO: 217051 - DNA, 3341 bp, Zea Mays
gcatccacgacgacgcccccaacagaatacaaaaataataataaaaaaacccacaggtcacgaatggataggtagatcgctcgaagcgattgaaaaatctgcctccgacaattcctagcgcgattcagcagctgcctcggatcggatcggatcggattggaccggcgccggaagaggagaggaggcgtgggggggttcggggcctgcctcgctgccgcccatgtcccgcatgaaacacctgctacgcaagctccacctcgccgggggccccgccggggccggggccgggggcgcggcgcccgaccaccaccgctcgaggcaccgccgctcggggcatccgacgccgccgccgccgggggcggcggtagcggcccccgagccgccgcaaccggcggttactcctgccgcggctgtgtcgatcgcccccgcggtggaggagcctagaggcctcgaggcggaggcggccacgacgcggctggaagaggactaccaggtgcgcctcgcgctcgccatctccgcgtccgaccacgcggggctcgtcgacgcggactccgtccagatccgcgcggcagagctcatcagcctcggggccggcgcggggtccggacacgaccggagccccgcggaggccctctccgcgaggtactggaaccacagcgtagtcaactacgacgagcagctccccgatggcttctacgacgtctgtggcgcgcagctgcatcccggattccaggccaaattcccctcgctcgaatacctcagggctgtcccgcttgggcgtgatgccccgttcctggccattttggtggatcgggagcacgaccctgccctaaaacgactggaagatagggctgcacagattgctgcgcagactagggcaggacatggtggtgctgcttcagctgagcttgcgcagaagattgtgggtctcattgttaatgcgatgggcggtctggttgaggatgctgatggtatgaacagggagtggagcatcaagagccacgagctctctctccagctaaacagtgtcgttcttccacttggctcgcttcgggttgggctgtcgcggcacagatcactgctatttaaggtacttgctgaccgagttaacctaccatgtaagcttctgaaaggaatatgttataccgggacagatgaaggagctgttaacttggtcaaagttgattttgacagcatggaatatattattgatttgatgggagctccaggcaccttaatcccttcagacatttctgggagtcagtttcaggactccaacaatagccaattgagcagtgatgccattgaagagagtgtagcagaattgtgcttagcccttgagcagattaatggtggatatgagaacaaaaatactattggaggatgctcatctggtcacagttctattttagcgctcacgagttcacacctgggagatttatctcagacagaacttaaacaaaatgttgtttctgagaaaaaaaatgatggggatatttctgagcatgttaaggtcgatgatgtttccaagtatattgtgcctgaagtagtggacccacagtttgcacaaaatttgcatgacttacttttggagagtggtgcattgctaccctcggatttattatctgatcaaaataatcatgacattcacgagaaagagagtacaggatggttattagttgctcaaacaacacaaaatttgccaaatgcttttgtagctaaagattcgtcatcgcctgatgaagatgaacaaccccgtgcagaaaatacagaagcagccatcagagatttggatttgcatggtcatactgctagtgttatttccaatgaggatcaaatggttgctggttctttggtgaacatgtcaggaagtagcaatggaaatttggacacgttgagttggtctagtgtaaaaacgatcagctctgttatagatgatatcgctgaatacgaaataccatgggaagatcttgatattggagaacgtattggtttaggatttgtattgttgcaggatcatttggggaagtttatcgtgcagactggaatggcacggaggttgcagtgaagaaatttcttgaccaggatttatcaggtgtttcactagagcaatttaaatgtgaagtgagaatcatgtcaaggctaaggcatcccaatgttgttcttttcttgggatatgtgacacaatcgcctaatctctctatattaactgagtacctcccaagggggagcctatatcgtctgttgcataggccaaatagtcgaattgatgaagtacggaggctaaaaatggcattcgatgtggcaaaagggatgaactacctgcactctagccatcctaccattgttcaccgtgacctgaaatcccccaatcttttagtggataaaaattgggttgttaaggtgtctgactttggcatgtccaggttgaaacatcatacttttctttcctctaagtcaactgctggaacaccagagtggatggcacctgaggtactacgaaatgaaccatctaatgagaagtgtgatgtctacagctttggagtaatcctgtgggaactagcaactatgcgtgtgccatggagtgggttgaatccaatgcaagttgtaggagcagttggattccagaacaggcgactagagatccccaaggatgtggatccacaggtggctagcataatatcttcatgttgggatagcgatccgagcaaaaggccgtcgttctcccagctcttgtcccctctaaagcaactacaacatttagttgttacagaaagctgctgacatgcgtttcctgggacaaatctcaggatacatatattcaagtatttaagctctgttacagggctaaaattttcttttttgaagctcgtggaggagtctctgcggtatagatgtgtttgggcgaaggttctgcacatcagtaatcatcaccttgtgaaaatgcgagtctctgaagccgtgcaaaggcgctgctggagaaagcgtagtgtgtagtctcaagtgaagaaaagtggtgcgacacaaagtgttctgtgccatggtaaataattgttcagttctggatttgaacgggtgataaattcaccacaaagataggatcttgaagttttttccccttgccttacaaaagatggaaagtgaagtgaaaaaaaattcacggtgtctgcaaaaagtcgcagcccgatgccacgtgaaaatgtatatgatgtaatacagttgctttggaaaggcaaacataaagttcacagttttgttcgataatggtgtgtttggttttccttcttaagaaaagaattgatatttatctcataagctaataaagctaaattggaggaatc

SEQ ID NO: 217052 - DNA, 3294 bp, Zea Mays
gcatccacgacgacgcccccaacagaatacaaaaataataataaaaaaacccacaggtcacgaatggataggtagatcgctcgaagcgattgaaaaatctgcctccgacaattcctagcgcgattcagcagctgcctcggatcggatcggatcggattggaccggcgccggaagaggagaggaggcgtgggggggttcggggcctgcctcgctgccgcccatgtcccgcatgaaacacctgctacgcaagctccacctcgccgggggccccgccggggccggggccgggggcgcggcgcccgaccaccaccgctcgaggcaccgccgctcggggcatccgacgccgccgccgccgggggcggcggtagcggcccccgagccgccgcaaccggcggttactcctgccgcggctgtgtcgatcgcccccgcggtggaggagcctagaggcctcgaggcggaggcggccacgacgcggctggaagaggactaccaggtgcgcctcgcgctcgccatctccgcgtccgaccacgcggggctcgtcgacgcggactccgtccagatccgcgcggcagagctcatcagcctcggggccggcgcggggtccggacacgaccggagccccgcggaggccctctccgcgaggtactggaaccacagcgtagtcaactacgacgagcagctccccgatggcttctacgacgtctgtggcgcgcagctgcatcccggattccaggccaaattcccctcgctcgaatacctcagggctgtcccgcttgggcgtgatgccccgttcctggccattttggtggatcgggagcacgaccctgccctaaaacgactggaagatagggctgcacagattgctgcgcagactagggcaggacatggtggtgctgcttcagctgagcttgcgcagaagattgtgggtctcattgttaatgcgatgggcggtctggttgaggatgctgatggtatgaacagggagtggagcatcaagagccacgagctctctctccagctaaacagtgtcgttcttccacttggctcgcttcgggttgggctgtcgcggcacagatcactgctatttaaggtacttgctgaccgagttaacctaccatgtaagcttctgaaaggaatatgttataccgggacagatgaaggagctgttaacttggtcaaagttgattttgacagcatggaatatattattgatttgatgggagctccaggcaccttaatcccttcagacatttctgggagtcagtttcaggactccaacaatagccaattgagcagtgatgccattgaagagagtgtagcagaattgtgcttagcccttgagcagattaatggtggatatgagaacaaaaatactattggaggatgctcatctggtcacagttctattttagcgctcacgagttcacacctgggagatttatctcagacagaacttaaacaaaatgttgtttctgagaaaaaaaatgatggggatatttctgagcatgttaaggtcgatgatgtttccaagtatattgtgcctgaagtagtggacccacagtttgcacaaaatttgcatgacttacttttggagagtggtgcattgctaccctcggatttattatctgatcaaaataatcatgacattcacgagaaagagagtacaggatggttattagttgctcaaacaacacaaaatttgccaaatgcttttgtagctaaagattcgtcatcgcctgatgaagatgaacaaccccgtgcagaaaatacagaagcagccatcagagatttggatttgcatggtcatactgctagtgttatttccaatgaggatcaaatggttgctggttctttggtgaacatgtcaggaagtagcaatggaaatttggacacgttgagttggtctagtgtaaaaacgatcagctctgttatagatgatatcgctgaatacgaaataccatgggaagatcttgatattggagaacgtattggtttaggatcatttggggaagtttatcgtgcagactggaatggcacggatttatcaggtgtttcactagagcaatttaaatgtgaagtgagaatcatgtcaaggctaaggcatcccaatgttgttcttttcttgggatatgtgacacaatcgcctaatctctctatattaactgagtacctcccaagggggagcctatatcgtctgttgcataggccaaatagtcgaattgatgaagtacggaggctaaaaatggcattcgatgtggcaaaagggatgaactacctgcactctagccatcctaccattgttcaccgtgacctgaaatcccccaatcttttagtggataaaaattgggttgttaaggtgtctgactttggcatgtccaggttgaaacatcatacttttctttcctctaagtcaactgctggaacaccagagtggatggcacctgaggtactacgaaatgaaccatctaatgagaagtgtgatgtctacagctttggagtaatcctgtgggaactagcaactatgcgtgtgccatggagtgggttgaatccaatgcaagttgtaggagcagttggattccagaacaggcgactagagatccccaaggatgtggatccacaggtggctagcataatatcttcatgttgggatagcgatccgagcaaaaggccgtcgttctcccagctcttgtcccctctaaagcaactacaacatttagttgttacagaaagctgctgacatgcgtttcctgggacaaatctcaggatacatatattcaagtatttaagctctgttacagggctaaaattttcttttttgaagctcgtggaggagtctctgcggtatagatgtgtttgggcgaaggttctgcacatcagtaatcatcaccttgtgaaaatgcgagtctctgaagccgtgcaaaggcgctgctggagaaagcgtagtgtgtagtctcaagtgaagaaaagtggtgcgacacaaagtgttctgtgccatggtaaataattgttcagttctggatttgaacgggtgataaattcaccacaaagataggatcttgaagttttttccccttgccttacaaaagatggaaagtgaagtgaaaaaaaattcacggtgtctgcaaaaagtcgcagcccgatgccacgtgaaaatgtatatgatgtaatacagttgctttggaaaggcaaacataaagttcacagttttgttcgataatggtgtgtttggttttccttcttaagaaaagaattgatatttatctcataagctaataaagctaaattggaggaatc

SEQ ID NO: 217053 - DNA, 1430 bp, Zea Mays
accggtagaaaaagaggtctaaggttgcgccgcgaagaggtttgcccacgcgcgccccgccccgccgccgcagccatgaagcagtcgccgtctcagaatcagagcccaaagaccccatcgcgctcggccccggagccgtggctggtggccgcggcggcggcgagcgccagcgacgactcgtgcgtgaacgacgtggacagcttcgcgcgcaccgtggccgccgtgaagtccaaggccgcgtcgtgcgcgcggccggacatgctggcgtccgtgctgtcgcactacgccgccaagtggctcccggacgtggcgcctcccacgtcgtcgtccgcctcggggcgcttcctgccgccggagagccccacggccacgtggctgaagaagcggctcctcctggagtccctcgtggccgcgctccctccggacccggcggcgggcggcggcggctgctgcgccgcggccgtcgccgacgacggcatcacgtgcgacttcctgctgaagctgctccgcgcggggagcatggtgggcgcggacgcggcgctgctgcgggacctggaggcgcgcgcggcgagacggctggaccaggcgacgctgggcgccgtgatgataccggcgttcggccacggcggcgagcacgcgccggcgctgctcctggacgtgcccctcgtgctgcgcctcgtgcgcgggttcctcaaggagggaggcggcagcaaggccggcggcggcgccgccctcgtcggcggcggcggcgcggcggccgcccgcgtggccaggctcgtggacgcgtacctggccgaggccgcgctggaggccggcctgcgccccgccgagttcgaggagctcgcgcgcgccgtgcccgcccacgcgcgccccgccgacgacgcgctgtaccgcgccgtcgacacctacctcaaggtgcagtgcaacgcgctgcaggcccaggtggacaggctgggctccgagaggcggcggcgcggcgggggcggcgggggcttcttcaagtggagcgcgttctggttcggcggcggcatgggtgccgacgtcgctagggtcgacgactccgagagcggcatggagcgccggacaccgcccaaggggaagaagagcgccacggcgacgcccaacgccaagtggcgcaagtccacgtcctgagatgacaagggtgttgtgttgaagggatggcgatcgacggccgttaattgtgttttctgctttttggatggggtttgtgattactttgagtttgaacatcatatattttatattgtgttgctgtcaactcgagtttgtgttcgtggtgaaactatcaggctggaaactgtacgacgtggctgaaagcacctaccgcttacaggcagaagccatgcacgaacagattccaacatgcaaaatgtaaaagtcgatgcttggaaatgcacataatgtgagac

SEQ ID NO: 217054 - DNA, 1648 bp, Zea Mays
cttcgttgccaggcaaggatgtcatccccaggtgcccaaaatcggatgcctggagacgcccacagtgcctgtcaaagctgcctgggagcaaagaaaacaggtcaatcaaagttgtttcgagatgcctgccaacactgattgttctgaagatttattccaaagccatgaagatctgcagaaccaatcaagaacttctaacttggacaatgaacattttccaagggatgcatcaaaccacgctaatgttgaagcaactggacctccatatgatctctcaaatggtggtatatccacacagcactcagattggagtgaaattaaatgggggagtacagatgagatgcttggtaatgctggtcaggatgatgaccatttcactccgatgggcatgttttgtcttaccaataacacatatattcttgatatttcttgcattgagtccaacatgggtgagagaatggaaagcattcgcaatggcaacagtagttgccttactatgcaggaagaacatttacaggcagaatgtggaggatatcctcatccagattatatatctgttgatatggttgatgaaagatcactgcatgatttgccacatgggttatcacaaaacaatgagcacaaccaacacacgtttaagaacatggaatatcaaaaacctttggtattggataaacaatatgcatatagaagcaacaactcttctattcacaattcatcaaaaggttgcttcagtagagatggggacatggcttctgatttatgtgtgctagagggtaatacgaatcctgctcctgctcacctatggccttatcaggggaagttccatcataattttagcaacctgtgtatgcttggtgctgggacctcactgccaggattagtagctgcaaaggttggggcagatgtaacactaacagacattgcgcagaatgcagaagtactgaacaacatcagaagcatatgtgctctcaatgacaccaattgtactgtttcaggacttacatggggagactgggatgaatcggtatttgatttacgtcctgacattattcttggagctgatgtactttacgactcagcaaatttcaatgatctattcgcgacggtgacctttcttctcgaaaattcttctggggcggttttcataaccacataccacaaccgcagtggtcagcatctgattgagtttttgatggtcaagtggggtttgaagtgtttgaaactgctggatggtttctccttcctaccgccatgtaaggctgctttacttcaggggaatattcagcttgttgaaattgcgcttgacaaggaaaaatataaatgaccctgagtttgattacaggagttgacgaaaagcacagaaatggaatgccatatttggtcctctgcatacatgtacgagcaactccatgtcaagccatccgtttggactgtcatcataagggtgttcttttaattaaaagaaactcatggggagcatcgtcgttcgaatagcctatgcatgcaagaaaaaacagaaaatgttagcagatatgtactcttttgtgacatctgtaaagaacatgttggtttcctgaaaaaaggtgcagaatgtccttttcttgatgtattcgaaaaaatgagctaaatgcataactttacacaa

SEQ ID NO: 217055 - DNA, 828 bp, Zea Mays
cacaagtgcctggctcactgtacgccgctgcacggttcttttatgtactgaactgaaaagaaaaagagctcccacaagaagcatacgaatactcatgacaatgacagtacggacaagaatggagagcccgatgtgggaggtgatcacccggggagtattcacacagaaaatgaacagatcggcgaaccaaggcctaaaagatcaaaaaggctgatgaagagcattactgataaggaactagcggctgctgcaggtgatgaggaaccggcagaaaatcacagagcccatgattatgatggtacagaagaggttcaagacggcactgcagcctgatccacttgacatataaacgagaaccgaggatgatacatggcaagacgagtaatttactatgctgagcttgggcatcagaggtgattaggccgtcagtgcggtggtccgtagcaataagctgacagagggagagggtgttgccttttagaggcgagggctatatcctccagaggttaacatgcagtccacatctgcagtattcgttgtgctggctgtgaccataatggaggaggtggagggtccatgaccagcacacacagaaatagtttcgcgtaaagagggtagctatatctgtattggcgatagttttggtgttgataattaaagcaatggaacacggctggaaaatagctgccgtgatgttgtaatgtattttaaggggggcgtttggtatggctcaatcctaacttcagagttgtaaagtagttttgggagctgcagtataaatttaattttcgacttttggaacacagctgtcaaacaccctctaaatag

SEQ ID NO: 217056 - DNA, 722 bp, Zea Mays
atgggcatgctgcttgatgtgaaaaagagctcccacaagaagcatacgaatactcatgacaatgacagtacggacaagaatggagagcccgatgtgggaggtgatcacccggggagtattcacacagaaaatgaacagatcggcgaaccaaggcctaaaagatcaaaaaggctgatgaagagcattactgataaggaactagcggctgctgcaggtgatgaggaaccggcagaaaatcacagagcccatgattatgatggtacagaagaggttcaagacggcactgcagcctgatccacttgacatataaacgagaaccgaggatgatacatggcaagacgagtaatttactatgctgagcttgggcatcagaggtgattaggccgtcagtgcggtggtccgtagcaataagctgacagagggagagggtgttgccttttagaggcgagggctatatcctccagaggttaacatgcagtccacacagaaatagtttcgcgtaaagagggtagctatatctgtattggcgatagttttggtgttgataattaaagcaatggaacacggctggaaaatagctgccgtgatgttgtaatgtattttaaggggggcgtttggtatggctcaatcctaacttcagagttgtaaagtagttttgggagctgcagtataaatttaattttcgacttttggaacacagctgtcaaacaccctctaaatag

SEQ ID NO: 217057 - DNA, 519 bp, Zea Mays
cgctgatgccttccttagcttcttctctgcgtcggccatcatggagccctggtcttctcctctaactccggtggtcgactctccgttcttctcggttgtccctgtatctctaactcccacaatgtacaataattaatcacgtgatgcggaggaaaagagccaagtcgaccccaagcgtgggctaatccgcaggatgatgctgatggacgaaccggaagatggataatctgaacgagtgtcaagccaaaggatgctcgccaagtggtcgcctaacaaacactaacctagtgttactcaggcaagccccgtaaggattggatgcgtatgtaggcctgttgatcaaggactatcttaactggccacatgccctggaaatgggacagggtaagcttgaacccggctattccatacgtgaaaagacaaccgcgcactgggcgtgggagatggtgggagtagcgtgtaccctcctggctagaggctggatggaggagtacgatgctcccgggtagcgcagaccgg

SEQ ID NO: 217058 - DNA, 3069 bp, Zea Mays
ctctcgtcttcctcctcctcctcctcccccttcccgagctcctctctcttgccgtccacgctcgactgcgcgagacactggtcaacgcccgggtggcaggcggctctggtggtgtgttgtgtgtgtggtggtggggtcgggtgagtctagctccgtcgcttgcgccggaagaacttgtcgggagctgtctctagccctcgggttccatggggaggaacggtagcgtgaagcgctcggcgtcttcgagcgctgcgggtgctgctgcggggccgccgtccttctctgtgaatcccgccgactaccggttgatggaggaggtggggtacggtgcgcacgccgtcgtgtaccgcgcgatcttcctgccgaccgaggatgttgtggctgtcaagtgcctggatctcgatcagctcaataacaacatcgatgaaatacaaagggaggctcaaataatgagcttgatagatcatcctaatgtaatcagggcttactgctcatttgttgtagagcacagcctctgggtgataatgccattcatgacagagggttcttgtttacacttaatgaagatctcataccaagaaggttttgatgagccggtcattggctccattctaaaggaaactcttaaggctctggaataccttcaccggcagggtcaaatacatcgtgatgttaaggctggtaatatccttattgatggtgctggggtagtgaagcttggagactttggtgtttctgcttgtatgtttgatagaggtgacaggcaaagatctaggaatacatttgtaggaacaccatgctggatggctccagaagtgctccaacctggcactggatataatttcaaagctgacatatggtcatttggaatcactgctcttgaactagcacatggccatgctccattttcgaaatacccccctatgaaggttcttctcatgacactccagaatgcaccacctggtcttgattatgaacgtgacagaagattctcgaagtcatttaaagagatggttgcaatgtgcttggtcaaagatcaaacaaagagaccaacagctgagaagttgctaaagcattcatttttcaaaaatgcaaagcctccggagttgactattaagaatatcttatctggtttacctcctctctgggaccgtgtaaaggctctccagcttaaagatgcagcacaattggctttgaagaaaatgccttcttctgaacaggaggctctctccctgagtgaatatcaacgcggtgttagtgcatggaacttcgatatcgaggatctcaaggctcaagcatcattgattcatgatgacgagccaccagaaataaaagaagatgatgacattccaagaaacattgaggatttatcttcacggaaccatttggcaaagtcatctgcaaatgaatgcaactccagccagcgagcttttgccaccactttaaattcggatggaaacagccccaccatgaacgaagcttttgattttgatattagcgatgctgacactacaagaagggctgatggatatgaaagcaacacaaggcagaatgattcgttgccctctacatcaaagagagatccagagtcgaatcattgggcaagtgatggccagagacaactgacttctggtgggaacaatagctcaacatctgaaaggggctatggttttgagaggcaaaaactttgggcatggttaatggattgtcaatatttagttatgctgagtgcttattactgttcggggtatgacagggatgcatctgtgcaaatgatatctgacaaacaaagaagtgagatgagaaaaacagcaagccttagtggtccactttcactgccaactcgtgcttctgcaaatagtctgtcagctcctattcgatcttcaggaggttatgtagattcatcaggcgataagtccaaacgaagtgtagtagagattaaaggtcgcttctcagtgacatctgagaatgtcgatcttgcaaaggttcaggaaggtccacttagtagtctctcccggaaatcaccagagggttcactgttaagaaaatctgccagcactggtgattattttgttaatcctaagctgatgtgtaatgctaatcagctgaaggaactatgcaatagttcagtatcatcttcagtattaattccccaccttaacaaccttgtgcaacagactatgtttcagcaggatctaatcatgaacctacttagtaacttgcaacaaagtgagaaagttgatggaacacaaccaataatatcttctcaagtccgaacaatggagaatgataaagtagctgatacagttaactctgtgaaggaacggtcattacttgttaaaatttcagagttgcagtctaggatgataatactgactgatgaattaattgcagctaagctaaaacatgttcagttgcagcaagagctaaatgcactgtactgccgagaagaaattgtggatatcagggatgaggataacgaagaaacataatgaggatccatgccgtatgaattatccgcctctctctgagatgcataaattacctgcctctccctgaggtcaatggagaacaggagaaggaaagcggcggggagaacaagagaagaaaagtggaggtgccgcaaatatttgctggatctagagagtagctgcggttgtgttttttttctttgaaggttgtcttccccttgcttgctgtcatcagtcatcagtgtgtataaccgtctctttttcagtagttcgaggtttttttttgggtgactacaagatgaggcgtggtcatgctgctatttttctgtcatccccatcattggaagtagctgtgattatgtagtacgtaggctaccggggtggttaatctatgtagaattgcaggtgactgcataataaattgtattttatgtagcaataggatgtatattaaatattggcgcattcgttgatataatatcatatagggctatttgcaaacatccaaacaaggttgtttgcatatatctaataataaagtatgtatctactccatttgttgttgtcacgtttcaaatggttattttataggtggagt

SEQ ID NO: 217059 - DNA, 2361 bp, Zea Mays
ctctctcgtcttcctcctcctcctcctcccccttcccgagctcctctctcttgccgtccacgctcgactgcgcgagacactggtcaacgcccgggtggcaggcggctctggtggtgtgttgtgtgtgtggtggtggggtcgggtgagtctagctccgtcgcttgcgccggaagaacttgtcgggagctgtctctagccctcgggttccatggggaggaacggtagcgtgaagcgctcggcgtcttcgagcgctgcgggtgctgctgcggggccgccgtccttctctgtgaatcccgccgactaccggttgatggaggaggtggggtacggtgcgcacgccgtcgtgtaccgcgcgatcttcctgccgaccgaggatgttgtggctgtcaagtgcctggatctcgatcagctcaataacaacatcgatgaaatacaaagggaggctcaaataatgagcttgatagatcatcctaatgtaatcagggcttactgctcatttgttgtagagcacagcctctgggtgataatgccattcatgacagagggttcttgtttacacttaatgaagatctcataccaagaaggttttgatgagccggtcattggctccattctaaaggaaactcttaaggctctggaataccttcaccggcagggtcaaatacatcgtgatgttaaggctggtaatatccttattgatggtgctggggtagtgaagcttggagactttggtgtttctgcttgtatgtttgatagaggtgacaggcaaagatctaggaatacatttgtaggaacaccatgctggatggctccagaagtgctccaacctggcactggatataatttcaaagctgacatatggtcatttggaatcactgctcttgaactagcacatggccatgctccattttcgaaatacccccctatgaaggttcttctcatgacactccagaatgcaccacctggtcttgattatgaacgtgacagaagattctcgaagtcatttaaagagatggttgcaatgtgcttggtcaaagatcaaacaaagagaccaacagctgagaagttgctaaagcattcatttttcaaaaatgcaaagcctccggagttgactattaagaatatcttatctggtttacctcctctctgggaccgtgtaaaggctctccagcttaaagatgcagcacaattggctttgaagaaaatgccttcttctgaacaggaggctctctccctgagtgaatatcaacgcggtgttagtgcatggaacttcgatatcgaggatctcaaggctcaagcatcattgattcatgatgacgagccaccagaaataaaagaagatgatgacattccaagaaacattgaggatttatcttcacggaaccatttggcaaagtcatctgcaaatgaatgcaactccagccagcgagcttttgccaccactttaaattcggatggaaacagccccaccatgaacgaagcttttgattttgatattagcgatgctgacactacaagaagggctgatggatatgaaagcaacacaaggcagaatgattcgttgccctctacatcaaagagagatccagagtcgaatcattgggcaagtgatggccagagacaactgacttctggtgggaacaatagctcaacatctgaaaggggctatggttttgagagggatgcatctgtgcaaatgatatctgacaaacaaagaagtgagatgagaaaaacagcaagccttagtggtccactttcactgccaactcgtgcttctgcaaatagtctgtcagctcctattcgatcttcaggaggttatgtagattcatcaggcgataagtccaaacgaagtgtagtagagattaaaggtcgcttctcagtgacatctgagaatgtcgatcttgcaaaggttcaggaaggtccacttagtagtctctcccggaaatcaccagagggttcactgttaagaaaatctgccagcactggtgattattttgttaatcctaagctgatggcagtggctgggagtagggaggcacatatatcaccattttcatggttggggcggaggaaactcggagtaatcaatggggactggggaatgttgaagttgaaggaggctgaaaggcatgatcttaatattaagagaaaaaaagatctcttagaagaccaaatacaagacgtcatgaaggcggcccataaatcacaggccaccaccagcggccccacacacaacccagagatccaccaacaaacacctaagaagcctaaggcctaaggccagtggcggaggaaataataatgagttatggctcaagaaagaaaaaaagagagaaaaacatgatgcaacacataggactc

SEQ ID NO: 217060 - DNA, 2040 bp, Zea Mays
ctctcgtcttcctcctcctcctcctcccccttcccgagctcctctctcttgccgtccacgctcgactgcgcgagacactggtcaacgcccgggtggcaggcggctctggtggtgtgttgtgtgtgtggtggtggggtcgggtgagtctagctccgtcgcttgcgccggaagaacttgtcgggagctgtctctagccctcgggttccatggggaggaacggtagcgtgaagcgctcggcgtcttcgagcgctgcgggtgctgctgcggggccgccgtccttctctgtgaatcccgccgactaccggttgatggaggaggtggggtacggtgcgcacgccgtcgtgtaccgcgcgatcttcctgccgaccgaggatgttgtggctgtcaagtgcctggatctcgatcagctcaataacaacatcgatgaaatacaaagggaggctcaaataatgagcttgatagatcatcctaatgtaatcagggcttactgctcatttgttgtagagcacagcctctgggtgataatgccattcatgacagagggttcttgtttacacttaatgaagatctcataccaagaaggttttgatgagccggtcattggctccattctaaaggaaactcttaaggctctggaataccttcaccggcagggtcaaatacatcgtgatgttaaggctggtaatatccttattgatggtgctggggtagtgaagcttggagactttggtgtttctgcttgtatgtttgatagaggtgacaggcaaagatctaggaatacatttgtaggaacaccatgctggatggctccagaagtgctccaacctggcactggatataatttcaaagctgacatatggtcatttggaatcactgctcttgaactagcacatggccatgctccattttcgaaatacccccctatgaaggttcttctcatgacactccagaatgcaccacctggtcttgattatgaacgtgacagaagattctcgaagtcatttaaagagatggttgcaatgtgcttggtcaaagatcaaacaaagagaccaacagctgagaagttgctaaagcattcatttttcaaaaatgcaaagcctccggagttgactattaagaatatcttatctggtttacctcctctctgggaccgtgtaaaggctctccagcttaaagatgcagcacaattggctttgaagaaaatgccttcttctgaacaggaggctctctccctgagtgaatatcaacgcggtgttagtgcatggaacttcgatatcgaggatctcaaggctcaagcatcattgattcatgatgacgagccaccagaaataaaagaagatgatgacattccaagaaacattgaggatttatcttcacggaaccatttggcaaagtcatctgcaaatgaatgcaactccagccagcgagcttttgccaccactttaaattcggatggaaacagccccaccatgaacgaagcttttgattttgatattagcgatgctgacactacaagaagggctgatggatatgaaagcaacacaaggcagaatgattcgttgccctctacatcaaagagagatccagagtcgaatcattgggcaagtgatggccagagacaactgacttctggtgggaacaatagctcaacatctgaaaggggctatggttttgagagggatgcatctgtgcaaatgatatctgacaaacaaagaagtgagatgagaaaaacagcaagccttagtggtccactttcactgccaactcgtgcttctgcaaatagtctgtcagctcctattcgatcttcaggaggttatgtagattcatcaggcgataagtccaaacgaagtgtagtagagattaaaggtcgcttctcagtgacatctgagaatgtcgatcttgcaaaggttcaggaaggtccacttagtagtctctcccggaaatcaccagagggttcactgttaagaaaatctgccagcactggtgattattttgttaatcctaagctgatggatccacggacaggacatgtgattcttt

SEQ ID NO: 217061 - DNA, 1871 bp, Zea Mays
tttcagtccttttacgacctcgtttcccaagagtccgctctctcgtcttcctcctcctcctcctcccccttcccgagctcctctctcttgccgtccacgctcgactgcgcgagacactggtcaacgcccgggtggcaggcggctctggtggtgtgttgtgtgtgtggtggtggggtcgggtgagtctagctccgtcgcttgcgccggaagaacttgtcgggagctgtctctagccctcgggttccatggggaggaacggtagcgtgaagcgctcggcgtcttcgagcgctgcgggtgctgctgcggggccgccgtccttctctgtgaatcccgccgactaccggttgatggaggaggtggggtacggtgcgcacgccgtcgtgtaccgcgcgatcttcctgccgaccgaggatgttgtggctgtcaagtgcctggatctcgatcagctcaataacaacatcgatgaaatacaaagggaggctcaaataatgagcttgatagatcatcctaatgtaatcagggcttactgctcatttgttgtagagcacagcctctgggtgataatgccattcatgacagagggttcttgtttacacttaatgaagatctcataccaagaaggttttgatgagccggtcattggctccattctaaaggaaactcttaaggctctggaataccttcaccggcagggtcaaatacatcgtgatgttaaggctggtaatatccttattgatggtgctggggtagtgaagcttggagactttggtgtttctgcttgtatgtttgatagaggtgacaggcaaagatctaggaatacatttgtaggaacaccatgctggatggctccagaagtgctccaacctggcactggatataatttcaaagctgacatatggtcatttggaatcactgctcttgaactagcacatggccatgctccattttcgaaatacccccctatgaaggttcttctcatgacactccagaatgcaccacctggtcttgattatgaacgtgacagaagattctcgaagtcatttaaagagatggttgcaatgtgcttggtcaaagatcaaacaaagagaccaacagctgagaagttgctaaagcattcatttttcaaaaatgcaaagcctccggagttgactattaagaatatcttatctggtttacctcctctctgggaccgtgtaaaggctctccagcttaaagatgcagcacaattggctttgaagaaaatgccttcttctgaacaggaggctctctccctgagtgaatatcaacgcggtgttagtgcatggaacttcgatatcgaggatctcaaggctcaagcatcattgattcatgatgacgagccaccagaaataaaagaagatgatgacattccaagaaacattgaggatttatcttcacggaaccatttggcaaagtcatctgcaaatgaatgcaactccagccagcgagcttttgccaccactttaaattcggatggaaacagccccaccatgaacgaagcttttgattttgatattagcgatgctgacactacaagaagggctgatggatatgaaagcaacacaaggcagaatgattcgttgccctctacatcaaagagagatccagagtcgaatcattgggcaagtgatggccagagacaactgacttctggtgggaacaatagctcaacatctgaaaggggctatggttttgagagggatgcatctgtgcaaatgatatctgacaaacaaagaagtgagatgagaaaaacagcaagccttagtggtccactttcactgccaactcgtgcttctgcaaatagtctgtcagctcctattcgatcttcaggaggcagtcttgcactgctgtag

SEQ ID NO: 217062 - DNA, 2304 bp, Zea Mays
acaaacaattaaatatcccgcattccttggcgaaggagggaggagtagccgcccggcgatgttcacctgccgctgtgccgtcgtcgttgtcgtcgccctcgccgtgcttctactgccggccgcggcgacccagttggtttactgcgacgattccacctatgccgacaacagcacgttccaggcgaacctgaatctccttagcgcggcgctccccgccaacgcctccgcctcgccggcagggttcgccactggcgcagtcggtacggcgccggaacaggtcaatgggatggcgctctgccgcggcgatacgaacgcttcctcctgttcctcctgcgtcgcggccgcgttccggtacgcgcaggcgcagcagggctgccccctcacgaagggcgccaccgtctacctggacgattgtacccttcgcttcgccggcatccgattcctcgacttccttagagaggaccagtggctcgtcccagaattgtcccgcgattgaacctgcctctgggagcgtcaacgccacagatgcctggttcggcgccgccgtcgcggggatcttcacggccctggtcgaccgcgcagcggcggcgagcaacgcgacgaggaagtacttcgccacggcggagatggatttcgaccctaagctctacggcctcgcgcagtgcgcgccggatctgacgccggcgcagtgccagggctgccttggagacctccagtcgagggtgacggcgcagttcctgagcggacggcccctcggcaacaacgctttcatggtgtggtgctccctgaggtatagtgtgtcgccgttctacgctggccgggcgatgctacagcttccggcgccgccggcacctccaccaacgtccacgcccacgcttcattcttcagggaggaaagtgaatgcagcaggaatctctgcaggcatagcctgtgttgttgtgttgatgttgattctttcggtctttttctttattcgcttcaggctaaggattaaagtgaagaaaaatgatcactcactaaagaagattgggagagctcaatgcacgatctttgatttattgacactggaagaggcgactgaacatttcgcagagaaaaataagcttggaaaaggtggtttcggtattgtgtacaaggggatactgtctgacgggcaagagatagcagtcaagaaacttttaggaagagccgggagtgggttggatcagctacaaaatgaggtgcaagtactggcagagcttcagcacaaaaatcttgttgggttacagggtttttgctcgcatcataatgatacactgctagtttatgaatacatcaagaacgggagccttgacactattctatttgatgatagggaaggaaatgcacttaactgggagcaacagtacaacatcatctttggaattgccaaggggattttgtatctccatgaggactcaagcatgaggatcatccatcgggacctgaaggcaaataacattcttcttgacgacaacatggaaccgaaaattgcagatttcgggttggcaaggcttctaggagaaggccacacacatactcagacaggcagagttgttgggacattcggttatatggcgccagagtatgcatcacatggtagtgtgtcgcctaagattgacatctttagcttcggcgtcttgatccttgagatcgtgaccaggagaagcaactgcagctctgatgaccacagcactgtgaatctcctaagtgatgtctgggatcactggaagaaagggacgatgccacaaatgcttcaccggtcactggatgagtttgctcgaagccaagcgctgcgatgcatccacattggtctgctgtgcgtccagccggaacctgacgataggcctgacatatcagccgtagtgttcatgttaaccagggatagcatagagctccagccgccggggcagcctgcgttcttcttcggtagagaatcaccttcagctttacgattagatggtcaaagcagctatgtatatcaccgtgatggtttcaaattgggacagggcgtctcggtgaatggggttacactcagtgaactgtatcctagataggatcaaagtctggatactgagcacatggaatacagttaacatgttgaactcgataggtttctttgatgattagggtcttgctaatcccctctaacctgtctccatcctttagaaatgaagtaatcgatgtagatttactccgtttcgttttagttgtcgctggatagtgcaaaattgaactatctagcgacaactaaaaagaaacgaaggaagtacatatctaattgtg

SEQ ID NO: 217063 - DNA, 2226 bp, Zea Mays
atttctctatgttgcggaaataaccgcagctgggagccccgcgatcggcccattctgaattggtccacttcttccgccacacccgaaatcaacgagcatcttcagactagtctagcaagctagctcctcacggaacctgcgctccgatccgccacctctcttatctgaaaacctccagagtccagcctcccttccgattccacctccaagctcccagtcccagccatggcgtctcatgatcatcaccactcccactcccacgacgaccaccaccaccattcccacggggacggcggtggccatgcggctgggggatcgtgggtaggggaggacggacgcgtgtggcactcccacgacggcctcgcgccccactcccacgagcccatctactcccccggcgacttcaccaagcgcgcgccgccgctcgcctcgcgcgacttcgctgaccgcgccttcaccgtcggcattggcggccccgtaggcaccgggaaaactgccctcatgctagcattgtgcagatttctacgcgacaagtatagtcttgcagctgtcacaaatgatatattcacaaaagaagatggagaattcttaattaaacatggagcgctccctgaagaacgtatacgtgcagtggaaactggaggctgccctcatgcggctattcgcgaagacatcagcataaatcttggtcctctggaggagctatcgaacttgtcatttctattgttatgcatgttagaatctacgccggagagacaaccctgcaggttgccggcgagctcctacctcccaggtaagtttctccaggtatgagaaacctcactggtactcacacgcacgcgaacactttagagagaaacacagcagatttggtggcgtcctattgacgccttttcttagcctctaaggccatatatttatagactatcataaggaaacaaactagctattacaagggaataatccagactgctatcagtcctgatcttgctgattggatccgtcaatataagactgatccactaccatacttgctatttcctaaaacagaataagtaaactagcaccaatcaaggattactttcctaacaatgcatatatccgtatcaacctacagaatgtttttactggatctaaactcaatctaggtcattcctattgtcattgatatatctgtgcaaagtgcaaacctacatacccatctaaacattatttcagagtaatagtttctacatggatcatgttgcttctatggctgtctcatgtttgatactggacattagaatatgctcctttcaagttcttgcgtaaaagaaaattttgcattctgattctactgttttttttggagcatcatgttagctgaaacctcaggtgtcctgaatatgtcaagcatccctctggttctgaaaaatttcaacaatccagcattaaagagtgccatttgtgccttttccatgcagataacttggcagctaacttcagcagagaattagcagactacataatctacattatcgatgtctctggtggggacaagataccaagaaaaggtggccctgggataacccaggccgatctgttggtaataaacaagacagacctagcacctgctgttggagctgatctgtctgtaatggagcgagacgcacttcgcatgcgcgaaggagggccctttgtgtttgcacaggtgaaacatggagtgggcgtggaggggatcgtgaaccatattctgcaggcgtgggagatcgcgactggtaataagcggcgataagatctcacgacttggggccatatgttggatgcagatttgattcagtcggcacttccacatgcatgtgtcatctgttcgtttctcaataaattctgcgtcatttgctgctgattgtacttgacaagtagagacatggatggactcttaaaattccatccatgtgttaaatgacatattcgagacatccttttctcaataaactctgcatcatttggtgaattgcacttgagaagtaaagacatggagccttaaaattccatacttgagtttaatggcacatttgagatatcctttttctccttaaaattccatagcttcgtggattcggtattaacgctctggactacgagtgggaggttaatagtctgcaagcccgctcagtgaatgcatgaacgctggcatgttgtgaagccgttcagtgaaagttctgaatatggaaaagaaaaaaaaaa

SEQ ID NO: 217064 - DNA, 2203 bp, Zea Mays
  misc_feature (2203)..(2203): n is a, c, g, or t
cagtctctttccttcggcagtgtttgggggtggggtaccgcttcctcctgtgttgaagcagcctttccctgtcttctctgcactacgctacgcccgcagtccccgcacccagcagcagagtacaatgtccacaggcaaatgcgataaggtgaggaagagagagcacgggatgggttgagaaacaagatggagggagaaagtgggcagcctgctggatcttggcatctcgccgccgctcatttccgctccacctgttactgagggaagtgctatctttttcttggctcctgtttggtgcagtgtgggctagttatctactagtagtatcttcgggccagttcaagacttagccgctgttctaagcgctgaggaagtaaaatatcatttatcggctagagtagtctctgttgctatccggcaccaatggcgactttggtccgtcatgattcaaggcagtactcgtggtggattagccatatcagccccaagaactcgaaatggctccaggaaaatgtcagcgacatggactcaaaggttaaagcaatgatcaaacttatcaatgaagatgctgattcttttgcaaagagagcagagatgtactacaagaaacgtccagagctaatgaatttggtggaggaattctatcgagcgtaccgtgcactggcagaaagatacgatcagtccactggggcacttcgccaggctcacagaacaatttctgaagcatttccaaatcagatgccatcaatgtcagacgagtcaccctctgctttcagccaagagatggagcctcatactccagatacgtctactctcacacgtgtggcatttgattacgatgatcttcagaaggatggagttggtgtgtcaccacaaagtttcacctccaagaggaatggtacacaccctgaggaaaccagtgcgctgtcatcgagtgttgaaaatgctcctcgtgctggttttgatggaaaggtatggaaaggactaacttttgaaggcccaaatgtcaaagggaaagatgatattagcaacgagatggcaaatttgcaacaagaagttgcaagactattagctgagagccaggatctgaaacagcagatgttttcagaatccgagcgggcaaacaaagctgaaaatgagatgcaaatgctcaaggcaacagtattgcaattaaatgctgaaaaagacacatcacttatgcaatataataattcctctgagcgaatatctacattggagtctgagctatcgaaggctcagtctgaccttgagaagttaactgatgaaatggctgcagatgtccagaagctaattaatgctgaaacactcaatattgctatacagtctgaggctgagggtttggatcagaagatgaagatgcagcaacaagcactagaacaaaagcttaaggaattggagagtttccgctcaagcttccaggaggagcatgaaaagcgcatgcaggctgaaagtgctctactttcccagaggaaggaacttgctcaatctcatgaagaagtgcagaggttggctatagaaataaagacagcgaatgaaaagttgaatgagttcaagcagaccaaggaggtccttgagtacactgtttgtgagctgaagaaggatgttgagcgccttacagaacaaaaccagtcctctgaggtgcttgtacagaaacttggtgaccagattaatacactcaaggattcaaataatgaacttcaaagtgaaatacaaagccttaagagcatcatttcacagctaaacactgagaagaatgcagctgtgcttcaacaccagcagtttgtggaactggtttcggtacttgaatctcagttgtcgaagctacagtcagagctagatgagactgagcagaaagtacagatgctgacacatgatcttgaaaagaagaaagaagaagcggacaatgtccatctcaagctgcaagatgaatgccataggcgtatgcaaattgaggcaactcttctcatgacagagggtctgcattcccagttgcaagaagaaatgcaaatgttgacacaagattttgacgggtcaacaaagaagctcagtgagttggaaaaaaataagttagacctggagagcatactgaaagaactgaataacaccattttaggtttgaactcggagaaggatgcttcactccttcagcaacagcagtctttacagaaagtatctgatttgn

SEQ ID NO: 217065 - DNA, 2157 bp, Zea Mays
  misc_feature (2157)..(2157): n is a, c, g, or t
cagtctctttccttcggcagtgtttgggggtggggtaccgcttcctcctgtgttgaagcagcctttccctgtcttctctgcactacgctacgcccgcagtccccgcacccagcagcagagtacaatgtccacaggcaaatgcgataaggtgaggaagagagagcacgggatgggttgagaaacaagatggagggagaaagtgggcagcctgctggatcttggcatctcgccgccgctcatttccgctccacctgtgtgggctagttatctactagtagtatcttcgggccagttcaagacttagccgctgttctaagcgctgaggaagtaaaatatcatttatcggctagagtagtctctgttgctatccggcaccaatggcgactttggtccgtcatgattcaaggcagtactcgtggtggattagccatatcagccccaagaactcgaaatggctccaggaaaatgtcagcgacatggactcaaaggttaaagcaatgatcaaacttatcaatgaagatgctgattcttttgcaaagagagcagagatgtactacaagaaacgtccagagctaatgaatttggtggaggaattctatcgagcgtaccgtgcactggcagaaagatacgatcagtccactggggcacttcgccaggctcacagaacaatttctgaagcatttccaaatcagatgccatcaatgtcagacgagtcaccctctgctttcagccaagagatggagcctcatactccagatacgtctactctcacacgtgtggcatttgattacgatgatcttcagaaggatggagttggtgtgtcaccacaaagtttcacctccaagaggaatggtacacaccctgaggaaaccagtgcgctgtcatcgagtgttgaaaatgctcctcgtgctggttttgatggaaaggtatggaaaggactaacttttgaaggcccaaatgtcaaagggaaagatgatattagcaacgagatggcaaatttgcaacaagaagttgcaagactattagctgagagccaggatctgaaacagcagatgttttcagaatccgagcgggcaaacaaagctgaaaatgagatgcaaatgctcaaggcaacagtattgcaattaaatgctgaaaaagacacatcacttatgcaatataataattcctctgagcgaatatctacattggagtctgagctatcgaaggctcagtctgaccttgagaagttaactgatgaaatggctgcagatgtccagaagctaattaatgctgaaacactcaatattgctatacagtctgaggctgagggtttggatcagaagatgaagatgcagcaacaagcactagaacaaaagcttaaggaattggagagtttccgctcaagcttccaggaggagcatgaaaagcgcatgcaggctgaaagtgctctactttcccagaggaaggaacttgctcaatctcatgaagaagtgcagaggttggctatagaaataaagacagcgaatgaaaagttgaatgagttcaagcagaccaaggaggtccttgagtacactgtttgtgagctgaagaaggatgttgagcgccttacagaacaaaaccagtcctctgaggtgcttgtacagaaacttggtgaccagattaatacactcaaggattcaaataatgaacttcaaagtgaaatacaaagccttaagagcatcatttcacagctaaacactgagaagaatgcagctgtgcttcaacaccagcagtttgtggaactggtttcggtacttgaatctcagttgtcgaagctacagtcagagctagatgagactgagcagaaagtacagatgctgacacatgatcttgaaaagaagaaagaagaagcggacaatgtccatctcaagctgcaagatgaatgccataggcgtatgcaaattgaggcaactcttctcatgacagagggtctgcattcccagttgcaagaagaaatgcaaatgttgacacaagattttgacgggtcaacaaagaagctcagtgagttggaaaaaaataagttagacctggagagcatactgaaagaactgaataacaccattttaggtttgaactcggagaaggatgcttcactccttcagcaacagcagtctttacagaaagtatctgatttgn

SEQ ID NO: 217066 - DNA, 1707 bp, Zea Mays
atggcccccgtcctcaccgttgccccctcctccaaccagatccgtcgcatggccccctgtcctacccgcgacgccgccgctgctgtttgggtttttgcggttgactccgaatcccgccgccgctgctcgtgcaggaggcctcgagctcccagtgctcccctcctcaaccaccccgggctttccggagcgcagcaaggacgcttgggtaggtcggcttccaagcagccccggagatctcggtcctcgcccacactcttgcctcgaatcccgccgccgctgctcgtgcaggaggccttgagctcccagtgctcccctcctcaaccaccccggaatcttcatgatgcagctaatatcgctgcattggcagctttatctactttctggaggcctgaatgcacggttggtggggacgatggtcagcaagttacagtgcatgatcctgaggttagggatccacttcctcttacgatacaccatatgcccatagctgtaacatttgcatattttggtgaaggtaacatcgtggttcttgatcccacatacaaggaagaagcagtaatgggagggaggatgactgctatagttaactcaaatggggatgtttgtgccattcagaaagctggtggagagggtctcatgtcaagtgttaccatgcagtgtttaagaattgcttcggtaaaggctactgatataacaagcaaaataaagaaagcagtacttatttgggatgttgaagcacaaccaaatagacatgctgtcctaggatcaagcgagtctcgccctgatctgatattaacaggacataaggaaaatgcggaatttgcgcttgccatgtgtccagcagaaccatatgtcctatcaggagatgttgaagacgagaagatggcagcgtggaaggcgcttggcgcgatgttgctggtgcagctgttcaacacgggcaaggcctgtgcttgtgcagaatgcaccaaggacaagactggatgcagggacatgggggacgatggggattggattggggtgaacaagggcttcaacagtgatgctgttttagcaatggagacgatccattccctgtcagcttcaaaatcaagttacccaatggctgatctcacccaactcttcatgacagctacccaagaagggaaaagatcagaatcgcaaggccagattcttagggtggaatgctatagcttaatgccctaatctttatatgcctcttcttatatctgcacttccatgggcaccgggcgacactaaattcacaagataccccctccacctcaaggtggtatggagttctgtgtatcacaagaggcatctaggttgacctcactcttcttagtgttcatgcccactacgcaagacaacaccgcaacgccgatggagttggaagatttcattagtttcgactggatctggatgagatggactctgcttgtaaggagagagagagtgcatggcttgggaggagcatatttttgttcatccttttcatgagtcatgttacctgccatgtcagattatgtaacttcagatatttctgtttttgttagaaaagtaccaaaatagtttcacttcatggctactctcagatgtgttattgttgctgccactaatcatataagggtaacattgtatttgttagccaacaatttttgagatattaaagttggtgataatataattgttgtttgtttctatgtaatc

SEQ ID NO: 217067 - DNA, 1709 bp, Zea Mays
atggcccccgtcctcaccgttgccccctcctccaaccagatccgtcgcatggccccctgtcctacccgcgacgccgccgctgctgtttgggtttttgcggttgactccgaatcccgccgccgctgctcgtgcaggaggcctcgagctcccagtgctcccctcctcaaccaccccgggctttccggagcgcagcaaggacgcttgggtaggtcggcttccaagcagccccggagatctcggtcctcgcccacactcttgcctcgaatcccgccgccgctgctcgtgcaggaggccttgagctcccagtgctcccctcctcaaccaccccggaatcttcatgatgcagctaatatcgctgcattggcagctttatctactttctggaggcctgaatgcacggttggtggggacgatggtcagcaagttacagtgcatgatcctgaggttagggatccacttcctcttacgatacaccatatgcccatagctgtaacatttgcatattttggtgaaggtaacatcgtggttcttgatcccacatacaaggaagaagcagtaatgggagggaggatgactgctatagttaactcaaatggggatgtttgtgccattcagaaagctggtggagagggtctcatgtcaagtgttaccatgcagtgtttaagaattgcttcggtaaaggctactgatataacaagcaaaataaagaaagcagtacttatttgggatgttgaagcacaaccaaatagacatgctgtcctaggatcaagcgagtctcgccctgatctgatattaacaggacataaggaaaatgcggaatttgcgcttgccatgtgtccagcagaaccatatgtcctatcaggagatgttgaagacgagaagatggcagcgtggaaggcgcttggcgcgatgttgctggtgcagctgttcaacacgggcaaggcctgtgcttgtgcagaatgcaccaaggacaagactggatgcagggacatgggggacgatggggattggattggggtgaacaagggcttcaacagtgatgctgttttagcaatggagacgatccattccctgtcagcttcaaaatcaagttacccaatggctgatctcacccaactcttcatgacagctacccaagaagggaaaagatcagaatcgcaaggccagattcttagggtggaatgctatagcttaatgccctaatctttatatgcctcttcttatatctgcacttccatgggcaccgggcgacactaaattcacaagataccccctccacctcaaggtgtggtatggagttctgtgtatcacaagaggcatctaggttgacctcactcttcttagtgttcatgcccactacgcaagacaacaccgcaacgccgatggagttggaagatttcattagtttcgactggatctggatgagatggactctgcttgtaaggagagagagagtgcatggcttgggaggagcatatttttgttcatccttttcatgagtcatgttacctgccatgtcagattatgtaacttcagatatttctgtttttgttagaaaagtaccaaaatagtttcacttcatggctactctcagatgtgttattgttgctgccactaatcatataagggtaacattgtatttgttagccaacaatttttgagatattaaagttggtgataatataattgttgtttgtttctatgtaatc

SEQ ID NO: 217068 - DNA, 700 bp, Zea Mays
gaaacagcagctagagtgaaagtaattgattttggatcagcacttccatggaggttaatgggctgaagcgcgaggcggcgtcccgcggcggcgccacggggcacgacaaactgcggctgctcatcatctcccggcgtggctcacgacggttcctgaacgagcgggagatggagcgcgccgcgggcgacgccgggttctaggtgcgggtggcggagctcgaccagccacggacatggcgacgttcgtggcgctggtgaactattcccatagagtaaaaggtggtatggagttctgtgtatcacaagaggcatctaggttgacctcactcttcttagtgttcatgcccactacgcaagacaacaccgcaacgccgatggagttggaagatttcattagtttcgactggatctggatgagatggactctgcttgtaaggagagagagagtgcatggcttgggaggagcatatttttgttcatccttttcatgagtcatgttacctgccatgtcagattatgtaacttcagatatttctgtttttgttagaaaagtaccaaaatagtttcacttcatggctactctcagatgtgttattgttgctgccactaatcatataagggtaacattgtatttgttagccaacaatttttgagatattaaagttggtgataatataattgttgtttgtttctatgtaatc

SEQ ID NO: 217069 - DNA, 483 bp, Zea Mays
atggagtccgttgcttcggtcggtttatagccgagattgaaaatctgtaagggacagctaggtggtatggagttctgtgtatcacaagaggcatctaggttgacctcactcttcttagtgttcatgcccactacgcaagacaacaccgcaacgccgatggagttggaagatttcattagtttcgactggatctggatgagatggactctgcttgtaaggagagagagagtgcatggcttgggaggagcatatttttgttcatccttttcatgagtcatgttacctgccatgtcagattatgtaacttcagatatttctgtttttgttagaaaagtaccaaaatagtttcacttcatggctactctcagatgtgttattgttgctgccactaatcatataagggtaacattgtatttgttagccaacaatttttgagatattaaagttggtgataatataattgttgtttgtttctatgtaatc

SEQ ID NO: 217070 - DNA, 6502 bp, Zea Mays
agaaaagatagcgaggagaagaaggcagcagcaagtagtagaggaagaggcgcccgaataccacggtgcctccgcctcgaccgccccccgggctccgacgcccttcctcaccaccgtgccttgctcctcctcctgctgctgcgctccgccgcggagccctaggcggagctgcggaccccgtgaccccccgcggcaccgccccggagctcggcggaggcggcgggcacgtcctcctcatgcctttggcgccccggtcggagccgatcggtggccgcctgaggagacgcagcagctcggcgggcgccggcggagaggcggcgggcacgtcctcctcatgcctttggcgccccggtcggagccgatcggtggccgcctgaggagacgcagcagctcggcgggcgccggcggagaggcggcgggcgcggaggtggaggcggaggcggaggaggaggaaggggagaatggcgctcttccgcaagttcttcctcaagaagaccccggatcggctgctcgagatctccgagaacgtctacgtgtttgactgttgcttctcgactgattccatgggtgaggatgagtatcgggattacttgagtggcattgtcgcgcaattgcaggaattttttccggacacatcacttatggcatccaatttttggtctggggacaaaagaagccggatatcagatattttatctgagtatgacatgacagtaatggactacccacaacagtatgaaggatgtccgttgcttcagctcgagatgatccaccatttcttgaaatcatgtgaaaattggctatcagtggaaggacaacataacatgcttttgatgcattgcgagagagggggttggccagtgcttgcattcatgttggccggactgcttttgtatcgcaaaatatatactggcgagcagaggacactagaaatggtctacaagcaggctcgcagggactttatacagcagttctttcccttgaatccccagccttcacatttgagatatctgcactatataacaagacaaggaggtggttcagaatggcctcctattagcagacccctcatcttggattcaatagttctccatgttgttccgcggtttgacacagatggtggttgtaggccatacttgattgtacatgggcaagactcaagtcctggtaacaagagtgcaaaggtcctttatgagatgccaaaaacaaagaagcaccttcagcgttatggacaggcagaggttcccataaaattaagtgtgtcctgccatgttcatggagatgtggtacttgaattcatccatattggcgataatatagagaataaggaaacaatgttccgggtcatgttcaacactgcattcgttcaatcaaacatccttgaactgaatcgtgatgatattgatgttgcttggaatgtgaataatcagttcccaagggactttcgagctgaggtacacttttcagaccctgtttcatttaagcctgctgctaccatcgaggaggtagctgatgatggagacgagactgatgttgcttcggtagacacaggagaggagttttatgaagcagaggagtattggcatgatgctagaaaagacccagcaactcattcaattgatggtggaatatcattaaatgacattgcagaatttgatggtggggcaacaactgaagaaaggagcagcctagagaagcaccgatctgatgagggtgtgaagattgctgtctcccagaattttggtagtatgaatgaaaaagtggcaattgcacctacctcaagttttgagaatcaagaaggattgcagcagcctcgtgaagttcttccaaatgctaaactaagcaaaaataatgatcaagagaacagtgatgtgcatgatatacaggtggttgctacatctgttgattcagagggacacaagtttggatctaccggtcaggaggacacgaaaggtgtaattgcacaaactttagtcacgacagtcgatctaagtggcagtgatggaattcactgccagactgatgaacaaacaaaaatgtcagaataccctgatttggactacactgcttttggctctcctagaagtttgtcacgtacagatggggatgcccacatgagaactaagaaaaatgaagggttgcagaatggtgatattaagattatcactgagaacacaataagtgtggacaacgagctagtgatctatgaagagaaaactatagttgtcaatggtaatgcaatacaggtagtaaaaaacgttgtcaatgaagagagcatcgcggctaagataggcaaaccaattactgagagtaggacctcattggacaatgacaatggcaagattcaaactgctaaaccttctgatatagccaatggcaaattggatgggtgtagattagaatcttgccttgaaaccgtgcctaccaagaaaaccactgtccatgacagaattgttgtcttaccagccactggagtagcaactgagataaaagccaagcaagaggtgcttgttgacaaacaggattttggtatagttcttcctcaaagtcgaacagtagccagggctaggagtccgaggcttggaagtgatgaccgagggcaaatccctgataaagctgtgttatcagtattgaaggagatggtagtaggcaatgcaaagatggaagatcaaccaaagcttgccaaaccaaaaataatgcgtagatggatctcaccaaagaaggaatctgacgctacctctgtgcgcagaccatctcaccctccatctagatactacagttcaccagctgcactaggtattcgatccatatctacagatggtaaaatcagcgttgtgaatgatgcacctttattatcactaaaacaaccatatggcagcaacttgacacgagaagcaacatctgcacagtctgctccatcgcctccacaaaaatccttgttactaggtgcacaaagtgcatcaagaagccaggtttctccaccgccaccgcctccacctccacctgcaaccaactattcttcaagttctacgcctatgcacatggggttagcttcaacaggtttgtcaaacttacctcaaggtgcttctccacctaggtcaccggtagcacaaaaacatgcatttgcccctcccgctcctcccccgcccccacctccacccccgaggtcaggtgtaggtggaaatactccacctccgcctcctccaaggctaaataacagtgcaatcgctccaccgccacccccatccaccataacacgatcaagtgctcctcctccaccaccaccaccacaatcaatgtcacgttctgctcctccgccacctccgccgccaccaccatcattgtgttctaatgttccattgccacctctttcatgcacactttctgctccacctcctccgccgccaccaccactaccttctatggcacgttcagcagcaccatctcccccgccacctcctcctagccgaggagcacccccaccccttccccttggtcgaggagcacctccacccccacccccaccaccaccacctggccgaggagcacccccacccccacctcctcctggccggggagcatccctgcccccacctcctccccctagccgaggagcacccccgcccccacctcctcctgtttcacgtgcaggacctccaccacctccgcctcctccaggtgctcgctgtggacctccacctcctccaccccctccaggtgcaagtgctccacctccacctcctcctccaggtgcacggccaggagctccaccaccaccgcctcctctaggagcgcggccaggagctccacctcccccacccccacctggaggtggtggaagaggacctctaccacctcgtgcaccaggtgtgccaactccacctagagcaccaggtgtaccgctaccaccaggaagtaatccatcattaggcagaggacgtggggctgtacgccctatgggatcagctattggggctgctgcctcacgcaagtcaactttgaagccattgcactgggtcaaagtgacaagggcccttcaaggtagtctttgggaagaattgcagcgcaacactgactcgcagagcgtttcagagttcgatgtatcagaacttgagagcctttttcctgcagctgttccaaagtctgatgacagctcaaaatctgaacgtagaaaatcacttggatcaaaaccagaaaaagtgcatctaattgagttgaggagggcaaataacacagagatcatgctgacaaaagttaaaatgccactctcggatttggtgagtgcagctctcacgctagatcaatctaccttggatgttgatcaagtggagaatctcataaagttctgtcctacgaaagaagaaatggaacttctcaagaattacactggagacaaacagattcttgggaaatgtgaacagttcttcttagaattgatgaaagtgcctagaatggagtcgaaactgcgagtattctccttcaagatccagtttggttcacaagttgctgatctgagaagaaacttggatatcatagactcttcttgtaatgagatccgaacttctctcaagttgaaagaaataatgaagaaaatccttctccttggaaatactctgaaccagggaactgctagaggggctgcggttggcttccggttggacagtcttctaaaacttacagacacccgagcaacaaataataagatgacactaatgcactacctctgtaaggtacttgctgcaagatctccacagcttttaaacttctatgcggatcttgttagcttagacgccgcatcaaagatacaactaaaaatgttggccgaggaaatgcaagcagttagtaaagggctggaaaaggttcagcttgagtatgatgcttcagaaagggatggtccagtatccaaaatttttcgtgagaaactgaaagagttcaccgacaatgctggatctgatgtgcagtcgttatcttcattgttttctgaagtgggtaaaaaggctgacgcgttgatcaagtattttggcgaggatcctgtccgttgccccttcgaacaagtgatctccaccctcttaacttttgtaacaacatttcgaaaagcacatgaggagaacctgaagcaagctgaacttgagaagaaaaaagctgaaaaagaggcagaagcagagaaggccaaaaacgcacaattaactggcaaaaatcactctaaatcatcaaatccaagccgacaagctaagcaagccatagagaggacaagatctgtaagcagacgaggaagagatgctgggtgattatcccgaatggccggctattgtggctgtgcttctgatctgcttgcgaggcaaatgaacgaccgcatgatgcatttctggcaaggggagtttcgtggacggacgccgtggcatccgtcgggtgcagcgcgatcgcatcaaagaaactttacatgataccagctgcggactctcactggagaatgccggcttctttttttatccatatcgtccatcagggtccagtgctaacttctgactgctgtaaagagcgaatgcgtcgtcacacccagcgtagccaattcatcagggatctggaggaggccagaaaggacgaagcggcggcggtgccgtgtcctacggtcctacctgtcagttgccgcggtgtcctcctgtcctgatccacgtcgccgccactgacagactcctctctcaccgtggcacgaattgatgagccacgaattgaggattgatcaaggtcttggcatcaacaaagctgccagcggtttttcagcttcattttagtttgtttatatagatctgtgccttgatcgaggtaggacgattcctagttaggctttgttcgtttacaccaatcccgctctggattagcatggattggaattaaatccatacctcaatccatgccccaaaataatccatgactacttaattttttttgttcggttaaacccatcatggaatataaaccaaaggtttaggaattttttaaactatggaagacatggattctatccatagcccattaggtatggaacaaatccatgagatattgcacaagtttacattagaatccatggatcaaaagaataactagctttgaaagtcacatggatttgttgatggatttaatcccaccatgggattgggtgtgagatatggattcacccaatccatatccggattaaatccatggtgggattatatcccatgtaaccgaacaaggccttatgagtttcaatttcttgtacgccaaggactggatctggaactgcggtcggtcggttgtaacgttgctttattatatggcttcaaagaggctaggaaatgagactgaggcgctagaaaagaaggttgtggagtggggtgagcccagtgtgccgtccggcaagcagggtaaaaaggctgacgcgatgatcaagcattttggcgaggatcctatccgttgccccttcaaacaagggagaagcaccaaaaatttatcagcactctaa

SEQ ID NO: 217071 - DNA, 5696 bp, Zea Mays
agaaaagatagcgaggagaagaaggcagcagcaagtagtagaggaagaggcgcccgaataccacggtgcctccgcctcgaccgccccccgggctccgacgcccttcctcaccaccgtgccttgctcctcctcctgctgctgcgctccgccgcggagccctaggcggagctgcggaccccgtgaccccccgcggcaccgccccggagctcggcggaggcggcgggcacgtcctcctcatgcctttggcgccccggtcggagccgatcggtggccgcctgaggagacgcagcagctcggcgggcgccggcggagaggcggcgggcacgtcctcctcatgcctttggcgccccggtcggagccgatcggtggccgcctgaggagacgcagcagctcggcgggcgccggcggagaggcggcgggcgcggaggtggaggcggaggcggaggaggaggaaggggagaatggcgctcttccgcaagttcttcctcaagaagaccccggatcggctgctcgagatctccgagaacgtctacgtgtttgactgttgcttctcgactgattccatgggtgaggatgagtatcgggattacttgagtggcattgtcgcgcaattgcaggaattttttccggacacatcacttatggcatccaatttttggtctggggacaaaagaagccggatatcagatattttatctgagtatgacatgacagtaatggactacccacaacagtatgaaggatgtccgttgcttcagctcgagatgatccaccatttcttgaaatcatgtgaaaattggctatcagtggaaggacaacataacatgcttttgatgcattgcgagagagggggttggccagtgcttgcattcatgttggccggactgcttttgtatcgcaaaatatatactggcgagcagaggacactagaaatggtctacaagcaggctcgcagggactttatacagcagttctttcccttgaatccccagccttcacatttgagatatctgcactatataacaagacaaggaggtggttcagaatggcctcctattagcagacccctcatcttggattcaatagttctccatgttgttccgcggtttgacacagatggtggttgtaggccatacttgattgtacatgggcaagactcaagtcctggtaacaagagtgcaaaggtcctttatgagatgccaaaaacaaagaagcaccttcagcgttatggacaggcagaggttcccataaaattaagtgtgtcctgccatgttcatggagatgtggtacttgaattcatccatattggcgataatatagagaataaggaaacaatgttccgggtcatgttcaacactgcattcgttcaatcaaacatccttgaactgaatcgtgatgatattgatgttgcttggaatgtgaataatcagttcccaagggactttcgagctgaggtacacttttcagaccctgtttcatttaagcctgctgctaccatcgaggaggtagctgatgatggagacgagactgatgttgcttcggtagacacaggagaggagttttatgaagcagaggagtattggcatgatgctagaaaagacccagcaactcattcaattgatggtggaatatcattaaatgacattgcagaatttgatggtggggcaacaactgaagaaaggagcagcctagagaagcaccgatctgatgagggtgtgaagattgctgtctcccagaattttggtagtatgaatgaaaaagtggcaattgcacctacctcaagttttgagaatcaagaaggattgcagcagcctcgtgaagttcttccaaatgctaaactaagcaaaaataatgatcaagagaacagtgatgtgcatgatatacaggtggttgctacatctgttgattcagagggacacaagtttggatctaccggtcaggaggacacgaaaggtgtaattgcacaaactttagtcacgacagtcgatctaagtggcagtgatggaattcactgccagactgatgaacaaacaaaaatgtcagaataccctgatttggactacactgcttttggctctcctagaagtttgtcacgtacagatggggatgcccacatgagaactaagaaaaatgaagggttgcagaatggtgatattaagattatcactgagaacacaataagtgtggacaacgagctagtgatctatgaagagaaaactatagttgtcaatggtaatgcaatacaggtagtaaaaaacgttgtcaatgaagagagcatcgcggctaagataggcaaaccaattactgagagtaggacctcattggacaatgacaatggcaagattcaaactgctaaaccttctgatatagccaatggcaaattggatgggtgtagattagaatcttgccttgaaaccgtgcctaccaagaaaaccactgtccatgacagaattgttgtcttaccagccactggagtagcaactgagataaaagccaagcaagaggtgcttgttgacaaacaggattttggtatagttcttcctcaaagtcgaacagtagccagggctaggagtccgaggcttggaagtgatgaccgagggcaaatccctgataaagctgtgttatcagtattgaaggagatggtagtaggcaatgcaaagatggaagatcaaccaaagcttgccaaaccaaaaataatgcgtagatggatctcaccaaagaaggaatctgacgctacctctgtgcgcagaccatctcaccctccatctagatactacagttcaccagctgcactaggtattcgatccatatctacagatggtaaaatcagcgttgtgaatgatgcacctttattatcactaaaacaaccatatggcagcaacttgacacgagaagcaacatctgcacagtctgctccatcgcctccacaaaaatccttgttactaggtgcacaaagtgcatcaagaagccaggtttctccaccgccaccgcctccacctccacctgcaaccaactattcttcaagttctacgcctatgcacatggggttagcttcaacaggtttgtcaaacttacctcaaggtgcttctccacctaggtcaccggtagcacaaaaacatgcatttgcccctcccgctcctcccccgcccccacctccacccccgaggtcaggtgtaggtggaaatactccacctccgcctcctccaaggctaaataacagtgcaatcgctccaccgccacccccatccaccataacacgatcaagtgctcctcctccaccaccaccaccacaatcaatgtcacgttctgctcctccgccacctccgccgccaccaccatcattgtgttctaatgttccattgccacctctttcatgcacactttctgctccacctcctccgccgccaccaccactaccttctatggcacgttcagcagcaccatctcccccgccacctcctcctagccgaggagcacccccaccccttccccttggtcgaggagcacctccacccccacccccaccaccaccacctggccgaggagcacccccacccccacctcctcctggccggggagcatccctgcccccacctcctccccctagccgaggagcacccccgcccccacctcctcctgtttcacgtgcaggacctccaccacctccgcctcctccaggtgctcgctgtggacctccacctcctccaccccctccaggtgcaagtgctccacctccacctcctcctccaggtgcacggccaggagctccaccaccaccgcctcctctaggagcgcggccaggagctccacctcccccacccccacctggaggtggtggaagaggacctctaccacctcgtgcaccaggtgtgccaactccacctagagcaccaggtgtaccgctaccaccaggaagtaatccatcattaggcagaggacgtggggctgtacgccctatgggatcagctattggggctgctgcctcacgcaagtcaactttgaagccattgcactgggtcaaagtgacaagggcccttcaaggtagtctttgggaagaattgcagcgcaacactgactcgcagagcgtttcagagttcgatgtatcagaacttgagagcctttttcctgcagctgttccaaagtctgatgacagctcaaaatctgaacgtagaaaatcacttggatcaaaaccagaaaaagtgcatctaattgagttgaggagggcaaataacacagagatcatgctgacaaaagttaaaatgccactctcggatttggtgagtgcagctctcacgctagatcaatctaccttggatgttgatcaagtggagaatctcataaagttctgtcctacgaaagaagaaatggaacttctcaagaattacactggagacaaacagattcttgggaaatgtgaacagttcttcttagaattgatgaaagtgcctagaatggagtcgaaactgcgagtattctccttcaagatccagtttggttcacaagttgctgatctgagaagaaacttggatatcatagactcttcttgtaatgagatccgaacttctctcaagttgaaagaaataatgaagaaaatccttctccttggaaatactctgaaccagggaactgctagaggggctgcggttggcttccggttggacagtcttctaaaacttacagacacccgagcaacaaataataagatgacactaatgcactacctctgtaaggtacttgctgcaagatctccacagcttttaaacttctatgcggatcttgttagcttagacgccgcatcaaagatacaactaaaaatgttggccgaggaaatgcaagcagttagtaaagggctggaaaaggttcagcttgagtatgatgcttcagaaagggatggtccagtatccaaaatttttcgtgagaaactgaaagagttcaccgacaatgctggatctgatgtgcagtcgttatcttcattgttttctgaagtgggtaaaaaggctgacgcgttgatcaagtattttggcgaggatcctgtccgttgccccttcgaacaagtgatctccaccctcttaacttttgtaacaacatttcgaaaagcacatgaggagaacctgaagcaagctgaacttgagaagaaaaaagctgaaaaagaggcagaagcagagaaggccaaaaacgcacaattaactggcaaaaatcactctaaatcatcaaatccaagccgacaagctaagcaagccatagagaggacaagatctgtaagcagacgaggaagagatgctgggtgattatcccgaatggccggctattgtggctgtgcttctgatctgcttgcgaggcaaatgaacgaccgcatgatgcatttctggcaaggggagtttcgtggacggacgccgtggcatccgtcgggtgcagcgcgatcgcatcaaagaaactttacatgataccagctgcggactctcactggagaatgccggcttctttttttatccatatcgtccatcagggtccagtgctaacttctgactgctgtaaagagaaactgaaagagttcaccgacaatgctggaatcgttatcttcattgttttccgaagtgggtaaaaaggctgacgcgatgatcaagcattttggcgaggatcctatccgttgccccttcaaacaagggagaagcaccaaaaatttatcagcactctaa

SEQ ID NO: 217072 - DNA, 6433 bp, Zea Mays
agaaaagatagcgaggagaagaaggcagcagcaagtagtagaggaagaggcgcccgaataccacggtgcctccgcctcgaccgccccccgggctccgacgcccttcctcaccaccgtgccttgctcctcctcctgctgctgcgctccgccgcggagccctaggcggagctgcggaccccgtgaccccccgcggcaccgccccggagctcggcggaggcggcgggcacgtcctcctcatgcctttggcgccccggtcggagccgatcggtggccgcctgaggagacgcagcagctcggcgggcgccggcggagaggcggcgggcacgtcctcctcatgcctttggcgccccggtcggagccgatcggtggccgcctgaggagacgcagcagctcggcgggcgccggcggagaggcggcgggcgcggaggtggaggcggaggcggaggaggaggaaggggagaatggcgctcttccgcaagttcttcctcaagaagaccccggatcggctgctcgagatctccgagaacgtctacgtgtttgactgttgcttctcgactgattccatgggtgaggatgagtatcgggattacttgagtggcattgtcgcgcaattgcaggaattttttccggacacatcacttatggcatccaatttttggtctggggacaaaagaagccggatatcagatattttatctgagtatgacatgacagtaatggactacccacaacagtatgaaggatgtccgttgcttcagctcgagatgatccaccatttcttgaaatcatgtgaaaattggctatcagtggaaggacaacataacatgcttttgatgcattgcgagagagggggttggccagtgcttgcattcatgttggccggactgcttttgtatcgcaaaatatatactggcgagcagaggacactagaaatggtctacaagcaggctcgcagggactttatacagcagttctttcccttgaatccccagccttcacatttgagatatctgcactatataacaagacaaggaggtggttcagaatggcctcctattagcagacccctcatcttggattcaatagttctccatgttgttccgcggtttgacacagatggtggttgtaggccatacttgattgtacatgggcaagactcaagtcctggtaacaagagtgcaaaggtcctttatgagatgccaaaaacaaagaagcaccttcagcgttatggacaggcagaggttcccataaaattaagtgtgtcctgccatgttcatggagatgtggtacttgaattcatccatattggcgataatatagagaataaggaaacaatgttccgggtcatgttcaacactgcattcgttcaatcaaacatccttgaactgaatcgtgatgatattgatgttgcttggaatgtgaataatcagttcccaagggactttcgagctgaggtacacttttcagaccctgtttcatttaagcctgctgctaccatcgaggaggtagctgatgatggagacgagactgatgttgcttcggtagacacaggagaggagttttatgaagcagaggagtattggcatgatgctagaaaagacccagcaactcattcaattgatggtggaatatcattaaatgacattgcagaatttgatggtggggcaacaactgaagaaaggagcagcctagagaagcaccgatctgatgagggtgtgaagattgctgtctcccagaattttggtagtatgaatgaaaaagtggcaattgcacctacctcaagttttgagaatcaagaaggattgcagcagcctcgtgaagttcttccaaatgctaaactaagcaaaaataatgatcaagagaacagtgatgtgcatgatatacaggtggttgctacatctgttgattcagagggacacaagtttggatctaccggtcaggaggacacgaaaggtgtaattgcacaaactttagtcacgacagtcgatctaagtggcagtgatggaattcactgccagactgatgaacaaacaaaaatgtcagaataccctgatttggactacactgcttttggctctcctagaagtttgtcacgtacagatggggatgcccacatgagaactaagaaaaatgaagggttgcagaatggtgatattaagattatcactgagaacacaataagtgtggacaacgagctagtgatctatgaagagaaaactatagttgtcaatggtaatgcaatacaggtagtaaaaaacgttgtcaatgaagagagcatcgcggctaagataggcaaaccaattactgagagtaggacctcattggacaatgacaatggcaagattcaaactgctaaaccttctgatatagccaatggcaaattggatgggtgtagattagaatcttgccttgaaaccgtgcctaccaagaaaaccactgtccatgacagaattgttgtcttaccagccactggagtagcaactgagataaaagccaagcaagaggtgcttgttgacaaacaggattttggtatagttcttcctcaaagtcgaacagtagccagggctaggagtccgaggcttggaagtgatgaccgagggcaaatccctgataaagctgtgttatcagtattgaaggagatggtagtaggcaatgcaaagatggaagatcaaccaaagcttgccaaaccaaaaataatgcgtagatggatctcaccaaagaaggaatctgacgctacctctgtgcgcagaccatctcaccctccatctagatactacagttcaccagctgcactaggtattcgatccatatctacagatggtaaaatcagcgttgtgaatgatgcacctttattatcactaaaacaaccatatggcagcaacttgacacgagaagcaacatctgcacagtctgctccatcgcctccacaaaaatccttgttactaggtgcacaaagtgcatcaagaagccaggtttctccaccgccaccgcctccacctccacctgcaaccaactattcttcaagttctacgcctatgcacatggggttagcttcaacaggtttgtcaaacttacctcaaggtgcttctccacctaggtcaccggtagcacaaaaacatgcatttgcccctcccgctcctcccccgcccccacctccacccccgaggtcaggtgtaggtggaaatactccacctccgcctcctccaaggctaaataacagtgcaatcgctccaccgccacccccatccaccataacacgatcaagtgctcctcctccaccaccaccaccacaatcaatgtcacgttctgctcctccgccacctccgccgccaccaccatcattgtgttctaatgttccattgccacctctttcatgcacactttctgctccacctcctccgccgccaccaccactaccttctatggcacgttcagcagcaccatctcccccgccacctcctcctagccgaggagcacccccaccccttccccttggtcgaggagcacctccacccccacccccaccaccaccacctggccgaggagcacccccacccccacctcctcctggccggggagcatccctgcccccacctcctccccctagccgaggagcacccccgcccccacctcctcctgtttcacgtgcaggacctccaccacctccgcctcctccaggtgctcgctgtggacctccacctcctccaccccctccaggtgcaagtgctccacctccacctcctcctccaggtgcacggccaggagctccaccaccaccgcctcctctaggagcgcggccaggagctccacctcccccacccccacctggaggtggtggaagaggacctctaccacctcgtgcaccaggtgtgccaactccacctagagcaccaggtgtaccgctaccaccaggaagtaatccatcattaggcagaggacgtggggctgtacgccctatgggatcagctattggggctgctgcctcacgcaagtcaactttgaagccattgcactgggtcaaagtgacaagggcccttcaaggtagtctttgggaagaattgcagcgcaacactgactcgcagagcgtttcagagttcgatgtatcagaacttgagagcctttttcctgcagctgttccaaagtctgatgacagctcaaaatctgaacgtagaaaatcacttggatcaaaaccagaaaaagtgcatctaattgagttgaggagggcaaataacacagagatcatgctgacaaaagttaaaatgccactctcggatttggtgagtgcagctctcacgctagatcaatctaccttggatgttgatcaagtggagaatctcataaagttctgtcctacgaaagaagaaatggaacttctcaagaattacactggagacaaacagattcttgggaaatgtgaacagttcttcttagaattgatgaaagtgcctagaatggagtcgaaactgcgagtattctccttcaagatccagtttggttcacaagttgctgatctgagaagaaacttggatatcatagactcttcttgtaatgagatccgaacttctctcaagttgaaagaaataatgaagaaaatccttctccttggaaatactctgaaccagggaactgctagagagtactacttccacttaacatgataaatgccagactcaagtaggactgttctgtggtttgtaaaccatagctctatctttcctgaacttcaggatgtcatggcataatgctatgttacatagccagtgcatgttctccatcttctactcgatcaacaggtgtacaatgtttcagtttaaacctgtatactcgtcaccaatgtctttaaccaatattgttgtctttatgcatgcgaccaagaagttgaatagaatcgaagactcaatacacaatgaactgtattttgcatgaagatggtcagatgttccgtgagtgttgtatgggataggggctgcggttggcttccggttggacagtcttctaaaacttacagacacccgagcaacaaataataagatgacactaatgcactacctctgtaaggtacttgctgcaagatctccacagcttttaaacttctatgcggatcttgttagcttagacgccgcatcaaagatacaactaaaaatgttggccgaggaaatgcaagcagttagtaaagggctggaaaaggttcagcttgagtatgatgcttcagaaagggatggtccagtatccaaaatttttcgtgagaaactgaaagagttcaccgacaatgctggatctgatgtgcagtcgttatcttcattgttttctgaagtgggtaaaaaggctgacgcgttgatcaagtattttggcgaggatcctgtccgttgccccttcgaacaagtgatctccaccctcttaacttttgtaacaacatttcgaaaagcacatgaggagaacctgaagcaagctgaacttgagaagaaaaaagctgaaaaagaggcagaagcagagaaggccaaaaacgcacaattaactggcaaaaatcactctaaatcatcaaatccaagccgacaagctaagcaagccatagagaggacaagatctgtaagcagacgaggaagagatgctgggtgattatcccgaatggccggctattgtggctgtgcttctgatctgcttgcgaggcaaatgaacgaccgcatgatgcatttctggcaaggggagtttcgtggacggacgccgtggcatccgtcgggtgcagcgcgatcgcatcaaagaaactttacatgataccagctgcggactctcactggagaatgccggcttctttttttatccatatcgtccatcagggtccagtgctaacttctgactgctgtaaagagcgaatgcgtcgtcacacccagcgtagccaattcatcagggatctggaggaggccagaaaggacgaagcggcggcggtgccgtgtcctacggtcctacctgtcagttgccgcggtgtcctcctgtcctgatccacgtcgccgccactgacagactcctctctcaccgtggcacgaattgatgagccacgaattgaggattgatcaaggtcttggcatcaacaaagctgccagcggtttttcagcttcattttagtttgtttatatagatctgtgccttgatcgaggtaggacgattcctagttatgagtttcaatttcttgtacgccaaggactggatctggaactgcggtcggtcggttgtaacgttgctttattatatggcttcaaagaggctaggaaatgagactgaggcgctagaaaagaaggttgtggagtggggtgagcccagtgtgccgtccggcaagcagggtaaaaaggctgacgcgatgatcaagcattttggcgaggatcctatccgttgccccttcaaacaagggagaagcaccaaaaatttatcagcactctaa

SEQ ID NO: 217073 - DNA, 11456 bp, Zea Mays
cagaaggccaccaagttgatgatcacaagctttgtccacggttcagacggcctgggaaaccaggatttccctccatcagctaccaagcctgtagatcaatcggctgctgccttcctggttgagcaaccaaatctataccctggacaagttaccattgtcgccctcagtccactaaccaaccttgctctgacagtcgagcttgaccctttgttctcgaagaatatatggcagattatttttcttggcggtgtgtattcaattaatggtaatgtgaactatgcagctgaggcaaatgtagatattgtgttcacccgcggtgctgatattttggctatggtactaattgtaacacatcaagtagttttaacccgtaattctgccatatttaagggtcacattatttctgctcaggatgtatgcttcatatactgagataatgcttcttttataacctacttctcattagtcaatggcaatctctactactctataagggtccagtgtgggcgtccacactggtaccgtgcccccgcccccaaaattctcgccccgcctcgctctccgtcgcgccattccagggaccctccatcgccgcccccgccatcatcgcgtcagcgcccgcgctccgtcgatggaaggcgccattccagggacccaccccaaccctgcgatcctcacccttccaaggatgccccgcacccatctcgtccaatccctcctcccgcctcacccgctcacaaggtcgacgacgacgaatctaaggacgccaacgccacccctctctgagctccctatggccactgcgggtgagtgcctctgggtagccggtcacccctctcttgcagcctccgagcttcggcgaacgcagaactggcagggcgcgacggccgacgcaatgtacgtgggtagccggcgtccaatgtcggccgccgctggcgagcgcccccggcgcggctgcccaaccaagctctgtccagatctgaccgtctagggcgaggtgaccccctcctggcggcgagcgagacagcccccactccaccccacctcgcaacagccaccgatcagtggagcgcactcaaaactgttggatttattttggaacttaggtgaaggaggaatgggtggagggacgagcaagatggcaacgttctattgaaacaaactgcctcgattattaggctatcattactaaacaaactacctttatcgtcaacctactaacttccatattcttcacattcagctttgcaaaatttacttgactggattttttagcttaacatataactcagggagacatgcgattttgggacgatcaaactgttggtaagtaaatacttgttggcctgttgctcttcttttagctatagctgaccataatttttcttggttgaggaaactgtagttagtgatagctcaatattttgtgtgtagaaacctgtataaagtattggacatgtatttcatagtttttgtaacttataaggctatgtaagtcacagattaactcttcaaagaattatacaacaaagaaattagcgctcagaaatgggatctttgcatttttagtcttgctcattttttattattcatgtatgactcatggttttctagagaaaaatattggaccgttacaataatgctaatatggtgttaatctaggattgctcattttgagtattcttgtacgactcatggttttctagagaaaagatcttggactgtagcactacctccacttgtgagatctggacttctgtagttatatgccatagcaacactgaaagtgacaatgtttgaatggtatagttcttttccttggtcggtgatatatattcacttgatggtatagctctgccaaaagcacaacagctcgtgcttgatccacaaaaaataggatgctcatgtgattgtattttgattttttagttttatttttgttgcatgtataatccaatcgccgagatcgacctctaccgtctcgagccataggacctcccctccctcttcaacatccgcagtcacaacgccaaggggtagttcttcgcccgtgcggtcgaggcggtcccagcaacaggaccaaccacgcacacgccgatggggtactggagatccggacggagtagcattcttgctggcccagggtcagcccacttcttgcgcaagtttgttgttgggaaccaatggaatccgactattcatttttcttgcggatggtcgtgtcggtggggtcaagaaaattctctggaatttggcactgataagatagaaatgcatgttggggctgtacaggccaacgatcgagctcttgtagtcgatgatcttattgccacccgtgtgcagctgtcaaacttatcggagatggacgatgaagcgttggatcaaggagatggaggttggatcaaggagatggaggaggtggccgccacggccaccacttccaggtcgattatgccctttagggccatccagaagggcaagccgttgtcggtgtccttggcatcgagaagaagtccacccctaagctctagaactccaggtgctcgccgtggccacaagcgtgtagtcccccgacgcagagaagaggaagggcatgtggcgtagttagagggatctgaaccctagcggtcgtccgcccgtccagatctgtgacccgcccttctcgacgcttcggtgacatgagtgcctggaaatctagggaggcgaaaaggtcagagttcagtcatgtcatgcttgatttgagttctgtgccagatcaaagcaagtagtagtacgtgagaagttaaccatgaacagacaccctttttctctttgtgtatcacagattttgaaacttgctgagagggaaaaacaaatttatggggaaaaaatgtgacactgaaagccatttgcttccagcagcttaagaattgttgcggtagatgcaactgaagagggtcttcaagtaagtaaatcaactactacaatggctcactaaaaatggtcgacaggacagtttcggaaccttattgttgttcttcagagagaacatcgacaaaggaacttgaagctccgtaggcgaaaggatctctagaaacgactaactaaattctcctaggtactactctagggaggatgctgaagatgctgtcaaatacattagtggaacaatgcttgacgatcgtccaatccgtgttgatttcgatcggggctttgaagaaggcagacagtggggccgtggacgaagtggtgtacaagctttacaaaccatgatatgtccgtgcgttgtagtagtaagaaagaactaatgttcacagttaaaaagtgtggaatgagaaccgacattaaaataggagaatatatataatgtgggtttcatacatatgttctatgtttcacatctaccaccgaaggccaagtacattttgatatactagcctaaaatgttctgctgatctgatatactagcctaaaatgttccgttgatctgattttttgctacaccctgctgccctctacatttggattgtctgtattttgattttttagttttatttttgttgcatgtataatccaatatgtgattgtatcttttgattcctggaaggatagagtttgcactagaagaggatgctcatgttgttggtgactgtgtaaaagtacctttctgtaattatcattgtctattgtttataaggattaatgttaaagagttttaatagttttttccttcctacttccactgtctgaatgtatacacatgttacatgtatgatgcatgcatcatgttcagagcttccatctctcgttccaacttctgatatacaacattattggaagctttccttaagtattttattcgtattaatctgaatatgttccttggttatgaactaaaaacaacaatttaaattctatattggttgcaaagaatatgccgtgggatatcaagtttagtgatagttgttctttttatgcaatcgtcgtgtactaactttttatctaataaatcgtgttcttagtcactaaagtttaggaggtgggacccaaacacccccatagttacttgaatgttacttatcaatagtgaataggattcgcttagtaactgcaagaaagtaagtgaacctaggagaattctgtgattatttcttttttaccccttagcttgatatcaaaggttgatgacaccttcacttgatgcagatgcagacaagactgaattagttcctacttctccccatcaattagaaatggggactatagaagatgtccgaacagagcctgatgtctcacaggaacaaacaactaaagaaaatggaagccagacaacctttagctatgaacgattgatatcaaagtccactgaccctgttagtgggatagacaacaagcacagagaggtttgtgactccaatgcacattgataaaagctctctctctcctgttacctcatttccttgtgaaagggctgagtatttgtagaaattaaaaaaggggacttttttgagcaattttcttgaatctagaccaatttagaactggcgaatttatttgcatttaaaagcaaacaaacacctagattcgcctcatctgaggctcaggcgttcagcatttacttcagaatttcgataaaacctttttttgtttgtaaacatttgtaggcaaaattattcacaataaagagtaaataggtaagctttggaaacttattatagactttgcttcaaggtcttatttcggaggtaacctctggttactaatatcccagacttacaatttgaaaaataccagccagtcaggattgctgcaattactgttagtcatgaagaagatgaggtgtaaaaggttattttggagaagaaacaaactggcatggaaaaaggagccaagatttgatcagaatcacaaccaaatccttctcttatttgcattatgctaatttgattcaccataatgcttaccattcatactattatgcttgtttttttctctttcgtaatcatcgaaatggtccacttttcaaagttcaagcccaacttaattttttaaagcaaaaatgtagcagtacttaaggttttatctataatttatcaatggataagtgagttctattgctccagtttagagagagtctaaacaattttgagtattttgaaattctagatgagctataaatttcctacaggattattgggttagaagttcacgtgtaggcatcacatctgtgtgcttttgggttacccacttaggtggattgtctgagtcactcatgaaatattattgtgtaccatcacaacacatgatttctaagtgtgcaagcaagctaacgacgacttcgactagcttagcgccatggtcactgtgctgctcaacctcgtcaacctacccctccggtgaggtgtggggctgccagacgcctcctgtgaggctgacatagctggatacttagtagtggatcaataatgtactttgcaactgattaccttggttttgttgcatcgcgtacacctaactatcaattattatgctagcacaaaaattgaggaatgcagcaaataaggtatcttttctcacctatcttgttaatgcagtctgacaagtacttgagaaatggaatggtagtatgtttttgtttcttaggtaattagttcaccttatccttagatctctaagtttagatttgaatttgcttgaagtggatgctccctcatcataattttgtcccgtgtaaccagtgtcgttgccattagaattctcctatacagacatctatgcataaggttagcccttccattcttctattcagtgttgtttcctttgttttgtttttggcctctttgaatgaacaatagaaattttgcccattgtgtcccatcggtaaaagaatataaggcaacatggcgctcttagttgttagatcccataaagggaaaggtaagtcaagttagaatttattcagactgtcatgtaattgttgtaggacctttgtttcatttttatgccacacgatgatttatcacacatgctactactgggttgtgaaaaataatttcattttgtcaatgtgcctcaagtcaatcttttgaattttattatcagtctaaaatacttatttgttgtttgtttataatggctggaaatattcattattactgacctgacccataagacctagctgattgctcaagatagttatgcaattaagggtttcattctaaatattcataaacctgggatcctatgttgcatggcaaagcacccaaaatcattctgactttatgcttgataaattgataactggcatattagttgttacagtcaagcatcatgattatgaatctagattttattaatgagtcaagcatcaagtacttatgttaaatactcttgcttgcatggacttcttgagcgaaaacactatgtgacgctgtttgcaggagacatactttgctacagattctcaaggagacaacaacacaaaatcatataaaacatagtaccaaacatgaatggcttcaaggctagcaaatgttcgaggacacttgatctgcaccaatgaggacacttcaagttgttgtctcaatctttccagttgacctttggcgagcaaaacacagagaagcaagcacatgccattctcgcttattctttggatcaaggtgccagtatcttagacacagtagaaattttccaactaacaaggaaaatcgagggtcaactgatctttatattatcaggtggatgcaatcaaaaccaagatgcaagttgcaagtctggaacgaccgactaccattcaatgttgcaagtgatttctattgttaagaagctatgagcgaaaattttgtgtctcaagatttgaagcatgagaagcgttgcgggggagaagcttcagtgcaacattgttgttctatagggatcaacatcctcaagatcacttggaaaactttcacgaaaaacttgtaatgcaagcatatgttttattggaaaagttttccaagctgaatttctaaaagcctcctcactgctttagttatgctgaattggaatttgcaactaggggtttcttacaagtaaatttcttagctaaaggcatggtgcactgcacattgatctttcttcttctatcgtatgatgtgacttgtgattgctttgccaatgcgacctacatggagctggattgttattacagacaacagaactgtatttatcttgaataatgattgatggttaagtgcatgcgtcactgggttcgagatcgactacagccactgggtggacgagcagaaaaggcacatggcagagctgacgtcgacgctccaggggcagcagacgtcggagctggagctccgcctgctggtggagacgtggctcagcaactacgagcgcctgtttaggatcaaggcgacggcggccaacgcggacgtgttctacgtcatgtcgggcttgtggaagacccccgccaagaggttcttcctctggatcggtgggttccggccgtcggatgtcctcaaggatgtaagcaatctcatgcacctgttgttgctcgcaaggttcatccctcacaagtacaagatcaaagactcgaaagcttaggttgctttgagccgtggtggatctcccggtgtgatgacatggggctgggtctgggagctcttctcaaatctgggggttctcggtctgctcttctcaatttagtgttatctttttcttttagaacaatgccaaagatacatgacagactgctttgcttgtttttgacatgatgcaaaagcaatggagtctttacttttaaacctttgttatttttgttttgattcaattatgatactgctgaaatgtacggatatctattattttgatgcaatagtggtgttttgcgatgtttaacagcttgtgtgatccaattattaaccctgcattgtatagaagagtttctttagaatatatcaattcatgtatcctcgttatggatattatgttgatattttctatctatgaatggcccctacactttgaatcgcttatgtcattgttagcaatcacataatattttttcttttctcttagatttaatttgtataatcatataatcattcatatattgttacaataggatttggttcagcttctcactttgtttttaatgagaagaagcagacaacaaattatagtgaaggctcctctcgtcccccgttgcttggtggatcacccccacggaaccagcctagccaaagacagggtgactattcttacctgaatagagtatttcgtgatctctttatccaggaagataccagttcaactatgtgtttgactggaccattctgaagtatcctcagataggctctaacctgtgaaccagggcaggtgaaagaaccagtggagctgctgggccctcaatgaataagatggagaaggccccaggagaagcgttcggtagaaggaaccctagcggtcctatgaaccagaccgacagttatgcgcaacagccacacgagaccgtatccatgtcgctaaagaaaattatgcatagcattgattgatctgggaaaggactatggagagatcactccaaatatctataaatagatccgtgccttttggacctccacttgctgatgacatgatcaaggacataaatagatcactaaaatattgtcaaagacccaaccaaagagagggtacaaatataaactcttgggaactttcttttaatttttacaattattatctataaagtatggtaaacttttctgtccaccttttctcttggcatttttacaattattatctataaagtatggtaactcagcacttctgtgtggctttgaaatgaagagcgccttttgggttttttgctaagagtaatggtttgtgatctcgaccctccttgtgttttgtatttggagaccagtggtgtgtttctaatatatagcaatactctttcaaggcctcacttgtgagtttgagggtgcatttacttgtactagacaagtttgcacttaaacatttgtttactgtaggtatcgtatttattttaatttgcaaatccattctttaagaatgtgagtccagttccactgtatttcatcatggaaatgaatgtgctagaaaagctcttattttgtgtttttcttatttgtgccatgatgcatttttagtttattgaagttctttacttctgttattgcttgggaagcattataatttacattcaatttgcttgtatggttcatgttttcttaactttgtttgagtggctacaagttctgtactaatgatattgctagggaagccttataattttcattccatttgcttggatgattcattttttcttaagagtttttttgctatcagtatgattcgccaaatcaagttttggattaaatttgtggttaaatgaggacttatgcttatttggcttgatttgttgaggtttcatgtgagtctccatgttatgtttgatgagctttgataatttgtagtgttttttggtgcatgtattaatattttttacatggcgttcgaatatatgtatatgtttgcgtttaatcttcattcatgtttagcattgttatcacagtcacaagcagcgcctctttgagatcttaagcatcatttgcaaattccccttggttgtcaatcgctctgctaattcagtcaactcctatcttgtcaggtcaaatagttttgtactcaacttctatccacgcaacagttctgaggcccccgatgaagtatatctcactataattagtgtgatagttcgtcgcagcttctaattcacacaaccctaatgacaaacaaaacattgcttctgattagcagggaagcacaaaatttaaaccatatagctgaattcaaatgataaacagatagaaaaaacacggtatgatagagggacataactaatcagaagtctagactttatgttgtgcatcctgtaatagtaaaaatttccccattgttgtgatgtccattgctgatgttttgctacatattgcttatgcgtcaattccttgctgctgctgagggctgcaaactttcaaaactaggctgcaaggtggtgtctatattgttaagctgaggaggctgaaatgatttcaaacatgtgtaaagtggtgctcggagtcagagagggatgctatctttgatgttctacagccacatttgcttactctttcttgcaagaaatatgccatttttcttgtaaagaagcttatagaacttgtcgttgattatgcatttcagcgaggaacacaacgtcagaaaaggcaattgttagttgaactgtactcccctgaacttcagctattcaaggatctgactgtgcaaagttcctcctgatatcatctgtcctgcttcatatgactattgtgattgataaaatcttggagaaaggtaccgttgagtacttaatagtgcacacggccatattggactactttacaattgcagataagacctcagcctcggatgctatttgtcaacttatcccccttcttactcaaggggcattaatcatagatggagatgaacctacaaacgctccagaactaccaaagaaagcaaaagctaagaagaaaaggtcgaaagagccacttattgttcggatcatgcagacaagggaaggattaaaactaggaattagttgcctcaagtatggcagtgcaaaggtatatctgcacaagttattatattttaacttcaggtcaaacacttccttcgctactatccactggtgttttattcagtgttgctttagttttgtaaatttttgtggtgcttgtatatctttgcaaattgaattatgcactacaccgtaccaagtccatctttactgctcaagaggttactgtcggtggccatgggatgttttcctccctccatgatctctgaaatgtctcccgtatttatagattagctttggaagatacacgattggccaagcttgagcatggatgaaaattcctagatgatcgcaaagattgttgtggtttgtaatgatgcaatcattggccactctgagcatcaatatgttgctacagggatgcccacaaaagctgctctgaaggacaatgcttccaccagcgcggccgtagaggcggaagcaaggggttgggcttctgtcggtgctggacagcgtgatgccaaacgtgccagccactcttgctgtcgtccgcctccctcttccacgataggttcgcccgcaccgagcctagacgcagatagctctcgaccgtccgctacagtgctgtcgaagagacggtaatggaggaggcctcgcccgagacggtggaggagccactgctggtgagcgcaatcagagggaaaaaggttgagagggcaccaatctggctcatgaggcaagccgagaggtacatgaacacaagtccacttccattttgtgacagtcttctatgttggtctgctaagcatttctgtaattaacattccagtgcgtatctcga

SEQ ID NO: 217074 - DNA, 2476 bp, Zea Mays
cttttctgtccaccttttctcttggcatttttacaattattatctataaagtatggtaactcagcacttctgtgtggctttgaaatgaagagcgccttttgggttttttgctaagagtaatggtttgtgatctcgaccctccttgtgttttgtatttggagaccagtggtgtgtttctaatatatagcaatactctttcaaggcctcacttgtgagtttgagggtgcatttacttgtactagacaagtttgcacttaaacatttgtttactgtaggtatcgtatttattttaatttgcaaatccattctttaagaatgtgagtccagttccactgtatttcatcatggaaatgaatgtgctagaaaagctcttattttgtgtttttcttatttgtgccatgatgcatttttagtttattgaagttctttacttctgttattgcttgggaagcattataatttacattcaatttgcttgtatggttcatgttttcttaactttgtttgagtggctacaagttctgtactaatgatattgctagggaagccttataattttcattccatttgcttggatgattcattttttcttaagagtttttttgctatcagtatgattcgccaaatcaagttttggattaaatttgtggttaaatgaggacttatgcttatttggcttgatttgttgaggtttcatgtgagtctccatgttatgtttgatgagctttgataatttgtagtgttttttggtgcatgtattaatattttttacatggcgttcgaatatatgtatatgtttgcgtttaatcttcattcatgtttagcattgttatcacagtcacaagcagcgcctctttgagatcttaagcatcatttgcaaattccccttggttgtcaatcgctctgctaattcagtcaactcctatcttgtcaggtcaaatagttttgtactcaacttctatccacgcaacagttctgaggcccccgatgaagtatatctcactataattagtgtgatagttcgtcgcagcttctaattcacacaaccctaatgacaaacaaaacattgcttctgattagcagggaagcacaaaatttaaaccatatagctgaattcaaatgataaacagatagaaaaaacacggtatgatagagggacataactaatcagaagtctagactttatgttgtgcatcctgtaatagtaaaaatttccccattgttgtgatgtccattgctgatgttttgctacatattgcttatgcgtcaattccttgctgctgctgagggctgcaaactttcaaaactaggctgcaaggtggtgtctatattgttaagctgaggaggctgaaatgatttcaaacatgtgtaaagtggtgctcggagtcagagagggatgctatctttgatgttctacagccacatttgcttactctttcttgcaagaaatatgccatttttcttgtaaagaagcttatagaacttgtcgttgattatgcatttcagcgaggaacacaacgtcagaaaaggcaattgttagttgaactgtactcccctgaacttcagctattcaaggatctgactgtgcaaagttcctcctgatatcatctgtcctgcttcatatgactattgtgattgataaaatcttggagaaaggtaccgttgagtacttaatagtgcacacggccatattggactactttacaattgcagataagcctcggatgctatttgtcaacttatcccccttcttactcaaggggcattaatcatagatggagatgaacctacaaacgctccagaactaccaaagaaagcaaaagctaagaagaaaaggtcgaaagagccacttattgttcggatcatgcagacaagggaaggattaaaactaggaattagttgcctcaagtatggcagtgcaaagattagctttggaagatacacgattggccaagcttgagcatggatgaaaattcctagatgatcgcaaagattgttgtggtttgtaatgatgcaatcattggccactctgagcatcaatatgttgctacagggatgcccacaaaagctgctctgaaggacaatgcttccaccagcgcggccgtagaggcggaagcaaggggttgggcttctgtcggtgctggacagcgtgatgccaaacgtgccagccactcttgctgtcgtccgcctccctcttccacgataggttcgcccgcaccgagcctagacgcagatagctctcgaccgtccgctacagtgctgtcgaagagacggtaatggaggaggcctcgcccgagacggtggaggagccactgctggtgagcgcaatcagagggaaaaaggttgagagggcaccaatctggctcatgaggcaagccgagaggtacatgaacacaagtccacttccattttgtgacagtcttctatgttggtctgctaagcatttctgtaattaacattccagtgcgtatctcga

SEQ ID NO: 217075 - DNA, 2509 bp, Zea Mays
cttttctgtccaccttttctcttggcatttttacaattattatctataaagtatggtaactcagcacttctgtgtggctttgaaatgaagagcgccttttgggttttttgctaagagtaatggtttgtgatctcgaccctccttgtgttttgtatttggagaccagtggtgtgtttctaatatatagcaatactctttcaaggcctcacttgtgagtttgagggtgcatttacttgtactagacaagtttgcacttaaacatttgtttactgtaggtatcgtatttattttaatttgcaaatccattctttaagaatgtgagtccagttccactgtatttcatcatggaaatgaatgtgctagaaaagctcttattttgtgtttttcttatttgtgccatgatgcatttttagtttattgaagttctttacttctgttattgcttgggaagcattataatttacattcaatttgcttgtatggttcatgttttcttaactttgtttgagtggctacaagttctgtactaatgatattgctagggaagccttataattttcattccatttgcttggatgattcattttttcttaagagtttttttgctatcagtatgattcgccaaatcaagttttggattaaatttgtggttaaatgaggacttatgcttatttggcttgatttgttgaggtttcatgtgagtctccatgttatgtttgatgagctttgataatttgtagtgttttttggtgcatgtattaatattttttacatggcgttcgaatatatgtatatgtttgcgtttaatcttcattcatgtttagcattgttatcacagtcacaagcagcgcctctttgagatcttaagcatcatttgcaaattccccttggttgtcaatcgctctgctaattcagtcaactcctatcttgtcaggtcaaatagttttgtactcaacttctatccacgcaacagttctgaggcccccgatgaagtatatctcactataattagtgtgatagttcgtcgcagcttctaattcacacaaccctaatgacaaacaaaacattgcttctgattagcagggaagcacaaaatttaaaccatatagctgaattcaaatgataaacagatagaaaaaacacggtatgatagagggacataactaatcagaagtctagactttatgttgtgcatcctgtaatagtaaaaatttccccattgttgtgatgtccattgctgatgttttgctacatattgcttatgcgtcaattccttgctgctgctgagggctgcaaactttcaaaactaggctgcaaggtggtgtctatattgttaagctgaggaggctgaaatgatttcaaacatgtgtaaagtggtgctcggagtcagagagggatgctatctttgatgttctacagccacatttgcttactctttcttgcaagaaatatgccatttttcttgtaaagaagcttatagaacttgtcgttgattatgcatttcagcgaggaacacaacgtcagaaaaggcaattgttagttgaactgtactcccctgaacttcagctattcaaggatctgactgtgcaaagttcctcctgatacaatttccaagcttgggttgcagatatcatctgtcctgcttcatatgactattgtgattgataaaatcttggagaaaggtaccgttgagtacttaatagtgcacacggccatattggactactttacaattgcagataagacctcagcctcggatgctatttgtcaacttatcccccttcttactcaaggggcattaatcatagatggagatgaacctacaaacgctccagaactaccaaagaaagcaaaagctaagaagaaaaggtcgaaagagccacttattgttcggatcatgcagacaagggaaggattaaaactaggaattagttgcctcaagtatggcagtgcaaagattagctttggaagatacacgattggccaagcttgagcatggatgaaaattcctagatgatcgcaaagattgttgtggtttgtaatgatgcaatcattggccactctgagcatcaatatgttgctacagggatgcccacaaaagctgctctgaaggacaatgcttccaccagcgcggccgtagaggcggaagcaaggggttgggcttctgtcggtgctggacagcgtgatgccaaacgtgccagccactcttgctgtcgtccgcctccctcttccacgataggttcgcccgcaccgagcctagacgcagatagctctcgaccgtccgctacagtgctgtcgaagagacggtaatggaggaggcctcgcccgagacggtggaggagccactgctggtgagcgcaatcagagggaaaaaggttgagagggcaccaatctggctcatgaggcaagccgagaggtacatgaacacaagtccacttccattttgtgacagtcttctatgttggtctgctaagcatttctgtaattaacattccagtgcgtatctcga

SEQ ID NO: 217076 - DNA, 2393 bp, Zea Mays
cttttctgtccaccttttctcttggcatttttacaattattatctataaagtatggtaactcagcacttctgtgtggctttgaaatgaagagcgccttttgggttttttgctaagagtaatggtttgtgatctcgaccctccttgtgttttgtatttggagaccagtggtgtgtttctaatatatagcaatactctttcaaggcctcacttgtgagtttgagggtgcatttacttgtactagacaagtttgcacttaaacatttgtttactgtaggtatcgtatttattttaatttgcaaatccattctttaagaatgtgagtccagttccactgtatttcatcatggaaatgaatgtgctagaaaagctcttattttgtgtttttcttatttgtgccatgatgcatttttagtttattgaagttctttacttctgttattgcttgggaagcattataatttacattcaatttgcttgtatggttcatgttttcttaactttgtttgagtggctacaagttctgtactaatgatattgctagggaagccttataattttcattccatttgcttggatgattcattttttcttaagagtttttttgctatcagtatgattcgccaaatcaagttttggattaaatttgtggttaaatgaggacttatgcttatttggcttgatttgttgaggtttcatgtgagtctccatgttatgtttgatgagctttgataatttgtagtgttttttggtgcatgtattaatattttttacatggcgttcgaatatatgtatatgtttgcgtttaatcttcattcatgtttagcattgttatcacagtcacaagcagcgcctctttgagatcttaagcatcatttgcaaattccccttggttgtcaatcgctctgctaattcagtcaactcctatcttgtcaggtcaaatagttttgtactcaacttctatccacgcaacagttctgaggcccccgatgaagtatatctcactataattagtgtgatagttcgtcgcagcttctaattcacacaaccctaatgacaaacaaaacattgcttctgattagcagggaagcacaaaatttaaaccatatagctgaattcaaatgataaacagatagaaaaaacacggtatgatagagggacataactaatcagaagtctagactttatgttgtgcatcctgtaatagtaaaaatttccccattgttgtgatgtccattgctgatgttttgctacatattgcttatgcgtcaattccttgctgctgctgagggctgcaaactttcaaaactaggctgcaaggtggtgtctatattgttaagctgaggaggctgaaatgatttcaatcgttgattatgcatttcagcgaggaacacaacgtcagaaaaggcaattgttagttgaactgtactcccctgaacttcagctattcaaggatctgactgtgcaaagttcctcctgtttgatagatacaatttccaagcttgggttgcagatatcatctgtcctgcttcatatgactattgtgattgataaaatcttggagaaaggtaccgttgagtacttaatagtgcacacggccatattggactactttacaattgcagataagacctcagcctcggatgctatttgtcaacttatcccccttcttactcaaggggcattaatcatagatggagatgaacctacaaacgctccagaactaccaaagaaagcaaaagctaagaagaaaaggtcgaaagagccacttattgttcggatcatgcagacaagggaaggattaaaactaggaattagttgcctcaagtatggcagtgcaaagattagctttggaagatacacgattggccaagcttgagcatggatgaaaattcctagatgatcgcaaagattgttgtggtttgtaatgatgcaatcattggccactctgagcatcaatatgttgctacagggatgcccacaaaagctgctctgaaggacaatgcttccaccagcgcggccgtagaggcggaagcaaggggttgggcttctgtcggtgctggacagcgtgatgccaaacgtgccagccactcttgctgtcgtccgcctccctcttccacgataggttcgcccgcaccgagcctagacgcagatagctctcgaccgtccgctacagtgctgtcgaagagacggtaatggaggaggcctcgcccgagacggtggaggagccactgctggtgagcgcaatcagagggaaaaaggttgagagggcaccaatctggctcatgaggcaagccgagaggtacatgaacacaagtccacttccattttgtgacagtcttctatgttggtctgctaagcatttctgtaattaacattccagtgcgtatctcga

SEQ ID NO: 217077 - DNA, 4815 bp, Zea Mays
ctttagccagccatcaagctagtaatctctctcaaatacccccacttttttcttcttctttattttagcttcaagtcttcaacattcctctgcagcagccagcagccaccagtgaggccgtgagggtgagtcgagtcgagtccaccaccaccaccaccaccaccaaatagccaaacacgcagtggtgctgctctctagtcctcccttcttccactccgctaaccccccgtcgcaagcacgcacgcgcgcgctcatcggattcggctacgcgccggcgagatccgggccgccgcagcacggtccggcagacgccgccgaaggcgcaagccgcgatcttgtcgccgcgggagctgcattggcgccccacgcggccgttccggcgtttcttgggaggttgcggcggcgggaggagttcgtgtccgggatccgccagatccgtgctcgccggcggcggcagcagtggtggtggccgccatggaggccgatgcgccgctcgacctcgcgctcttccagctatcccctcggcgtcagcggtgcgagctagtggtgtgcggcaatgggcggacggagaagatcgcgtcagggtcggtgaagccgttcgtggcgcacctgcgggctgcggaggaacaggcgtcggctcagccaccgccgctggccatccggctgcagctggagcggcccgccccgtggtttagcaagggcacccttgagaggttcgtgcgcttcgtgagcacaccggaggtgctggagttggcgaacacctatgatctggagatgtcgcagctggaaggggccaggaagatttatgcgcagggaggtactggagatgctacttcaggtggagctgctgaaaatgttacagcctcagcggcagcggcggcagatattacaaagaaagaacttcttagggcaattgatgtgcgtctaagttcccttaaacaagatctggccgcagcttgttctcgagcatcctctgctgggttcaatcctatcagtgtatctgagcttattctttttgctaaccattttggtgccagtcggctgagcgaagcatgcacaaagttcatgtcactttgccagcggcgtcctgacatcagtcctcaaactgcacagccagcagtttcatcacactggaaggtctttgacgatgggaatgtccgtggttcttcgagttcagacatgtctatagatgaaccactagttgatctcagtgaatccaagaacaaatctacagtcagtggaagtggctctcaggtccacagactaagcaacatccaaggtttagaatctgctgcagcacagcaacccaagccaaccatccaacaagcagtagataaacaagaagcagaaacagatgcgtctcctgcaccttctaaaggagagctttcaaggcggctgagtgtgaaggacaggataaacatgtttgagagccagaaaaaggagcagactccaagttctggtaacagcaactctgccggtactggtagagtggttccagggaaaggtgagcaccgcagggttccttctggcgcctccatggagaagttagttagaaggtggagcagtgttagcgacatgagtattgacctcagcaacaatgagagtagtagcttaaatgacaaaaaggataatggaactcctgccgggactccaacatctactgatttggaggccgactctaaagtaagagctaatgaggactctaatggacagaaggattcaatcacgtcacactcttggccttgtcaaaaggataatgtaccaatggatctggccaccacagatttgtgcccaccctcaattttaagtaatacacttgctcctcataaagagagtatatatggtgatggtgcagaaaacgacatggttatgaactctagcattgaaagtgaagcatcctttgggaaagaaccgggggttattcaaggacacacaaggatgtcaaatcatgctacttcaaatgtttccactcaagaccgtctaaaatcttctgcaaagtcagttgaagaagccttgctgaaaaataaagttattgtaactagtgcatcgtcagaggagcatgtctgcatgatagacaaggaaatcacagctgttgctcatgaagtaccagttgcaagtgaacagattccccagaatgatattagaggtctccatacaaaagatattcacactgaagcagaagtgactggaaggaaggatcagccttcacgatcatttggaagggtatctggtggtgttaatcctaaaccaaaagcctcatccaattcccgagctaatgctaaaggctcatctgttagggatgcgattgcctctacagaaactgagttccgtgacgttagtttgcagcggaatcgtctaccacggaagtcagaagatgtagggaaaaaggttacagctggttctgattcagattgctctggtcgtcagggaaaaaatttgagcaggcaatcatccattaccgatcaggaactaaacttgcaggctagagtgacaagaccaggaaaagggaaccaagatcggcatggtgaattgcaaatgaaggccaatgagttggagaaattatttgctgaacacaagttaacatcctcccgacgaggtaaacctacagatgtgcaggttgaaagcacacctatggtgagtgaggtaaagccgacaatggttcttcatgagacaattcatacaaaacaagttgtaaaggagagtataactgtcaatgattttgatgccggtgagcttctgaagatggtgaataatcaagaatttaacattagcacaccacaaaaacttggcattctaagtttagaagagtcgagagggaagttttatgagcattatatgcagaagagggatgcaaaactgaaggaaggctggaagctgcagagagaggagaaggaagcaatgttaaaggctatgcatgacagcctagaacggagcaaggctgagttgcttacaaaattctctcggtctgcagatgtccctgactcaacttatgtttcccattgttctcagaagattcctccttcgcgatcagcaagaaaaaataaagatcagggggttggctcattcttggtggaagaggaaatgaatagtgactacctatctggtgatggttcttccaggagtgctgattccagaaagcatttttcaaataaagttgcttctacccaaaatgcatctgctggtcctatccataaacgttcatcaagaaccgcaagctctggttatgctaatcgcaggaatccaccagaaaatcctctcgcacagtctgtccccagtttttctgacttgagaaaagaaaatacaaagccttcacctggagtcagtagagtgagtgcaagagttcagcaaaagtcttttgcccgtagcaagagtattattgaagagtcaaagagcatattgaaagaagatcaatcgaggaggtcacaatctatgaggaagaaccaaattcctgatgagcttaaggacatttcgtcagggaatgatgatatttacaattgggctccctcaagaatttccaagaatcaatcagagggaccttttgcttacagtacccgtagatcgggtccaccaaagccttttcttaggaaaggcaatgggactcaccctgttattggtatagctggatttcaggctgcagctgccatgatggcgaatgccctccagcatggtgacagtggtgattttgaagatcagcaagaggattcccctgatgatgccaaagaagaggaagaatatgaaagcatggaagaaaatcttagagaaagtgactttcctgctgattctgacagtgagaacccaagagtgagtcatgaatttggaaattcagatgacccagggtcagaaaacggtgatgctgattttccaagcaaaacacctgccattggcagtactaagttcactgcttttacaggaaatgttcacaatccagctggtgatgttccagcaccctggagttctcgtcttccacagctgttcccttacacgaatgataattcagatggtgacgcctttgctgattcaccatcgggaagtccatcaccatggaattctcattcactggatgaaataacagatgctgatgtatctcggatgcggaaaaagtggggcagtgcacagatgccttttgctggtgtcaatgcacctcaacagccacgcaaagatgtttccaaaggattgaagaaattgtggaaatttggtaggaagactagaggcggtgacggtttagtaaatgattgggtatctgcctccactgcctcagaatgtgatgatgacatggaagatggacgggatctggtagtaggatcttctgatgatttcagaaagtctcgaatgggttatcttgcttcatatgacggttttgttgagaacgaggttttttctgaacaagaacaatcactacgcagctccattccaaacccacctgcaaatttcagattgagggaggatcagctgactggaagttctcttaaagcgccgcgttctttcttctccctgtcaacattccgaagcaagggaggtgatgccaggctcaggtgatcctcagaagacaccagaggtgtggtgtgtataaaatatcttgtcaagttagagttggacttttgcaatctgttctttcaactggcccaggactcctgtattttttttcattgtttttgtgatatatctgtatctccctctcaacttgtttcttcattcacatatatcacaaattcaagatatatggtaattttgccaactatagcaaaccacctgagatgctagctctgcttgtgataaaattgaaacgagtttgtgacaaaattgaaacgagagtcg

SEQ ID NO: 217078 - DNA, 5958 bp, Zea Mays
cctctgcagcagccagcagccaccagtgaggccgtgagggtgagtcgagtcgagtccaccaccaccaccaccaccaccaaatagccaaacacgcagtggtgctgctctctagtcctcccttcttccactccgctaaccccccgtcgcaagcacgcacgcgcgcgctcatcggattcggctacgcgccggcgagatccgggccgccgcagcacggtccggcagacgccgccgaaggcgcaagccgcgatcttgtcgccgcgggagctgcattggcgccccacgcggccgttccggcgtttcttgggaggttgcggcggcgggaggagttcgtgtccgggatccgccagatccgtgctcgccggcggcggcagcagtggtggtggccgccatggaggccgatgcgccgctcgacctcgcgctcttccagctatcccctcggcgtcagcggtgcgagctagtggtgtgcggcaatgggcggacggagaagatcgcgtcagggtcggtgaagccgttcgtggcgcacctgcgggctgcggaggaacaggcgtcggctcagccaccgccgctggccatccggctgcagctggagcggcccgccccgtggtttagcaagggcacccttgagaggttcgtgcgcttcgtgagcacaccggaggtgctggagttggcgaacacctatgatctggagatgtcgcagctggaaggggccaggaagatttatgcgcagggaggtactggagatgctacttcaggtggagctgtacaatcttgcatatcttctgttactgaatctagtttatgtaatctctggccatgcttattggcagctgaaaatgttacagcctcagcggcagcggcggcagatattacaaagaaagaacttcttagggcaattgatgtgcgtctaagttcccttaaacaagatctggccgcagcttgttctcgagcatcctctgctgggttcaatcctatcagtgtatctgagcttattctttttgctaaccattttggtgccagtcggctgagcgaagcatgcacaaagttcatgtcactttgccagcggcgtcctgacatcagtcctcaaactgcacagccagcagtttcatcacactggaaggtctttgacgatgggaatgtccgtggttcttcgagttcagacatgtctatagatgaaccactagttgatctcagtgaatccaagaacaaatctacagtcagtggaagtggctctcaggtccacagactaagcaacatccaaggtttagaatctgctgcagcacagcaacccaagccaaccatccaacaagcagtagataaacaagaagcagaaacagatgcgtctcctgcaccttctaaaggagagctttcaaggcggctgagtgtgaaggacaggataaacatgtttgagagccagaaaaaggagcagactccaagttctggtaacagcaactctgccggtactggtagagtggttccagggaaaggtgagcaccgcagggttccttctggcgcctccatggagaagttagttagaaggtggagcagtgttagcgacatgagtattgacctcagcaacaatgagagtagtagcttaaatgacaaaaaggataatggaactcctgccgggactccaacatctactgatttggaggccgactctaaagtaagagctaatgaggactctaatggacagaaggattcaatcacgtcacactcttggccttgtcaaaaggataatgtaccaatggatctggccaccacagatttgtgcccaccctcaattttaagtaatacacttgctcctcataaagagagtatatatggtgatggtgcagaaaacgacatggttatgaactctagcattgaaagtgaagcatcctttgggaaagaaccgggggttattcaaggacacacaaggatgtcaaatcatgctacttcaaatgtttccactcaagaccgtctaaaatcttctgcaaagtcagttgaagaagccttgctgaaaaataaagttattgtaactagtgcatcgtcagaggagcatgtctgcatgatagacaaggaaatcacagctgttgctcatgaagtaccagttgcaagtgaacagattccccagaatgatattagaggtctccatacaaaagatattcacactgaagcagaagtgactggaaggaaggatcagccttcacgatcatttggaagggtatctggtggtgttaatcctaaaccaaaagcctcatccaattcccgagctaatgctaaaggctcatctgttagggatgcgattgcctctacagaaactgagttccgtgacgttagtttgcagcggaatcgtctaccacggaagtcagaagatgtagggaaaaaggttacagctggttctgattcagattgctctggtcgtcagggaaaaaatttgagcaggcaatcatccattaccgatcaggaactaaacttgcaggctagagtgacaagaccaggaaaagggaaccaagatcggcatggtgaattgcaaatgaaggccaatgagttggagaaattatttgctgaacacaagttaacatcctcccgacgaggtaaacctacagatgtgcaggttgaaagcacacctatggtgagtgaggtaaagccgacaatggttcttcatgagacaattcatacaaaacaagttgtaaaggagagtataactgtcaatgattttgatgccggtgagcttctgaagatggtgaataatcaagaatttaacattagcacaccacaaaaacttggcattctaagtttagaagagtcgagagggaagttttatgagcattatatgcagaagagggatgcaaaactgaaggaaggctggaagctgcagagagaggagaaggaagcaatgttaaaggctatgcatgacagcctagaacggagcaaggctgagttgcttacaaaattctctcggtctgcagatgtccctgactcaacttatgtttcccattgttctcagaagattcctccttcgcgatcagcaagaaaaaataaagatcagggggttggctcattcttggtggaagaggaaatgaatagtgactacctatctggtgatggttcttccaggagtgctgattccagaaagcatttttcaaataaagttgcttctacccaaaatgcatctgctggtcctatccataaacgttcatcaagaaccgcaagctctggttatgctaatcgcaggaatccaccagaaaatcctctcgcacagtctgtccccagtttttctgacttgagaaaagaaaatacaaagccttcacctggagtcagtagagtgagtgcaagagttcagcaaaagtcttttgcccgtagcaagagtattattgaagagtcaaagagcatattgaaagaagatcaatcgaggaggtcacaatctatgaggaagaaccaaattcctgatgagcttaaggacatttcgtcagggaatgatgatatttacaattgggctccctcaagaatttccaagaatcaatcagagggaccttttgcttacagtacccgtagatcgggtccaccaaagccttttcttaggaaaggcaatgggactcaccctgttattggtatagctggatttcaggctgcagctgccatgatggcgaatgccctccagcatggtgacagtggtgattttgaagatcagcaagaggattcccctgatgatgccaaagaagaggaagaatatgaaagcatggaagaaaatcttagagaaagtgactttcctgctgattctgacagtgagaacccaagagtgagtcatgaatttggaaattcagatgacccagggtcagaaaacggtgatgctgattttccaagcaaaacacctgccattggcagtactaagttcactgcttttacaggaaatgttcacaatccagctggtgatgttccagcaccctggagttctcgtcttccacagctgttcccttacacgaatgataattcagatggtgacgcctttgctgattcaccatcgggaagtccatcaccatggaattctcattcactggatgaaataacagatgctgatgtatctcggatgcggaaaaagtggggcagtgcacagatgccttttgctggtgtcaatgcacctcaacagccacgcaaagatgtttccaaaggattgaagaaattgtggaaatttggtaggaagactagaggcggtgacggtttagtaaatgattgggtatctgcctccactgcctcagaatgtgatgatgacatggaagatggacgggatctggtagtaggatcttctgatgatttcagaaagtctcgaatgggttatcttgcttcatatgacggttttgttgagaacgaggttttttctgaacaaggtatttgactttctaattctgtaaaaggtcttctcgttgtcattaaattagttagtatgcttctcaaaatactattcccacaatttatttgcactagataaagtttaaagaaatgggcctttctaatatggtcatcacactcctaaaattcaaaaaaaagtatctgaaggttccaaccatgtctatgagttggcaaacaatttaattgataacttaagatttctgttctccatctacccgaacaaaattgaaactgttggaacagctattctgagcattactcattctcgatgaggtattcctaggatataacctcttattcttggctgatgttatgcgcactaaccctgggccattggttctgccttatggcttgagtagttcagtatattgttcatacttcagtttgttaagagtgagtgacctggtggacgttcctctgttaatgcactttgcattgatgatgcacatgttatgtcgctccctagatcatgttagtggatgcaacatttcgaatgtgtggattttgaaaaagaaagggaaaaaggtgctagagctgtaatgtttcctatgcaatccctgcagtgctatccgaaagaatccaataacttctttttgtgaagcatggcctgaggatcctccctgcaatggctcgggaggagtaagatacaacctttgaaaactattgaccctagtaactaggcccagatgttaaaattgtaatccccccaaagcagtaacttccgtggatcactggatcatgatgatatggaggcccagtgatgttatacatagagtacatgatagacacaggaggaaaacactagattaggggattacgctaatacccctggctatcataccttaacagcactcgcaggggtttattagctcggacttctgaatcttaagggacctgtaagcctgtatatcctttggttactgtccaattttaactcttgccacacattttttttattcaagcccagaagcttgatgaaggtccttaatttgcagaacaatcactacgcagctccattccaaacccacctgcaaatttcagattgagggaggatcagctgactggaagttctcttaaagcgccgcgttctttcttctccctgtcaacattccgaagcaagggaggtgatgccaggctcaggtgatcctcagaagacaccagaggtgtggtgtgtataaaatatcttgtcaagttaggtatggttatcaaattttcagggtggtacgtggatgctgctagcttgtgattatatatatattgtgtatctatggcggttcatataagctaccagttgagctctctccattgttgccgtttgattattcttttttcccctgtgtagagttggacttttgcaatctgttctttcaactggcccaggactcctgtattttttttcattgtttttgtgatatatctgtatctccctctcaacttgtttcttcattcacatatatcacaaattcaagatatatggtaattttgccaactatagcaaaccacctgagatgctagctctgcttgtgataaaattgaaacgagtttgtgacaaaattgaaacgagagtcg

SEQ ID NO: 217079 - DNA, 4551 bp, Zea Mays
tcccttcttccactccgctaaccccccgtcgcaagcacgcacgcgcgcgctcatcggattcggctacgcgccggcgagatccgggccgccgcagcacggtccggcagacgccgccgaaggcgcaagccgcgatcttgtcgccgcgggagctgcattggcgccccacgcggccgttccggcgtttcttgggaggttgcggcggcgggaggagttcgtgtccgggatccgccagatccgtgctcgccggcggcggcagcagtggtggtggccgccatggaggccgatgcgccgctcgacctcgcgctcttccagctatcccctcggcgtcagcggtgcgagctagtggtgtgcggcaatgggcggacggagaagatcgcgtcagggtcggtgaagccgttcgtggcgcacctgcgggctgcggaggaacaggcgtcggctcagccaccgccgctggccatccggctgcagctggagcggcccgccccgtggtttagcaagggcacccttgagaggttcgtgcgcttcgtgagcacaccggaggtgctggagttggcgaacacctatgatctggagatgtcgcagctggaaggggccaggaagatttatgcgcagggaggtactggagatgctacttcaggtggagctgctgaaaatgttacagcctcagcggcagcggcggcagatattacaaagaaagaacttcttagggcaattgatgtgcgtctaagttcccttaaacaagatctggccgcagcttgttctcgagcatcctctgctgggttcaatcctatcagtgtatctgagcttattctttttgctaaccattttggtgccagtcggctgagcgaagcatgcacaaagttcatgtcactttgccagcggcgtcctgacatcagtcctcaaactgcacagccagcagtttcatcacactggaaggtctttgacgatgggaatgtccgtggttcttcgagttcagacatgtctatagatgaaccactagttgatctcagtgaatccaagaacaaatctacagtcagtggaagtggctctcaggtccacagactaagcaacatccaaggtttagaatctgctgcagcacagcaacccaagccaaccatccaacaagcagtagataaacaagaagcagaaacagatgcgtctcctgcaccttctaaaggagagctttcaaggcggctgagtgtgaaggacaggataaacatgtttgagagccagaaaaaggagcagactccaagttctggtaacagcaactctgccggtactggtagagtggttccagggaaaggtgagcaccgcagggttccttctggcgcctccatggagaagttagttagaaggtggagcagtgttagcgacatgagtattgacctcagcaacaatgagagtagtagcttaaatgacaaaaaggataatggaactcctgccgggactccaacatctactgatttggaggccgactctaaagtaagagctaatgaggactctaatggacagaaggattcaatcacgtcacactcttggccttgtcaaaaggataatgtaccaatggatctggccaccacagatttgtgcccaccctcaattttaagtaatacacttgctcctcataaagagagtatatatggtgatggtgcagaaaacgacatggttatgaactctagcattgaaagtgaagcatcctttgggaaagaaccgggggttattcaaggacacacaaggatgtcaaatcatgctacttcaaatgtttccactcaagaccgtctaaaatcttctgcaaagtcagttgaagaagccttgctgaaaaataaagttattgtaactagtgcatcgtcagaggagcatgtctgcatgatagacaaggaaatcacagctgttgctcatgaagtaccagttgcaagtgaacagattccccagaatgatattagaggtctccatacaaaagatattcacactgaagcagaagtgactggaaggaaggatcagccttcacgatcatttggaagggtatctggtggtgttaatcctaaaccaaaagcctcatccaattcccgagctaatgctaaaggctcatctgttagggatgcgattgcctctacagaaactgagttccgtgacgttagtttgcagcggaatcgtctaccacggaagtcagaagatgtagggaaaaaggttacagctggttctgattcagattgctctggtcgtcagggaaaaaatttgagcaggcaatcatccattaccgatcaggaactaaacttgcaggctagagtgacaagaccaggaaaagggaaccaagatcggcatggtgaattgcaaatgaaggccaatgagttggagaaattatttgctgaacacaagttaacatcctcccgacgaggtaaacctacagatgtgcaggttgaaagcacacctatggtgagtgaggtaaagccgacaatggttcttcatgagacaattcatacaaaacaagttgtaaaggagagtataactgtcaatgattttgatgccggtgagcttctgaagatggtgaataatcaagaatttaacattagcacaccacaaaaacttggcattctaagtttagaagagtcgagagggaagttttatgagcattatatgcagaagagggatgcaaaactgaaggaaggctggaagctgcagagagaggagaaggaagcaatgttaaaggctatgcatgacagcctagaacggagcaaggctgagttgcttacaaaattctctcggtctgcagatgtccctgactcaacttatgtttcccattgttctcagaagattcctccttcgcgatcagcaagaaaaaataaagatcagggggttggctcattcttggtggaagaggaaatgaatagtgactacctatctggtgatggttcttccaggagtgctgattccagaaagcatttttcaaataaagttgcttctacccaaaatgcatctgctggtcctatccataaacgttcatcaagaaccgcaagctctggttatgctaatcgcaggaatccaccagaaaatcctctcgcacagtctgtccccagtttttctgacttgagaaaagaaaatacaaagccttcacctggagtcagtagagtgagtgcaagagttcagcaaaagtcttttgcccgtagcaagagtattattgaagagtcaaagagcatattgaaagaagatcaatcgaggaggtcacaatctatgaggaagaaccaaattcctgatgagcttaaggacatttcgtcagggaatgatgatatttacaattgggctccctcaagaatttccaagaatcaatcagagggaccttttgcttacagtacccgtagatcgggtccaccaaagccttttcttaggaaaggcaatgggactcaccctgttattggtatagctggatttcaggctgcagctgccatgatggcgaatgccctccagcatggtgacagtggtgattttgaagatcagcaagaggattcccctgatgatgccaaagaagaggaagaatatgaaagcatggaagaaaatcttagagaaagtgactttcctgctgattctgacagtgagaacccaagagtgagtcatgaatttggaaattcagatgacccagggtcagaaaacggtgatgctgattttccaagcaaaacacctgccattggcagtactaagttcactgcttttacaggaaatgttcacaatccagctggtgatgttccagcaccctggagttctcgtcttccacagctgttcccttacacgaatgataattcagatggtgacgcctttgctgattcaccatcgggaagtccatcaccatggaattctcattcactggatgaaataacagatgctgatgtatctcggatgcggaaaaagtggggcagtgcacagatgccttttgctggtgtcaatgcacctcaacagccacgcaaagatgtttccaaaggattgaagaaattgtggaaatttggtaggaagactagaggcggtgacggtttagtaaatgattgggtatctgcctccactgcctcagaatgtgatgatgacatggaagatggacgggatctggtagtaggatcttctgatgatttcagaaagtctcgaatgggttatcttgcttcatatgacggttttgttgagaacgaggttttttctgaacaaggtatttgactttctaattctgtaaaaggtcttctcgttgtcattaaattagttagtatgcttctcaaaatactattcccacaatttatttgcactagataaagtttaaagaaatgggcctttctaatatggtcatcacactcctaaaattcaaaaaaaagtatctgaaggttccaaccatgtctatgagttggcaaacaatttaattgataacttaagatttctgttctccatctacccgaacaaaattgaaactgttggaacagctattctgagcattactcattctcgatgaggtattcctaggatataacctcttattcttggctgatgttatgcgcactaaccctgggccattggttctgc

SEQ ID NO: 217080 - DNA, 4821 bp, Zea Mays
gcacgcacgcgcgcgctcatcggattcggctacgcgccggcgagatccgggccgccgcagcacggtccggcagacgccgccgaaggcgcaagccgcgatcttgtcgccgcgggagctgcattggcgccccacgcggccgttccggcgtttcttgggaggttgcggcggcgggaggagttcgtgtccgggatccgccagatccgtgctcgccggcggcggcagcagtggtggtggccgccatggaggccgatgcgccgctcgacctcgcgctcttccagctatcccctcggcgtcagcggtgcgagctagtggtgtgcggcaatgggcggacggagaagatcgcgtcagggtcggtgaagccgttcgtggcgcacctgcgggctgcggaggaacaggcgtcggctcagccaccgccgctggccatccggctgcagctggagcggcccgccccgtggtttagcaagggcacccttgagaggttcgtgcgcttcgtgagcacaccggaggtgctggagttggcgaacacctatgatctggagatgtcgcagctggaaggggccaggaagatttatgcgcagggaggtactggagatgctacttcaggtggagctggtatgtaggatgattttatctagtgtttggatcgcccttctattgtcaattggggtttgaatattgctagcttagttcatctatgttcatacctgctgaaaatgttacagcctcagcggcagcggcggcagatattacaaagaaagaacttcttagggcaattgatgtgcgtctaagttcccttaaacaagatctggccgcagcttgttctcgagcatcctctgctgggttcaatcctatcagtgtatctgagcttattctttttgctaaccattttggtgccagtcggctgagcgaagcatgcacaaagttcatgtcactttgccagcggcgtcctgacatcagtcctcaaactgcacagccagcagtttcatcacactggaaggtctttgacgatgggaatgtccgtggttcttcgagttcagacatgtctatagatgaaccactagttgatctcagtgaatccaagaacaaatctacagtcagtggaagtggctctcaggtccacagactaagcaacatccaaggtttagaatctgctgcagcacagcaacccaagccaaccatccaacaagcagtagataaacaagaagcagaaacagatgcgtctcctgcaccttctaaaggagagctttcaaggcggctgagtgtgaaggacaggataaacatgtttgagagccagaaaaaggagcagactccaagttctggtaacagcaactctgccggtactggtagagtggttccagggaaaggtgagcaccgcagggttccttctggcgcctccatggagaagttagttagaaggtggagcagtgttagcgacatgagtattgacctcagcaacaatgagagtagtagcttaaatgacaaaaaggataatggaactcctgccgggactccaacatctactgatttggaggccgactctaaagtaagagctaatgaggactctaatggacagaaggattcaatcacgtcacactcttggccttgtcaaaaggataatgtaccaatggatctggccaccacagatttgtgcccaccctcaattttaagtaatacacttgctcctcataaagagagtatatatggtgatggtgcagaaaacgacatggttatgaactctagcattgaaagtgaagcatcctttgggaaagaaccgggggttattcaaggacacacaaggatgtcaaatcatgctacttcaaatgtttccactcaagaccgtctaaaatcttctgcaaagtcagttgaagaagccttgctgaaaaataaagttattgtaactagtgcatcgtcagaggagcatgtctgcatgatagacaaggaaatcacagctgttgctcatgaagtaccagttgcaagtgaacagattccccagaatgatattagaggtctccatacaaaagatattcacactgaagcagaagtgactggaaggaaggatcagccttcacgatcatttggaagggtatctggtggtgttaatcctaaaccaaaagcctcatccaattcccgagctaatgctaaaggctcatctgttagggatgcgattgcctctacagaaactgagttccgtgacgttagtttgcagcggaatcgtctaccacggaagtcagaagatgtagggaaaaaggttacagctggttctgattcagattgctctggtcgtcagggaaaaaatttgagcaggcaatcatccattaccgatcaggaactaaacttgcaggctagagtgacaagaccaggaaaagggaaccaagatcggcatggtgaattgcaaatgaaggccaatgagttggagaaattatttgctgaacacaagttaacatcctcccgacgaggtaaacctacagatgtgcaggttgaaagcacacctatggtgagtgaggtaaagccgacaatggttcttcatgagacaattcatacaaaacaagttgtaaaggagagtataactgtcaatgattttgatgccggtgagcttctgaagatggtgaataatcaagaatttaacattagcacaccacaaaaacttggcattctaagtttagaagagtcgagagggaagttttatgagcattatatgcagaagagggatgcaaaactgaaggaaggctggaagctgcagagagaggagaaggaagcaatgttaaaggctatgcatgacagcctagaacggagcaaggctgagttgcttacaaaattctctcggtctgcagatgtccctgactcaacttatgtttcccattgttctcagaagattcctccttcgcgatcagcaagaaaaaataaagatcagggggttggctcattcttggtggaagaggaaatgaatagtgactacctatctggtgatggttcttccaggagtgctgattccagaaagcatttttcaaataaagttgcttctacccaaaatgcatctgctggtcctatccataaacgttcatcaagaaccgcaagctctggttatgctaatcgcaggaatccaccagaaaatcctctcgcacagtctgtccccagtttttctgacttgagaaaagaaaatacaaagccttcacctggagtcagtagagtgagtgcaagagttcagcaaaagtcttttgcccgtagcaagagtattattgaagagtcaaagagcatattgaaagaagatcaatcgaggaggtcacaatctatgaggaagaaccaaattcctgatgagcttaaggacatttcgtcagggaatgatgatatttacaattgggctccctcaagaatttccaagaatcaatcagagggaccttttgcttacagtacccgtagatcgggtccaccaaagccttttcttaggaaaggcaatgggactcaccctgttattggtatagctggatttcaggctgcagctgccatgatggcgaatgccctccagcatggtgacagtggtgattttgaagatcagcaagaggattcccctgatgatgccaaagaagaggaagaatatgaaagcatggaagaaaatcttagagaaagtgactttcctgctgattctgacagtgagaacccaagagtgagtcatgaatttggaaattcagatgacccagggtcagaaaacggtgatgctgattttccaagcaaaacacctgccattggcagtactaagttcactgcttttacaggaaatgttcacaatccagctggtgatgttccagcaccctggagttctcgtcttccacagctgttcccttacacgaatgataattcagatggtgacgcctttgctgattcaccatcgggaagtccatcaccatggaattctcattcactggatgaaataacagatgctgatgtatctcggatgcggaaaaagtggggcagtgcacagatgccttttgctggtgtcaatgcacctcaacagccacgcaaagatgtttccaaaggattgaagaaattgtggaaatttggtaggaagactagaggcggtgacggtttagtaaatgattgggtatctgcctccactgcctcagaatgtgatgatgacatggaagatggacgggatctggtagtaggatcttctgatgatttcagaaagtctcgaatgggttatcttgcttcatatgacggttttgttgagaacgaggttttttctgaacaagaacaatcactacgcagctccattccaaacccacctgcaaatttcagattgagggaggatcagctgactggaagttctcttaaagcgccgcgttctttcttctccctgtcaacattccgaagcaagggaggtgatgccaggctcaggtgatcctcagaagacaccagaggtgtggtgtgtataaaatatcttgtcaagttaggtatggttatcaaattttcagggtggtacgtggatgctgctagcttgtgattatatatatattgtgtatctatggcggttcatataagctaccagttgagctctctccattgttgccgtttgattattcttttttcccctgtgtagagttggacttttgcaatctgttctttcaactggcccaggactcctgtattttttttcattgtttttgtgatatatctgtatctccctctcaacttgtttcttcattcacatatatcacaaattcaagatatatggtaattttgccaactatagcaaaccacctgagatgctagctctgcttgtgataaaattgaaacgagtttgtgacaaaattgaaacgagagtcg

SEQ ID NO: 217081 - DNA, 4062 bp, Zea Mays
ctttgatcccttcctcatgtctcattcagaaacagtgaatgaaaatggtttctttgatgggagcaaacttctccaagtctctggcagcaaacataattacccatctcatttgctacaaatttgaaggtgagaaatacgaacttgctaaaagggtgaatataaagcttgtcaatcaccggtggctggaagaatgcttaaaggcttgggaaatccttccggtcgaccattatacgaaaagtggttgggaagtagagataatgggagctcaagctaaggactctgaagatgaaacagaatatgctggtacatgctcattaagtagcagacgtattgacagaaggacccctattagagagatcagcacaaaatctcatgttgactctgctctacatgcacccagtggaggtcctactgtctctgctagcaatgtagtgggtgctactggaaaacacttgagcactccagagcagtttatgaaagcacacgatgcgagcacaaaatcatctgacattagaactgactcaggaactgcccctgacacaaagtgtgctgcaatgtctgttgataatgatactcttaaacctacccgctctcacatttaccacaatgagaatgatgaggttcctgcagataaggccagtagggatgaagctaaagatgatcacagaagggaacttgacaccagggatagtacccttcgtactcccagtgtacataaaagcattgcacccactattccaggagacaatatagagaacactaacaggaattgtttccatggtttcagtcagatcaatgtcaacagtgatcttcagttaaactcttctgaagaaaatttctccaagaaaatattacactcaacaaacttgagcagaaaggtagaccagaaggatgacgggcatgtacctgatcccaaacccaacatttctcagtcatcagttgaagaaaacctaaacatgtgtgagtttaatccaagatcagaaggcaattcagcatcaagaaatgatcaacccttaggctattcaagaaggcgatcttcaaagtcaggatcacttaatgttcataggaagaaaagcattctttcttcagtcagttcaaaggcaccaaatgaagccccagactcgggaagtggaatatcaagcgcaactgcttctgatgtgggtagaagccccaccgaacctaccaaagttgatggtcatgtaaacagtggtccaactatgaattcaacagagaaccagatgtccggttgtaaaagcaacctgttaagttataggagaacatctttgaagcttgtaagctctgctgaagtagaaaagcttcctgaaaattctgttaatgataagaacatggtggagccagatgtagtaaagacaccagcactgcacgaggcaacaactgaggagccttccccttccgtctgttctgaagttagaaaagaaagtttaggtgttcatcagaatagggacgctgaaatgactgatgctcagctgctaagcaaaactgaagatgcagctccttgctcaaaacctgataaagtggtttcttgtcagaactcgggactagaaggttgtaaagatgtcccagttaacaagatcactgatgaacatggaatatttccctcgaaaatatcaacttctagagtgaagaaggttggtgccaagcggtctcgcaatgccggcagtaaagctgctagtgaatttacaaatagtagaagtgaggttgcagctttgaagcctaagcatgataaagttgcttctcatgaaaacgtggaggcacaacagggagaaggatgttgtagtccaaatgctgctgaatgtacaccaccatctcctgcagaagccctgaacaacaaatcaacgaatgaagttctaaccagctcccagggccccaatcataagacaaacgaatcactagtggcttccaaggcggagtctgttaatatgactctgcaaagaaacaagaaggggaaccgcagaaagcttccaaacacttcaaatgcagatgaaaatcaaagaagttcatctcggacagtaccaaattccaaatcaggtaatttggttgcaaaggggtctcggactgctgatttcaatatatctgactcaccaactgtcgatgaaactgagacagtgccatcaaattcgagttttaatgaggcagttcctccaggaaatggtgaagaaaaacataaaaggctttcaagcagtgcaaacgcagatgaccctgaagcatgtacagcaaataaagtaccaaacaatagagtccgtaaggtcgtagccaagaggaagctatctgatgtccaaagccacaaatctggtagtgagccttgcaagactgcgaaggtattggtatctgaagttaaagttgtgtcaccagccagagttgcgcagagttctagaaatgctaacaaggtaacagtggttcaagacctgcagaacaccaatactggtaggacgaacgatacagttggatcattttgcaaagatgtcacggaagactgctcaaaagacatgcagagctctaaaactagaagcagcaggagacaaaagattgcagatctagtggatggttcaacggaccatgacaaggagaacatactagtcgatagtaattttacttccaatacaaaacgtggaaataacagcatgagttccaaatccaacacaaagacattacaaagtagcaaagctgtgcttgatgagagtagtgtgatcaaaaggaatggttatggaaccttggatgtgccagaaccaacatggtttattctaagtggacatcgcctgctgagaaaagagtatagggctatacttagacgtttgagaggtagagtttgcagggattcacatcactggtctttccaagcaacacaccttgtcaccactgagatgcgcagaactgaaaaattcttcgcagctgctgcggctggcaggtggatactgaagcctgattacttgactgctagcaatgaggctggcaagttcttagaggaagagccatttgagtggcacggtgaaggccttaatatcggtgatacgatcagcttggatgctccaaggaagtggcgccagctgcggcagcgtactggctatggcgctttctatgggatgcaggtcatcatatatggggaatgcattgctccaacactggacacgttaaaacgcgcgatcaggtgtggtgatggcaccatcttagcaacctccccaccttacacccggttctttaagtccagtgttgacttcgctgttgtatccgcgggcatgccaagcgcggacgcgtgggtgcaggaattcatgcggcatagcatcccctgcatcagcgcagattacctggtggagtacgtgtgcaagcccgggcaccccttgggcaagcacgtcctcttcaacatgcacgatctggccgagaggtccctgcagaagctcatgaagaaccaagaagatgctcccgggagctgttccgcttgtgggtcagacaaccgggaagtgccgatgctggtgtgcggcggcgacgggaggagccagtcttccggctgtggggtccggacgcatgccgattgctgcaaccctcccgtggaaggctgcgatggtggcgagtggctgtgcggtaggtgcgaccagcagaaatctgcaaagaaggctaagaagaccgctgcgaaaccgagggtgctgaaacagagatgattctggtttggcccgtacaagcgatgcaaaaggtcgtctcccaaggtaacgacgaatgatggcagcgggggtgctcttgctctctacaagttgatgacaactagctcgttgcctttggaaagcacccgtgcatgtgatctgatgaatgaaaacaaagtgatgggtgtaaacgtataaggactttagactggtgccaataaatattacgtatttatgtaaatgcacggatctgatggaatgctgtgatcaacttgaacatatatggtgcccatcaatctgggcattgggcgctgtcgaatgtccggtaaagcgcgctatttccggatcgtccttcatggttgtgtgcgtccgagtaaaggcaatggccgtgcaaaagtttcttcgacgg

SEQ ID NO: 217082 - DNA, 4249 bp, Zea Mays
atgccttgtgctgtttgttcggatgatccagtgtgtgtggcggcgaggaaggccgggaagaaggtcgtcgttgatcagtgggtggaagacagctttgatctcggagaattggcagatgcagatcgggtgctatatgctccagtcagagattttaaaggcattccaggttgcgataaacttcacatttgtttgacagggtaccagaagaattggcgcgacgacataatgaaaatggtttctttgatgggagcaaacttctccaagtctctggcagcaaacataattacccatctcatttgctacaaatttgaaggtgagaaatacgaacttgctaaaagggtgaatataaagcttgtcaatcaccggtggctggaagaatgcttaaaggcttgggaaatccttccggtcgaccattatacgaaaagtggttgggaagtagagataatgggagctcaagctaaggactctgaagatgaaacagaatatgctggtacatgctcattaagtagcagacgtattgacagaaggacccctattagagagatcagcacaaaatctcatgttgactctgctctacatgcacccagtggaggtcctactgtctctgctagcaatgtagtgggtgctactggaaaacacttgagcactccagagcagtttatgaaagcacacgatgcgagcacaaaatcatctgacattagaactgactcaggaactgcccctgacacaaagtgtgctgcaatgtctgttgataatgatactcttaaacctacccgctctcacatttaccacaatgagaatgatgaggttcctgcagataaggccagtagggatgaagctaaagatgatcacagaagggaacttgacaccagggatagtacccttcgtactcccagtgtacataaaagcattgcacccactattccaggagacaatatagagaacactaacaggaattgtttccatggtttcagtcagatcaatgtcaacagtgatcttcagttaaactcttctgaagaaaatttctccaagaaaatattacactcaacaaacttgagcagaaaggtagaccagaaggatgacgggcatgtacctgatcccaaacccaacatttctcagtcatcagttgaagaaaacctaaacatgtgtgagtttaatccaagatcagaaggcaattcagcatcaagaaatgatcaacccttaggctattcaagaaggcgatcttcaaagtcaggatcacttaatgttcataggaagaaaagcattctttcttcagtcagttcaaaggcaccaaatgaagccccagactcgggaagtggaatatcaagcgcaactgcttctgatgtgggtagaagccccaccgaacctaccaaagttgatggtcatgtaaacagtggtccaactatgaattcaacagagaaccagatgtccggttgtaaaagcaacctgttaagttataggagaacatctttgaagcttgtaagctctgctgaagtagaaaagcttcctgaaaattctgttaatgataagaacatggtggagccagatgtagtaaagacaccagcactgcacgaggcaacaactgaggagccttccccttccgtctgttctgaagttagaaaagaaagtttaggtgttcatcagaatagggacgctgaaatgactgatgctcagctgctaagcaaaactgaagatgcagctccttgctcaaaacctgataaagtggtttcttgtcagaactcgggactagaaggttgtaaagatgtcccagttaacaagatcactgatgaacatggaatatttccctcgaaaatatcaacttctagagtgaagaaggttggtgccaagcggtctcgcaatgccggcagtaaagctgctagtgaatttacaaatagtagaagtgaggttgcagctttgaagcctaagcatgataaagttgcttctcatgaaaacgtggaggcacaacagggagaaggatgttgtagtccaaatgctgctgaatgtacaccaccatctcctgcagaagccctgaacaacaaatcaacgaatgaagttctaaccagctcccagggccccaatcataagacaaacgaatcactagtggcttccaaggcggagtctgttaatatgactctgcaaagaaacaagaaggggaaccgcagaaagcttccaaacacttcaaatgcagatgaaaatcaaagaagttcatctcggacagtaccaaattccaaatcaggtaatttggttgcaaaggggtctcggactgctgatttcaatatatctgactcaccaactgtcgatgaaactgagacagtgccatcaaattcgagttttaatgaggcagttcctccaggaaatggtgaagaaaaacataaaaggctttcaagcagtgcaaacgcagatgaccctgaagcatgtacagcaaataaagtaccaaacaatagagtccgtaaggtcgtagccaagaggaagctatctgatgtccaaagccacaaatctggtagtgagccttgcaagactgcgaaggtattggtatctgaagttaaagttgtgtcaccagccagagttgcgcagagttctagaaatgctaacaaggtaacagtggttcaagacctgcagaacaccaatactggtaggacgaacgatacagttggatcattttgcaaagatgtcacggaagactgctcaaaagacatgcagagctctaaaactagaagcagcaggagacaaaagattgcagatctagtggatggttcaacggaccatgacaaggagaacatactagtcgatagtaattttacttccaatacaaaacgtggaaataacagcatgagttccaaatccaacacaaagacattacaaagtagcaaagctgtgcttgatgagagtagtgtgatcaaaaggaatggttatggaaccttggatgtgccagaaccaacatggtttattctaagtggacatcgcctgctgagaaaagagtatagggctatacttagacgtttgagaggtagagtttgcagggattcacatcactggtctttccaagcaacacaccttgtcaccactgagatgcgcagaactgaaaaattcttcgcagctgctgcggctggcaggtggatactgaagcctgattacttgactgctagcaatgaggctggcaagttcttagaggaagagccatttgagtggcacggtgaaggccttaatatcggtgatacgatcagcttggatgctccaaggaagtggcgccagctgcggcagcgtactggctatggcgctttctatgggatgcaggtcatcatatatggggaatgcattgctccaacactggacacgttaaaacgcgcgatcaggtgtggtgatggcaccatcttagcaacctccccaccttacacccggttctttaagtccagtgttgacttcgctgttgtatccgcgggcatgccaagcgcggacgcgtgggtgcaggaattcatgcggcatagcatcccctgcatcagcgcagattacctggtggagtacgtgtgcaagcccgggcaccccttgggcaagcacgtcctcttcaacatgcacgatctggccgagaggtccctgcagaagctcatgaagaaccaagaagatgctcccgggagctgttccgcttgtgggtcagacaaccgggaagtgccgatgctggtgtgcggcggcgacgggaggagccagtcttccggctgtggggtccggacgcatgccgattgctgcaaccctcccgtggaaggctgcgatggtggcgagtggctgtgcggtaggtgcgaccagcagaaatctgcaaagaaggctaagaagaccgctgcgaaaccgagggtgctgaaacagagatgattctggtttggcccgtacaagcgatgcaaaaggtcgtctcccaaggtaacgacgaatgatggcagcgggggtgctcttgctctctacaagttgatgacaactagctcgttgcctttggaaagcacccgtgcatgtgatctgatgaatgaaaacaaagtgatgggtgtaaacgtataaggactttagactggtgccaataaatattacgtatttatgtaaatgcacggatctgatggaatgctgtgatcaacttgaacatatatggtgcccatcaatctgggcattgggcgctgtcgaatgtccggtaaagcgcgctatttccggatcgtccttcatggttgtgtgcgtccgagtaaaggcaatggccgtgcaaaagtttcttcgacgg

SEQ ID NO: 217083 - DNA, 4425 bp, Zea Mays
agacaatccaatcacccagcgccagcgatcccaaacaaaccctagccaccaatctccgctccggcctgcgccctcgccatgcccccgcacggccccgaagaagacgccgccgacgcgcacctcttcgctggcgtccgcttcgcgctccacggcttcgaccagatctccgcgtcccagtttcggttggagatagagcggtgcggcggcgtccacgcgggaggttgggacgcagactgcacccacgttatagtttccaacaccttatatgatgatccagtgtgtgtggcggcgaggaaggccgggaagaaggtcgtcgttgatcagtgggtggaagacagctttgatctcggagaattggcagatgcagatcggggtaccagaagaattggcgcgacgacataatgaaaatggtttctttgatgggagcaaacttctccaagtctctggcagcaaacataattacccatctcatttgctacaaatttgaaggtgagaaatacgaacttgctaaaagggtgaatataaagcttgtcaatcaccggtggctggaagaatgcttaaaggcttgggaaatccttccggtcgaccattatacgaaaagtggttgggaagtagagataatgggagctcaagctaaggactctgaagatgaaacagaatatgctggtacatgctcattaagtagcagacgtattgacagaaggacccctattagagagatcagcacaaaatctcatgttgactctgctctacatgcacccagtggaggtcctactgtctctgctagcaatgtagtgggtgctactggaaaacacttgagcactccagagcagtttatgaaagcacacgatgcgagcacaaaatcatctgacattagaactgactcaggaactgcccctgacacaaagtgtgctgcaatgtctgttgataatgatactcttaaacctacccgctctcacatttaccacaatgagaatgatgaggttcctgcagataaggccagtagggatgaagctaaagatgatcacagaagggaacttgacaccagggatagtacccttcgtactcccagtgtacataaaagcattgcacccactattccaggagacaatatagagaacactaacaggaattgtttccatggtttcagtcagatcaatgtcaacagtgatcttcagttaaactcttctgaagaaaatttctccaagaaaatattacactcaacaaacttgagcagaaaggtagaccagaaggatgacgggcatgtacctgatcccaaacccaacatttctcagtcatcagttgaagaaaacctaaacatgtgtgagtttaatccaagatcagaaggcaattcagcatcaagaaatgatcaacccttaggctattcaagaaggcgatcttcaaagtcaggatcacttaatgttcataggaagaaaagcattctttcttcagtcagttcaaaggcaccaaatgaagccccagactcgggaagtggaatatcaagcgcaactgcttctgatgtgggtagaagccccaccgaacctaccaaagttgatggtcatgtaaacagtggtccaactatgaattcaacagagaaccagatgtccggttgtaaaagcaacctgttaagttataggagaacatctttgaagcttgtaagctctgctgaagtagaaaagcttcctgaaaattctgttaatgataagaacatggtggagccagatgtagtaaagacaccagcactgcacgaggcaacaactgaggagccttccccttccgtctgttctgaagttagaaaagaaagtttaggtgttcatcagaatagggacgctgaaatgactgatgctcagctgctaagcaaaactgaagatgcagctccttgctcaaaacctgataaagtggtttcttgtcagaactcgggactagaaggttgtaaagatgtcccagttaacaagatcactgatgaacatggaatatttccctcgaaaatatcaacttctagagtgaagaaggttggtgccaagcggtctcgcaatgccggcagtaaagctgctagtgaatttacaaatagtagaagtgaggttgcagctttgaagcctaagcatgataaagttgcttctcatgaaaacgtggaggcacaacagggagaaggatgttgtagtccaaatgctgctgaatgtacaccaccatctcctgcagaagccctgaacaacaaatcaacgaatgaagttctaaccagctcccagggccccaatcataagacaaacgaatcactagtggcttccaaggcggagtctgttaatatgactctgcaaagaaacaagaaggggaaccgcagaaagcttccaaacacttcaaatgcagatgaaaatcaaagaagttcatctcggacagtaccaaattccaaatcaggtaatttggttgcaaaggggtctcggactgctgatttcaatatatctgactcaccaactgtcgatgaaactgagacagtgccatcaaattcgagttttaatgaggcagttcctccaggaaatggtgaagaaaaacataaaaggctttcaagcagtgcaaacgcagatgaccctgaagcatgtacagcaaataaagtaccaaacaatagagtccgtaaggtcgtagccaagaggaagctatctgatgtccaaagccacaaatctggtagtgagccttgcaagactgcgaaggtattggtatctgaagttaaagttgtgtcaccagccagagttgcgcagagttctagaaatgctaacaaggtaacagtggttcaagacctgcagaacaccaatactggtaggacgaacgatacagttggatcattttgcaaagatgtcacggaagactgctcaaaagacatgcagagctctaaaactagaagcagcaggagacaaaagattgcagatctagtggatggttcaacggaccatgacaaggagaacatactagtcgatagtaattttacttccaatacaaaacgtggaaataacagcatgagttccaaatccaacacaaagacattacaaagtagcaaagctgtgcttgatgagagtagtgtgatcaaaaggaatggttatggaaccttggatgtgccagaaccaacatggtttattctaagtggacatcgcctgctgagaaaagagtatagggctatacttagacgtttgagaggtagagtttgcagggattcacatcactggtctttccaagcaacacaccttgtcaccactgagatgcgcagaactgaaaaattcttcgcagctgctgcggctggcaggtggatactgaagcctgattacttgactgctagcaatgaggctggcaagttcttagaggaagagccatttgagtggcacggtgaaggccttaatatcggtgatacgatcagcttggatgctccaaggaagtggcgccagctgcggcagcgtactggctatggcgctttctatgggatgcaggtcatcatatatggggaatgcattgctccaacactggacacgttaaaacgcgcgatcaggtgtggtgatggcaccatcttagcaacctccccaccttacacccggttctttaagtccagtgttgacttcgctgttgtatccgcgggcatgccaagcgcggacgcgtgggtgcaggaattcatgcggcatagcatcccctgcatcagcgcagattacctggtggagtacgtgtgcaagcccgggcaccccttgggcaagcacgtcctcttcaacatgcacgatctggccgagaggtccctgcagaagctcatgaagaaccaagaagatgctcccgggagctgttccgcttgtgggtcagacaaccgggaagtgccgatgctggtgtgcggcggcgacgggaggagccagtcttccggctgtggggtccggacgcatgccgattgctgcaaccctcccgtggaaggctgcgatggtggcgagtggctgtgcggtaggtgcgaccagcagaaatctgcaaagaaggctaagaagaccgctgcgaaaccgagggtgctgaaacagagatgattctggtttggcccgtacaagcgatgcaaaaggtcgtctcccaaggtaacgacgaatgatggcagcgggggtgctcttgctctctacaagttgatgacaactagctcgttgcctttggaaagcacccgtgcatgtgatctgatgaatgaaaacaaagtgatgggtgtaaacgtataaggactttagactggtgccaataaatattacgtatttatgtaaatgcacggatctgatggaatgctgtgatcaacttgaacatatatggtgcccatcaatctgggcattgggcgctgtcgaatgtccggtaaagcgcgctatttccggatcgtccttcatggttgtgtgcgtccgagtaaaggcaatggccgtgcaaaagtttcttcgacgg

SEQ ID NO: 217084 - DNA, 859 bp, Zea Mays
atgacgatacatgcgtctgtgcttagtttacatcgaccgcttacagcaggcagccattgacattgattgatgagcacacatcgatcatgagcatacgccggctggtgcaactactacacgcctacgatctgaacaagtagattagttgccggggacgaagttcgtggcgtatgcccaggcgttgttggcgacggggtcggcgacgtggtcgaagaggttctcgatggggcccttgccggtgacgatggcctgcacgaagaagccgaacatggagaacatggcaaggcggccgttcttgagctccttcaccttgagctcggcggcggtgtccgggtcgtcggcgaggcccagcgggtcgaaggcgccgccggggtacaccttgtcgagcccttccccgagcgggccgccgccgacgcggtagccctcgacgaagcccatgagcaccacctgggccccatcgagaacctcttcgaccacgtcgccgaccccgtcgccaacaacgcctgggcatacgccacgaacttcgtccccggcaactaactgactgagcaacgccgtacatgtgtactaccatcagatccatccattcgttcgtccgtccgtcgagtgaacagtgtggtcttctctgtactctacttgttcagatcgtaggcgtgtagtagttgcaccagccggcgtatgctcatgatcgatgtgtgctcatcaatcaatgtcaatggctgcctgctgtaagcggtcgatgtaaactaagcacagacgcatgtatcgtcatcagtggatgaatcaatctatcgatggcctgtgccattcatttttgaatcgatcaacataatataaacataaaaatttagaattaaaa

SEQ ID NO: 217085 - DNA, 1913 bp, Zea Mays
cgcgtcaattcagctcggcaatccatcatggattcatgttactgctctagaaaggatcaatggtcgatcgatggagtgatgttgatcgattcaaaaatgaatggcacaggccatcgatagattgattcatccactgatgacgatacatgcgtctgtgcttagtttacatcgaccgcttacagcaggcagccattgacattgattgatgagcacacatcgatcatgagcatacgccggctggtgcaactactacacgcctacgatctgaacaagtagattagttgccggggacgaagttcgtggcgtatgcccaggcgttgttggcgacggggtcggcgacgtggtcgaagaggttctcgatggggcccttgccggtgacgatggcctgcacgaagaagccgaacatggagaacatggcaaggcggccgttcttgagctccttcaccttgagctcggcggcggtgtccgggtcgtcggcgaggcccagcgggtcgaaggcgccgccggggtacaccttgtcgagcccttccccgagcgggccgccgccgacgcggtagccctcgacgaagcccatgagcaccacctggcacgcccagatggccaggatgctctgtgcgtgcaccaggttggggttccccaggtagtccagcccgccctccgagaagatctgcgcgccggccttgaaccacaccgcctcgccgaacttgacgccgttcttggccaggatctccgggaacacgcagcccagcgcgcccagcatcgcccaccgggagtggatcacctccagctcccggttgcgcgcgaatgtctccgggtcggccgagaggcccgcggtgtcccacccgtagtcgccggggaactcgccggtcaggtacgacggcgtctgctcggagaacgggccaagatacttggggcgatcaggagcgttccccagagcatatggtacggccctgatcgccccaagtatcttggcccgttctccgagcagacgccgtcgtacctgaccggcgagttccccggcgactacgggtgggacaccgcgggcctctcggccgacccggagacattcgcgcgcaaccgggagctggaggtgatccactcccggtgggcgatgctgggcgcgctgggctgcgtgttcccggagatcctggccaagaacggcgtcaagttcggcgaggcggtgtggttcaaggccggcgcgcagatcttctcggagggcgggctggactacctggggaaccccaacctggtgcacgcacagagcatcctggccatctgggcgtgccaggtggtgctcatgggcttcgtcgagggctaccgcgtcggcggcggcccgctcggggaagggctcgacaaggtgtaccccggcggcgccttcgacccgctgggcctcgccgacgacccggacaccgccgccgagctcaaggtgaaggagctcaagaacggccgccttgccatgttctccatgttcggcttcttcgtgcaggccatcgtcaccggcaagggccccatcgagaacctcttcgaccacgtcgccgaccccgtcgccaacaacgcctgggcatacgccacgaacttcgtccccggcaactaactgactgagcaacgccgtacatgtgtactaccatcagatccatccattcgttcgtccgtccgtcgagtgaacagtgtggtcttctctgtactctacttgttcagatcgtaggcgtgtagtagttgcaccagccggcgtatgctcatgatcgatgtgtgctcatcaatcaatgtcaatggctgcctgctgtaagcggtcgatgtaaactaagcacagacgcatgtatcgtcatcagtggatgaatcaatctatcgatggcctgtgccattcatttttgaatcgatcaacataatataaacataaaaatttagaattaaaa

SEQ ID NO: 217086 - DNA, 2043 bp, Zea Mays
ccctaggaaaccggcagcaaaatgcgcgcgaggcggttccatttctgccaccccatttcgatcgcgttcccagacacagggcgaggccgtggggatcgcgtccgtggaggtgagagcgtagattttgaaatcgctggctccctgcgaaaattcccgatccgtagcaaaactaattcagcgtgttattctctttgtctgtctcgtggttaatgtcgcattttggggattagcttggtcgcagattggtatgtgtagctgatcgatgctctagggggatcctggcgcacttgtctgaatcttgttcatttgtcttgtttgccaatgcgttgatttttcaaccttgtacattggtagattcagtcagtttatatttcctaaaaactgtgtcattttagaaattccttgtgtattcatcccgcttactactttactaggcatggtcgatcaaagtgccgattaattcttgtcatccaacatttttttaaggcgaccatggcaggcacaggcacggtaaaggtccacaacgtctcacttaaagcatcagagcaagatattagtgagttcttctcattttctggtgagattgtgcatgtagaattgaaaagttgtgatgagcggtcacaatttgcctacatcacgttcagagataatcaaggagcagagagggctatgcttcttacgggagcgactatagaagatatggctgtcatcatcacaccagccaccgattacaagctaccggcgtttgttttagctgatctagagtcaaaaaacactggtggcatggaatctgctcttcagaaggctgaggatattgcagtttctatgttagccaaagggtttgttctcggcatggacgccgttgaaaaagcaaaggctttcgatgaaaagcatcagctcacatcaactgcaactgccaaagtcgcttcccttgacaggacaatgggcttaagccagaagttcagcaccgggaccttagtggtgaatgagaaaatgaaggagatggatgagaagtaccaggttgcagagaagaccaagtcagcattagctgcggccgaacagactgtctctactgctagttctgccatcatgagtaacaggtatatccttacaggtgcagcatgggtaactgatgcctacaacaaggttgcaaccactacaactgatgctagcaagtcgataaaggaaaggatgatggctgagcaggagggagccaatcagagcggtgaaaccgcaaaagttgatttgcttgaaatctctgaagcggatgagcaagagtggaagcgccatgaagatgactctgcaaagaacgctgttcaagaaagtcctgaaatgacttgtcaggagagtgagcatcaggcgggtgaacgtcaaatgactaatgtagcaggtaactctaaaacgggtatagaggagcataaaaatcacgagggtgaaatagcagtagtagctcacatgcaagaaaacatggatacagctgagaagaatcctagctgccacgagagtgaagtatccaaggccaatgttcatgatagcgttctaatgacagagcaaagtgagcgagagcataatcaatgcgaaggtgaatttgcaaacagtcatgtcccaggaagccctgtcactattccggtcaccgtgtccactattgacgggaactctagcaacagtcccaagaagcctgattctgctgagggttttctatgatatgttattgtaaatctagattgggggtgatgatgatagttcatttcagctctttctattggatctgtcatccttcttgcataaatagttttgttcagctcttcagctaaatttttcaccctttagtgttgctttcgggcaatagtttattcagctcttgctgttgattttgatatccttcaatgtcgtttctgagcataatagaggttataaagttgtagtagcaacattttattgttctttgaatattatttccatgaagctacaacttgagctgtcttctatatttcttaacacaaattgttttaccatctgtgctggaagtatcatcttagttat

SEQ ID NO: 217087 - DNA, 1736 bp, Zea Mays
cttccttgctccaaccagccctaggaaaccggcagcaaaatgcgcgcgaggcggttccatttctgccaccccatttcgatcgcgttcccagacacagggcgaggccgtggggatcgcgtccgtggaggcatggtcgatcaaagtgccgattaattcttgtcatccaacatttttttaaggcgaccatggcaggcacaggcacggtaaaggtccacaacgtctcacttaaagcatcagagcaagatattagtgagttcttctcattttctggtgagattgtgcatgtagaattgaaaagttgtgatgagcggtcacaatttgcctacatcacgttcagagataatcaaggagcagagagggctatgcttcttacgggagcgactatagaagatatggctgtcatcatcacaccagccaccgattacaagctaccggcgtttgttttagctgatctagagtcaaaaaacactggtggcatggaatctgctcttcagaaggctgaggatattgcagtttctatgttagccaaagggtttgttctcggcatggacgccgttgaaaaagcaaaggctttcgatgaaaagcatcagctcacatcaactgcaactgccaaagtcgcttcccttgacaggacaatgggcttaagccagaagttcagcaccgggaccttagtggtgaatgagaaaatgaaggagatggatgagaagtaccaggttgcagagaagaccaagtcagcattagctgcggccgaacagactgtctctactgctagttctgccatcatgagtaacaggtatatccttacaggtgcagcatgggtaactgatgcctacaacaaggttgcaaccactacaactgatgctagcaagtcgataaaggaaaggatgatggctgagcaggagggagccaatcagagcggtgaaaccgcaaaagttgatttgcttgaaatctctgaagcggatgagcaagagtggaagcgccatgaagatgactctgcaaagaacgctgttcaagaaagtcctgaaatgacttgtcaggagagtgagcatcaggcgggtgaacgtcaaatgactaatgtagcaggtaactctaaaacgggtatagaggagcataaaaatcacgagggtgaaatagcagtagtagctcacatgcaagaaaacatggatacagctgagaagaatcctagctgccacgagagtgaagtatccaaggccaatgttcatgatagcgttctaatgacagagcaaagtgagcgagagcataatcaatgcgaaggtgaatttgcaaacagtcatgtcccaggaagccctgtcactattccggtcaccgtgtccactattgacgggaactctagcaacagtcccaagaagcctgattctgctgagggttttctatgatatgttattgtaaatctagattgggggtgatgatgatagttcatttcagctctttctattggatctgtcatccttcttgcataaatagttttgttcagctcttcagctaaatttttcaccctttagtgttgctttcgggcaatagtttattcagctcttgctgttgattttgatatccttcaatgtcgtttctgagcataatagaggttataaagttgtagtagcaacattttattgttctttgaatattatttccatgaagctacaacttgagctgtcttctatatttcttaacacaaattgttttaccatctgtgctggaagtatcatcttagttat

SEQ ID NO: 217088 - DNA, 1684 bp, Zea Mays
cttccttgctccaaccagccctaggaaaccggcagcaaaatgcgcgcgaggcggttccatttctgccaccccatttcgatcgcgttcccagacacagggcgaggccgtggggatcgcgtccgtggaggcgaccatggcaggcacaggcacggtaaaggtccacaacgtctcacttaaagcatcagagcaagatattagtgagttcttctcattttctggtgagattgtgcatgtagaattgaaaagttgtgatgagcggtcacaatttgcctacatcacgttcagagataatcaaggagcagagagggctatgcttcttacgggagcgactatagaagatatggctgtcatcatcacaccagccaccgattacaagctaccggcgtttgttttagctgatctagagtcaaaaaacactggtggcatggaatctgctcttcagaaggctgaggatattgcagtttctatgttagccaaagggtttgttctcggcatggacgccgttgaaaaagcaaaggctttcgatgaaaagcatcagctcacatcaactgcaactgccaaagtcgcttcccttgacaggacaatgggcttaagccagaagttcagcaccgggaccttagtggtgaatgagaaaatgaaggagatggatgagaagtaccaggttgcagagaagaccaagtcagcattagctgcggccgaacagactgtctctactgctagttctgccatcatgagtaacaggtatatccttacaggtgcagcatgggtaactgatgcctacaacaaggttgcaaccactacaactgatgctagcaagtcgataaaggaaaggatgatggctgagcaggagggagccaatcagagcggtgaaaccgcaaaagttgatttgcttgaaatctctgaagcggatgagcaagagtggaagcgccatgaagatgactctgcaaagaacgctgttcaagaaagtcctgaaatgacttgtcaggagagtgagcatcaggcgggtgaacgtcaaatgactaatgtagcaggtaactctaaaacgggtatagaggagcataaaaatcacgagggtgaaatagcagtagtagctcacatgcaagaaaacatggatacagctgagaagaatcctagctgccacgagagtgaagtatccaaggccaatgttcatgatagcgttctaatgacagagcaaagtgagcgagagcataatcaatgcgaaggtgaatttgcaaacagtcatgtcccaggaagccctgtcactattccggtcaccgtgtccactattgacgggaactctagcaacagtcccaagaagcctgattctgctgagggttttctatgatatgttattgtaaatctagattgggggtgatgatgatagttcatttcagctctttctattggatctgtcatccttcttgcataaatagttttgttcagctcttcagctaaatttttcaccctttagtgttgctttcgggcaatagtttattcagctcttgctgttgattttgatatccttcaatgtcgtttctgagcataatagaggttataaagttgtagtagcaacattttattgttctttgaatattatttccatgaagctacaacttgagctgtcttctatatttcttaacacaaattgttttaccatctgtgctggaagtatcatcttagttat

SEQ ID NO: 217089 - DNA, 1764 bp, Zea Mays
ccgcatccgacgacaacgccatcacgccgtccagctcatcgtccacctgaagcccaacctgccacttccatccatcgccgctcactcccacgatcagcgtcgtcgccagtcggcaccatgggttccgacttcaaatcgatccccttgatcgatatcggcccgcttgtcgaaaagattgatgatccaagcatggccaacgataaggatttactgcaggttgtccggttactggatgatgcttgcaaggaggccggattcttctatgtgaaaggccatggtattgatgagtcactgatgagggaagtcaggaatgtaacccgtgaattctttcagcttccttatgaggaaaaattaaaaattaagatgacacctcaaagtggatatagagggtatcaaaggataggggaaaatattaccaagggtaagcctgatatgcatgaagcaatcgattgttatactcctattagacctggcaaatatggagatctcgctaaaccaatggaaggatctaacttatggccaaaatacccatcaaattttgaagtactgctggaaaattatatcaaattatgtagagacatttcaagaaagataatgcgaggtatagccttggctttgggaggggcaattgatgcttttgaaggggatacagctggagatcctttctgggtgttaaggttgattggttatcccgtagatattccagaagagcagcgcactgatactggctgtggagctcatacagattatggttagtagatctctccaaagaatttctattgagaaaaaaaaattccatatgtgaaactgtggatgacggacttctaacactggttaaccaggatgatgacatatgtgcccttgaggtgcaaaatcgttctggtgagtggatatatgcaacgccgattcccggaacctttgtttgtaacatcggtgacatgctgaaggtttggacaaatggaatatatcagcccacccttcacagagttgtcaacaattcccagcattaccgtgtatctgttgcattcttctacgagtccaacttcgatgctgcagtagagcctgttgagttctgccgggagaaaaccggcggtgctgctaagtacgaaaaggttgtgtacggggagcatttggttcagaaagtattgacgaacttcgtcatgtaaatttgctaagtacgacaaataaatctgcattgcagcatcagaactccagacctatttggtgtgtagtgctgtaccagaaaggtagtaacggactaaagcatgcgcccgtctctgaaatttgaccttaacaagagtcgcagacttgcagtgcaggtgatatcacaaggaaatcggggggagatttgttctctctgctgcacggagttgtcgacaaccctgtcgctgaaatctgaatttagcatcagacaactggagatgctacgagtccgtctctgaaatctgaatttagcatcaggcgcgaaattgcctccatttcttcgccaaaccatctaatgatggaagctttgtagctggcaaggccatctcgtgtgacgccgcagccagacgatgccagcgtagcaagttacctaccattagcactggttaactagctagccatactagtgaattactctattccgatcaaatgttggagaattcttttctcatagatactttgatgaaaagaattggtaccaggaaggctatgttcggttctaccacaattcatatgtatcgagcgagtttcaatccctagtaagttaaaatctctcctaat

SEQ ID NO: 217090 - DNA, 1521 bp, Zea Mays
ccgcatccgacgacaacgccatcacgccgtccagctcatcgtccacctgaagcccaacctgccacttccatccatcgccgctcactcccacgatcagcgtcgtcgccagtcggcaccatgggttccgacttcaaatcgatccccttgatcgaaaggccatggtattgatgagtcactgatgagggaagtcaggaatgtaacccgtgaattctttcagcttccttatgaggaaaaattaaaaattaagatgacacctcaaagtggatatagagggtatcaaaggataggggaaaatattaccaagggtaagcctgatatgcatgaagcaatcgattgttatactcctattagacctggcaaatatggagatctcgctaaaccaatggaaggatctaacttatgacatttcaagaaagataatgcgaggtatagccttggctttgggaggggcaattgatgcttttgaaggggatacagctggagatcctttctgggtgttaaggttgattggttatcccgtagatattccagaagagcagcgcactgatactggctgtggagctcatacagattatggacttctaacactggttaaccaggatgatgacatatgtgcccttgaggtgcaaaatcgttctggtgagtggatatatgcaacgccgattcccggaacctttgtttgtaacatcggtgacatgctgaaggtttggacaaatggaatatatcagcccacccttcacagagttgtcaacaattcccagcattaccgtgtatctgttgcattcttctacgagtccaacttcgatgctgcagtagagcctgttgagttctgccgggagaaaaccggcggtgctgctaagtacgaaaaggttgtgtacggggagcatttggttcagaaagtattgacgaacttcgtcatgtaaatttgctaagtacgacaaataaatctgcattgcagcatcagaactccagacctatttggtgtgtagtgctgtaccagaaaggtagtaacggactaaagcatgcgcccgtctctgaaatttgaccttaacaagagtcgcagacttgcagtgcaggtgatatcacaaggaaatcggggggagatttgttctctctgctgcacggagttgtcgacaaccctgtcgctgaaatctgaatttagcatcagacaactggagatgctacgagtccgtctctgaaatctgaatttagcatcaggcgcgaaattgcctccatttcttcgccaaaccatctaatgatggaagctttgtagctggcaaggccatctcgtgtgacgccgcagccagacgatgccagcgtagcaagttacctaccattagcactggttaactagctagccatactagtgaattactctattccgatcaaatgttggagaattcttttctcatagatactttgatgaaaagaattggtaccaggaaggctatgttcggttctaccacaattcatatgtatcgagcgagtttcaatccctagtaagttaaaatctctcctaat

SEQ ID NO: 217091 - DNA, 1637 bp, Zea Mays
ccgcatccgacgacaacgccatcacgccgtccagctcatcgtccacctgaagcccaacctgccacttccatccatcgccgctcactcccacgatcagcgtcgtcgccagtcggcaccatgggttccgacttcaaatcgatccccttgatcgatatcggcccgcttgtcgaaaagattgatgatccaagcatggccaacgataaggatttactgcaggttgtccggttactggatgatgcttgcaaggaggccggattcttctatgtgaaaggccatggtattgatgagtcactgatgagggaagtcaggaatgtaacccgtgaattctttcagcttccttatgaggaaaaattaaaaattaagatgacacctcaaagtggatatagagggtatcaaaggataggggaaaatattaccaagggtaagcctgatatgcatgaagcaatcgattgttatactcctattagacctggcaaatatggagatctcgctaaaccaatggaaggatctaacttatgacatttcaagaaagataatgcgaggtatagccttggctttgggaggggcaattgatgcttttgaaggggatacagctggagatcctttctgggtgttaaggttgattggttatcccgtagatattccagaagagcagcgcactgatactggctgtggagctcatacagattatggacttctaacactggttaaccaggatgatgacatatgtgcccttgaggtgcaaaatcgttctggtgagtggatatatgcaacgccgattcccggaacctttgtttgtaacatcggtgacatgctgaaggtttggacaaatggaatatatcagcccacccttcacagagttgtcaacaattcccagcattaccgtgtatctgttgcattcttctacgagtccaacttcgatgctgcagtagagcctgttgagttctgccgggagaaaaccggcggtgctgctaagtacgaaaaggttgtgtacggggagcatttggttcagaaagtattgacgaacttcgtcatgtaaatttgctaagtacgacaaataaatctgcattgcagcatcagaactccagacctatttggtgtgtagtgctgtaccagaaaggtagtaacggactaaagcatgcgcccgtctctgaaatttgaccttaacaagagtcgcagacttgcagtgcaggtgatatcacaaggaaatcggggggagatttgttctctctgctgcacggagttgtcgacaaccctgtcgctgaaatctgaatttagcatcagacaactggagatgctacgagtccgtctctgaaatctgaatttagcatcaggcgcgaaattgcctccatttcttcgccaaaccatctaatgatggaagctttgtagctggcaaggccatctcgtgtgacgccgcagccagacgatgccagcgtagcaagttacctaccattagcactggttaactagctagccatactagtgaattactctattccgatcaaatgttggagaattcttttctcatagatactttgatgaaaagaattggtaccaggaaggctatgttcggttctaccacaattcatatgtatcgagcgagtttcaatccctagtaagttaaaatctctcctaat

SEQ ID NO: 217092 - DNA, 1777 bp, Zea Mays
ccgcatccgacgacaacgccatcacgccgtccagctcatcgtccacctgaagcccaacctgccacttccatccatcgccgctcactcccacgatcagcgtcgtcgccagtcggcaccatgggttccgacttcaaatcgatccccttgatcggtacgtctcccttaattaattcttcaattgatcccatttgctctctggatgtgatttctcccttcaaagattcagattcagatatcggcccgcttgtcgaaaagattgatgatccaagcatggccaacgataaggatttactgcaggttgtccggttactggatgatgcttgcaaggaggccggattcttctatgtgaaaggccatggtattgatgagtcactgatgagggaagtcaggaatgtaacccgtgaattctttcagcttccttatgaggaaaaattaaaaattaagatgacacctcaaagtggatatagagggtatcaaaggataggggaaaatattaccaagggtaagcctgatatgcatgaagcaatcgattgttatactcctattagacctggcaaatatggagatctcgctaaaccaatggaaggatctaacttatggccaaaatacccatcaaattttgaagtactgctggaaaattatatcaaattatgtagagacatttcaagaaagataatgcgaggtatagccttggctttgggaggggcaattgatgcttttgaaggggatacagctggagatcctttctgggtgttaaggttgattggttatcccgtagatattccagaagagcagcgcactgatactggctgtggagctcatacagattatggacttctaacactggttaaccaggatgatgacatatgtgcccttgaggtgcaaaatcgttctggtgagtggatatatgcaacgccgattcccggaacctttgtttgtaacatcggtgacatgctgaaggtttggacaaatggaatatatcagcccacccttcacagagttgtcaacaattcccagcattaccgtgtatctgttgcattcttctacgagtccaacttcgatgctgcagtagagcctgttgagttctgccgggagaaaaccggcggtgctgctaagtacgaaaaggttgtgtacggggagcatttggttcagaaagtattgacgaacttcgtcatgtaaatttgctaagtacgacaaataaatctgcattgcagcatcagaactccagacctatttggtgtgtagtgctgtaccagaaaggtagtaacggactaaagcatgcgcccgtctctgaaatttgaccttaacaagagtcgcagacttgcagtgcaggtgatatcacaaggaaatcggggggagatttgttctctctgctgcacggagttgtcgacaaccctgtcgctgaaatctgaatttagcatcagacaactggagatgctacgagtccgtctctgaaatctgaatttagcatcaggcgcgaaattgcctccatttcttcgccaaaccatctaatgatggaagctttgtagctggcaaggccatctcgtgtgacgccgcagccagacgatgccagcgtagcaagttacctaccattagcactggttaactagctagccatactagtgaattactctattccgatcaaatgttggagaattcttttctcatagatactttgatgaaaagaattggtaccaggaaggctatgttcggttctaccacaattcatatgtatcgagcgagtttcaatccctagtaagttaaaatctctcctaat

SEQ ID NO: 217093 - DNA, 3424 bp, Zea Mays
gtgagctgcgagcctgcgacaagtcggacaaaaagaaggcgtccagccgaggagaccaccaaccacttcgagaagctcctccaagccccatgtccgaaccatcagcatccggtccgacacacctgtagggattatgggttacttagaaaatttctaagttctaagcaaggagataggacatgagccccgtaaaaacagaaagccaaggggaaggggaccgctttccttgccgatattggctgctcgctgatctttgagggccgcgattaccgcacctcgaggaggcgaggtgaggcgtaaaaaactcaaacaacgtaaggtgttcgacacccggtcagcggcctcgacctctttcggtcgatccaactacaccattgcgctgaatcaatctgcccgctccgagcgcattctctggccgagccaatgcccgcctatcatcgaccccaccaaatgattggtgattttattttttttggcgacatctatactacagattgaaaattattgattttctcaaataccgaggcattcagttctggaatttggtttgacgtcgacatgcttctacgcagacagcagcagagcataggatcgattcctagcttacgttggaattgctatgcgtgagatattttttcgaggcagtcttttgggcgacagcgatttgattgaagtgcagatgagaacaaatgtacggagagaactgcctgagttaccttttacgcagcagggcgtccccactcccccacggcgttatgccgcgcccaccacctgttcggcaaaatggctagttggggatttcaatgggacactctgacattagcttctgccatcagaaggcggtgagatctcacagtacgtctgtggagctgtgcattacttccacatggccttgttctgatcatggtggattcgggctatccattttgaagaggacactcatgtagtttctgctactcgagcaagaaggcgaggagatcttgcaaggatgggaggcttgaaagttggggggagatatgataagaacaaggctacagaggatcgaatagcttgtcttgttgattaaacactgtgactttagcaaagaatttgtgcactgttttcctttttctgcaggcagttgatgggtgcggagcagggaggcacgcgggcgactattctatgttgcaccaccacagggaggccaccatatgcggcgagcatccgcggcttgtgaatccacacacctttattctgaattgaccggaaaatatcacaaaggaagtacatcagctgcaattatcacagacagtagctctgtggtagggtccatgggattgtcttgcagaggaaacatcaaagttgttttaggtgttctcaatctctggaaagtctggttacacaggaaatgatgttcttcaagagcttgaaatactgactataaatgccaaagcagcacaagaggttatattgagtaaaattcttgagaagaatcaggctactgaatacctgaacaaattcatgaatgggtccgtagacatttctgccttcaagagccaggttccagtagtgacgtatgatgtggtccaaccctacattgcaaggattgccgctggtgaaaggtcttcaattttgtgtggagaacaaattgtagagctgctccgaagctcgggaacttctcagggtgaaccaagattgatgccatcaatctcagaggatatttaccgccgaatgtatctgtatagtctgatcatgcctatcatgagcaagtacatacgaggccttggcgaggggaaggcaatgtatcttctctttgtgaaagctgaaacattgacaaatgctggcattccagtccgatcagtcctcaccagctactacaagagccctcagttcttgcagcgcaagcacgacctctacaacagctacaccagtcccgacgaggtcattctttgccccgacagccagcagagcatgtactgccagctactctgcggcctggtggaacgccagaacgtcgtccgtctcggagcagtcttcgcctcagcattcctccggtccatcagcttcctcgagaagcactggcatgacctagtcaccgacatccgaaccggccggatcaatcccagcatcaccaacgccgcatgccgggtggccacggagagctttctcgcgcagcccaaccccgagctagctgacgaagtcgaggcgatatgcagctcggagtcatggaagggcgttcttggcaggctctggcctaacgtcaagtacatcgaggccgtcctgacggggacgatggcgcagtacgtccccatgctcgagttctacagcgacggcaggatccccctggtctgcaccatgtacgcttcctcggagagctacttcggcgtcaacctgcggccgctgtgcagcccgaaggacgtgtcctacaccatcctccccaacatggcctacttcgagttcgtgccgttggacgacggcctcaggctggcggaggatggtgaggctgtggagaaggagaagcttgtcggcctcgtggacgtcaaggtcggatgctactacgagctcgtggttaccacatttgccggtctttacaggtacagggtaggcgatgtactccaggtgacaggcttctacaaccgcgcaccccagttcaaattcatctgccggaggaacgtgatcctgagcgtggacgcagacaagacgaacgaggaagacctccacggcagcgtctcccgggccaagaagatcctggaggaccgaggccacatcctactggagtacaccagcttcaccgacacgtcgacggtgccgggccactacgtcctgttctgggaggtgaaggccacgcccacctccggctccgggggcgcgcggctggacgcgcaggtcctggagagctgctgcgtcgccgtggaggagtcgctggactgcgtgtacaggcggtgcagggcgcacgacaggtccgtggggccgctggagatacggctggtggaagccggcgccttcgacgcgctcatggacctgttggtcagccagggcggctccatcaaccagtacaagacgccacggtgcatcgagccgggcggcgccgcgctggagctgctcgactccaaggccaccgcctcgttcttcagcccccgggatcctgaagctactggtgtctgaggttgttctgctactctgaaactaatcctctgctggatctaaataatctgagaattttcgtctgggttatccccgtttacattgcacttttgtcaggctttgctactatgcaaagaagccttttttctttatttgagattgtgatcatcaattgtctatcacttgacgacttttgtgtgtgtgattgacggagcgcatggattatataacaataaaataaagtaaagagagaggccacgcatgcttttccgaaagcatcagtggtgagtgagctttcaac

SEQ ID NO: 217094 - DNA, 3384 bp, Zea Mays
gtgagctgcgagcctgcgacaagtcggacaaaaagaaggcgtccagccgaggagaccaccaaccacttcgagaagctcctccaagccccatgtccgaaccatcagcatccggtccgacacacctgtagggattatgggttacttagaaaatttctaagttctaagcaaggagataggacatgagccccgtaaaaacagaaagccaaggggaaggggaccgctttccttgccgatattggctgctcgctgatctttgagggccgcgattaccgcacctcgaggaggcgaggtgaggcgtaaaaaactcaaacaacgtaaggtgttcgacacccggtcagcggcctcgacctctttcggtcgatccaactacaccattgcgctgaatcaatctgcccgctccgagcgcattctctggccgagccaatgcccgcctatcatcgaccccaccaaatgattgaaaattattgattttctcaaataccgaggcattcagttctggaatttggtttgacgtcgacatgcttctacgcagacagcagcagagcataggatcgattcctagcttacgttggaattgctatgcgtgagatattttttcgaggcagtcttttgggcgacagcgatttgattgaagtgcagatgagaacaaatgtacggagagaactgcctgagttaccttttacgcagcagggcgtccccactcccccacggcgttatgccgcgcccaccacctgttcggcaaaatggctagttggggatttcaatgggacactctgacattagcttctgccatcagaaggcggtgagatctcacagtacgtctgtggagctgtgcattacttccacatggccttgttctgatcatggtggattcgggctatccattttgaagaggacactcatgtagtttctgctactcgagcaagaaggcgaggagatcttgcaaggatgggaggcttgaaagttggggggagatatgataagaacaaggctacagaggatcgaatagcttgtcttgttgattaaacactgtgactttagcaaagaatttgtgcactgttttcctttttctgcaggcagttgatgggtgcggagcagggaggcacgcgggcgactattctatgttgcaccaccacagggaggccaccatatgcggcgagcatccgcggcttgtgaatccacacacctttattctgaattgaccggaaaatatcacaaaggaagtacatcagctgcaattatcacagacagtagctctgtggtagggtccatgggattgtcttgcagaggaaacatcaaagttgttttaggtgttctcaatctctggaaagtctggttacacaggaaatgatgttcttcaagagcttgaaatactgactataaatgccaaagcagcacaagaggttatattgagtaaaattcttgagaagaatcaggctactgaatacctgaacaaattcatgaatgggtccgtagacatttctgccttcaagagccaggttccagtagtgacgtatgatgtggtccaaccctacattgcaaggattgccgctggtgaaaggtcttcaattttgtgtggagaacaaattgtagagctgctccgaagctcgggaacttctcagggtgaaccaagattgatgccatcaatctcagaggatatttaccgccgaatgtatctgtatagtctgatcatgcctatcatgagcaagtacatacgaggccttggcgaggggaaggcaatgtatcttctctttgtgaaagctgaaacattgacaaatgctggcattccagtccgatcagtcctcaccagctactacaagagccctcagttcttgcagcgcaagcacgacctctacaacagctacaccagtcccgacgaggtcattctttgccccgacagccagcagagcatgtactgccagctactctgcggcctggtggaacgccagaacgtcgtccgtctcggagcagtcttcgcctcagcattcctccggtccatcagcttcctcgagaagcactggcatgacctagtcaccgacatccgaaccggccggatcaatcccagcatcaccaacgccgcatgccgggtggccacggagagctttctcgcgcagcccaaccccgagctagctgacgaagtcgaggcgatatgcagctcggagtcatggaagggcgttcttggcaggctctggcctaacgtcaagtacatcgaggccgtcctgacggggacgatggcgcagtacgtccccatgctcgagttctacagcgacggcaggatccccctggtctgcaccatgtacgcttcctcggagagctacttcggcgtcaacctgcggccgctgtgcagcccgaaggacgtgtcctacaccatcctccccaacatggcctacttcgagttcgtgccgttggacgacggcctcaggctggcggaggatggtgaggctgtggagaaggagaagcttgtcggcctcgtggacgtcaaggtcggatgctactacgagctcgtggttaccacatttgccggtctttacaggtacagggtaggcgatgtactccaggtgacaggcttctacaaccgcgcaccccagttcaaattcatctgccggaggaacgtgatcctgagcgtggacgcagacaagacgaacgaggaagacctccacggcagcgtctcccgggccaagaagatcctggaggaccgaggccacatcctactggagtacaccagcttcaccgacacgtcgacggtgccgggccactacgtcctgttctgggaggtgaaggccacgcccacctccggctccgggggcgcgcggctggacgcgcaggtcctggagagctgctgcgtcgccgtggaggagtcgctggactgcgtgtacaggcggtgcagggcgcacgacaggtccgtggggccgctggagatacggctggtggaagccggcgccttcgacgcgctcatggacctgttggtcagccagggcggctccatcaaccagtacaagacgccacggtgcatcgagccgggcggcgccgcgctggagctgctcgactccaaggccaccgcctcgttcttcagcccccgggatcctgaagctactggtgtctgaggttgttctgctactctgaaactaatcctctgctggatctaaataatctgagaattttcgtctgggttatccccgtttacattgcacttttgtcaggctttgctactatgcaaagaagccttttttctttatttgagattgtgatcatcaattgtctatcacttgacgacttttgtgtgtgtgattgacggagcgcatggattatataacaataaaataaagtaaagagagaggccacgcatgcttttccgaaagcatcagtggtgagtgagctttcaac

SEQ ID NO: 217095 - DNA, 1119 bp, Zea Mays
atttcaatgtggcgtaacatttccaagagcaaaggaatactatcttgacacaaattgcatctattagagaggttgtgttgggtgcaccactgaagctcctgctgaaacatttagcctcaaagacagttgcacctaatgttaacaaccttgttgctcttgttcaccgccctaatgaatcatttttccttgctccccagataaagttactattgtgtatccaatgagattccaggactccattgatattgttttagcaacttccttcctgcaggaatttgtggaggcaagacgaacagctgcacttaataatgttccttcttgtatgtggtctccggtaccacctcttgagttaaaaggagtatctgctgatgcactaaatgcaaatgctggctttgttactttcgttgtttaccctcggcatgttgagggtaaaaagctagatagaacagtttggaatttgttgacatttcatgcttatgtaagctatcatgtaaagtgttctgaaggattcatgcataccaggatgaggcgcagggttgagtcgctgatccaggcgttggaccgggcgaagtctgatgctgagaagttgaagaagttggtacacggtggatctttcaaaagactgagcctgaagaacgagggggactcgcgtttctgaagggaattggcaaatgttgttgttttccatttggctaatgacttctgttgtgggaagcttacttccgttcagttttgggagcgaaggctcggaaccggttaaatccatgccattgaattttaatgtaaattcgcgttgcttttacatatttactagcctgaaatctctcggcgtatcagttccatgacacatcgcctttgcaaccggagagcctgctgcctgcatcttggtgcaagtagtttgtttttgccatgagatgtctgagtctgatcttttttggcattaataaatgtgttgttcttggatcacatgatgtagtagggagttgaggcttggttgaatcacatgaccactcacggtcacggtacagcatcggctgagttatgtcgagcagccgcattcatttttttataagcttgatggtgtattgttttataagcttcggctgagttacgctcgaa

SEQ ID NO: 217096 - DNA, 1578 bp, Zea Mays
gacgagagcagcagagcgccaccacgcagcacgcacggacgccatcgaggaaccctagaccagagcacatcacacggccggcgactggcgccccctcttcggtccccagcgcggcgacgccctcctgcttgagcagcactgcaagatgatactgctccagtccccatcgaggttcctgctccagatcctgcaagaccgtgttctcagtggcgagaagggcatggacattgactgtcacacggtagagttcgatgatgtccggtatcatatccagttttctatgaggaatccaaaggtaatggtgttgtcagttgctttgcctctgccacctcctgaagcgattctgtatgatgggctaccactaggtgccattgaagctataaaagcagcatatgggccagttgtgcagattcttgatcctccaaaggacgggtttgatctcacaatgaagataaatttgacaaaacttccgctagatgaagagcaaaggaatactatcttgacacaaattgcatctattagagaggttgtgttgggtgcaccactgaagctcctgctgaaacatttagcctcaaagacagttgcacctaatgttaacaaccttgttgctcttgttcaccgccctaatgaatcatttttccttgctccccaggcagataaagttactattgtgtatccaatgagattccaggactccattgatattgttttagcaacttccttcctgcaggaatttgtggaggcaagacgaacagctgcacttaataatgttccttcttgtatgtggtctccggtaccacctcttgagttaaaaggagtatctgctgatgcactaaatgcaaatgctggctttgttactttcgttgtttaccctcggcatgttgagggtaaaaagctagatagaacagtttggaatttgttgacatttcatgcttatgtaagctatcatgtaaagtgttctgaaggattcatgcataccaggatgaggcgcagggttgagtcgctgatccaggcgttggaccgggcgaagtctgatgctgagaagttgaagaagttggtacacggtggatctttcaaaagactgagcctgaagaacgagggggactcgcgtttctgaagggaattggcaaatgttgttgttttccatttggctaatgacttctgttgtgggaagcttacttccgttcagttttgggagcgaaggctcggaaccggttaaatccatgccattgaattttaatgtaaattcgcgttgcttttacatatttactagcctgaaatctctcggcgtatcagttccatgacacatcgcctttgcaaccggagagcctgctgcctgcatcttggtgcaagtagtttgtttttgccatgagatgtctgagtctgatcttttttggcattaataaatgtgttgttcttggatcacatgatgtagtagggagttgaggcttggttgaatcacatgaccactcacggtcacggtacagcatcggctgagttatgtcgagcagccgcattcatttttttataagcttgatggtgtattgttttataagcttcggctgagttacgctcgaa

SEQ ID NO: 217097 - DNA, 4071 bp, Zea Mays
ctttgctgtctcatacctgtcttaaaccctagctagtttctaggaccttcccacgccctgcgcccctttgctgtctcaaacctaccttaaacccttgttagtttctagaaccttccagacctccagttcccgacctcggcgccatggacctggacccagaggggatcttccgcgacgacagcgatgaagacgaagacagtgtccaggagagggaggcgaacaaggagatggttgtctaccttgtcgacgcctcgcccaaaatgttcacccctgccaccacccaggacaatgaaaagcaggagacacatttccataccattgttaactgcatcacagagtctctgaagacacaaattattggtagatcttatgatgaagtcgcaatatgtttctttaacactaaagagaagaagaatttacaggactcagccggtgtttatgtttataatgtcggagacagagagcaacttgatagacctactgcaaaactcatcaaggatttttctttgatagaagattcttttatgagcaccattggaagtcgatatggaataacagctggatctcgggagaataccctgtataatgctctttgggttgctcaggcgctgttgcgcaagggatctgtgaagaccgtgagtaaacgaattcttatattcaccaatgaagatgatccttttggtactattacaggagcagtgaaaactgatatgattaggacaacacttcaacgtgcaaaggatgcacaagatcttggcctgtctattgaacttcttccactgagcccgcctgatgaccagttcaacatgtccctgttttatgcagatttgattggtctggatggagatgagatgaccgaatatttgccatctgctggtgataagcacatatattagtatccagtgggacgagactgggaatagctaagccacatgaatacatgattttggagctgaagtttatcagtgatctgattgaatacgtaaggctaattctcgctgagataagaggcgttgagaggtctttcatatgcaatgatactggggctctacttcaggatgcacagacacgtttccagatgtacaatgacacaattgtcaaattttctgtacgtgaactctctgaggttaaaagggttgcaagccatcatcttcgccttataggtttcaagccattggattgcttgaaagattaccataacttaagaccatcgacatttatttatccgagtgatgagcgtatatttggaagcacctgtgttttcgttgctttacatagctcaatgttacgtcttggaaggttaggcactattattgtcacatcagcctttttcacaaatgtataaggaaaatatcctgaatcaggaaaactaaatactctggatgtggataaagctgtcctgaatcatcttagtgcattgtaaattgttattatgcttttatatgacatttttgcagtagctttgaatcatgcaatagcaatacacacagtaaaacatatcacatcaccacccctttgtctcgctcgaagtcaaggaactcttaggtgggcaaggtaaggtagccaaactttatgctagaccagtagagggcttgaggcaagagagccaaacatggcaaggtgatccataactaaataaacttacttaaacaatcatctatgtaaaatatagcatgtgtatggtttcaggtttgcacttgcattttatgggaatccaactcgaccacaactcatagcccttgttgctcaagaagaggttacttcgtctggtcgtcagtttgaaccgcctggcatgcacatgatctatcttccatactccgatgatattagatatcctgaagaagtaaggactaacgttgtatttcaactttacgatctctgtaagctaattttcttgcttggtttgcaggttcatgtgacttctgatgatgcaccgcgtgcaacagatgaacaaatcaagaaagcttcgaacatattcaaacgtattgatctgataaatttctctgcatgccaatttgctaacccagctttgcaaagacactatgggatcttggaggccttagctttaggcgaagatgagatgcctgatataaaggatgagaccctgcctgacgaagaaggcttgtctaagccaggggtagccaatgctattgaggaattcaagacttcagtctatggtgaaaattatgaccaagaggaggcagaagcggcagcagggaaagcttcccgtggtaatgcttcaaaaaagcggaaggaggtcactgatgcagctgcgcagataagtgctgcttatgattgggcagaacttgcagacaatggaaaactgaaggaaatgaccacggtggaattgagatcctacctgaccgcgcatgatctcccggtttctggtaagaaagatgtacttatcagcaggatcttgactcacctgggttttatgctcagggtactgttgcatgctgcgaaatggctttggcttcaaatgagcttggagacaggagaagctgatgaagtcatgtgttgggcaatccttgtcatctatagggtgacttcctgggctttaggtactcgctttcgcttccaaccagcgcgtcctcagccagcgctggaggccgcccagccgcgcctgcgaccgcagaccgcgcgtcctcactcagccagcgctggagatctcctgtccgcccagccgcgcctgcgacagtgcgaccgccctcctgcccccagcactgcaagatgatactgctccagtccccatcgaggttcctgctccagatcctgcaagaccgtgttctcagtggcgagaagggcatggacattgactgtcacacggtagagttcgatgatgtccggtatcatatccagttttctatgaggaatccaaagattcttgatcctccaaaggacgggtttgatctcacaatgaagataaatttgacaaaacttccgctagatgaaggttctagagttcccttctcaagagcaaaggaatactatcttgacacaaattgcatctattagagaggttgtgttgggtgcaccactgaagctcctgctgaaacatttagcctcaaagacagttgcacctaatgttaacaaccttgttgctcttgttcaccgccctaatgaatcatttttccttgctccccaggcagataaagttactattgtgtatccaatgagattccaggactccattgatattgttttagcaacttccttcctgcaggaatttgtggaggcaagacgaacagctgcacttaataatgttccttcttgtatgtggtctccggtaccacctcttgagttaaaaggagtatctgctgatgcactaaatgcaaatgctggctttgttactttcgttgtttaccctcggcatgttgagggtaaaaagctagatagaacagtttggaatttgttgacatttcatgcttatgtaagctatcatgtaaagtgttctgaaggattcatgcataccaggatgaggcgcagggttgagtcgctgatccaggcgttggaccgggcgaagtctgatgctgagaagttgaagaagttggtacacggtggatctttcaaaagactgagcctgaagaacgagggggactcgcgtttctgaagggaattggcaaatgttgttgttttccatttggctaatgacttctgttgtgggaagcttacttccgttcagttttgggagcgaaggctcggaaccggttaaatccatgccattgaattttaatgtaaattcgcgttgcttttacatatttactagcctgaaatctctcggcgtatcagttccatgacacatcgcctttgcaaccggagagcctgctgcctgcatcttggtgcaagtagtttgtttttgccatgagatgtctgagtctgatcttttttggcattaataaatgtgttgttcttggatcacatgatgtagtagggagttgaggcttggttgaatcacatgaccactcacggtcacggtacagcatcggctgagttatgtcgagcagccgcattcatttttttataagcttgatggtgtattgttttataagcttcggctgagttacgctcgaa

SEQ ID NO: 217098 - DNA, 3842 bp, Zea Mays
gtttcccacaaaaaaaacggcgccacggtagcgagtttctagaaccttcccacgccctgcgcccctttgctgtctcatacctgtcttaaaccctagctagtttctaggaccttcccacgccctgcgcccctttgctgtctcaaacctaccttaaacccttgttagtttctagaaccttccagacctccagttcccgacctcggcgccatggacctggacccagaggggatcttccgcgacgacagcgatgaagacgaagacagtgtccaggagagggaggcgaacaaggagatggttgtctaccttgtcgacgcctcgcccaaaatgttcacccctgccaccacccaggacaatgaaaagcaggagacacatttccataccattgttaactgcatcacagagtctctgaagacacaaattattggtagatcttatgatgaagtcgcaatatgtttctttaacactaaagagaagaagaatttacaggactcagccggtgtttatgtttataatgtcggagacagagagcaacttgatagacctactgcaaaactcatcaaggatttttctttgatagaagattcttttatgagcaccattggaagtcgatatggaataacagctggatctcgggagaataccctgtataatgctctttgggttgctcaggcgctgttgcgcaagggatctgtgaagaccgtgagtaaacgaattcttatattcaccaatgaagatgatccttttggtactattacaggagcagtgaaaactgatatgattaggacaacacttcaacgtgcaaaggatgcacaagatcttggcctgtctattgaacttcttccactgagcccgcctgatgaccagttcaacatgtccctgttttatgcagatttgattggtctggatggagatgagatgaccgaatatttgccatctgctggtgataagctagaggatatgactaatcaactgagaaaacggataatgaagaagcgcagaatcaaaactctttcatttgcgattaccaatgatgtgtgcatagaagtcaatacatatgcgctggtccgtcctactactacagggacaatcacatggcttgattcactaagtaacctcccattaaaggttgagaggtctttcatatgcaatgatactggggctctacttcaggatgcacagacacgtttccagatgtacaatgacacaattgtcaaattttctgtacgtgaactctctgaggttaaaagggttgcaagccatcatcttcgccttataggtttcaagccattggattgcttgaaagattaccataacttaagaccatcgacatttatttatccgagtgatgagcgtatatttggaagcacctgtgttttcgttgctttacatagctcaatgttacgtcttggaaggtttgcacttgcattttatgggaatccaactcgaccacaactcatagcccttgttgctcaagaagaggttacttcgtctggtcgtcagtttgaaccgcctggcatgcacatgatctatcttccatactccgatgatattagatatcctgaagaagttcatgtgacttctgatgatgcaccgcgtgcaacagatgaacaaatcaagaaagcttcgaacatattcaaacgtattgatctgataaatttctctgcatgccaatttgctaacccagctttgcaaagacactatgggatcttggaggccttagctttaggcgaagatgagatgcctgatataaaggatgagaccctgcctgacgaagaaggcttgtctaagccaggggtagccaatgctattgaggaattcaagacttcagtctatggtgaaaattatgaccaagaggaggcagaagcggcagcagggaaagcttcccgtggtaatgcttcaaaaaagcggaaggaggtcactgatgcagctgcgcagataagtgctgcttatgattgggcagaacttgcagacaatggaaaactgaaggaaatgaccacggtggaattgagatcctacctgaccgcgcatgatctcccggtttctggtaagaaagatgtacttatcagcaggatcttgactcacctgggttttatgctcagggtactgttgcatgctgcgaaatggctttggcttcaaatgagcttggagacaggagaagctgatgaagtcatgtgttgggcaatccttgtcatctatagggtgacttcctgggctttaggtactcgctttcgcttccaaccagcgcgtcctcagccagcgctggaggccgcccagccgcgcctgcgaccgcagaccgcgcgtcctcactcagccagcgctggagatctcctgtccgcccagccgcgcctgcgacagtgcgaccgccctcctgcccccagcactgcaagatgatactgctccagtccccatcgaggttcctgctccagatcctgcaagaccgtgttctcagtggcgagaagggcatggacattgactgtcacacggtagagttcgatgatgtccggtatcatatccagttttctatgaggaatccaaaggtaatggtgttgtcagttgctttgcctctgccacctcctgaagcgattctgtatgatgggctaccactaggtgccattgaagctataaaagcagcatatgggccagttgtgcagattcttgatcctccaaaggacgggtttgatctcacaatgaagataaatttgacaaaacttccgctagatgaaggttctagagttcccttctcaagagcaaaggaatactatcttgacacaaattgcatctattagagaggttgtgttgggtgcaccactgaagctcctgctgaaacatttagcctcaaagacagttgcacctaatgttaacaaccttgttgctcttgttcaccgccctaatgaatcatttttccttgctccccaggcagataaagttactattgtgtatccaatgagattccaggactccattgatattgttttagcaacttccttcctgcaggaatttgtggaggcaagacgaacagctgcacttaataatgttccttcttgtatgtggtctccggtaccacctcttgagttaaaaggagtatctgctgatgcactaaatgcaaatgctggctttgttactttcgttgtttaccctcggcatgttgagggtaaaaagctagatagaacagtttggaatttgttgacatttcatgcttatgtaagctatcatgtaaagtgttctgaaggattcatgcataccaggatgaggcgcagggttgagtcgctgatccaggcgttggaccgggcgaagtctgatgctgagaagttgaagaagttggtacacggtggatctttcaaaagactgagcctgaagaacgagggggactcgcgtttctgaagggaattggcaaatgttgttgttttccatttggctaatgacttctgttgtgggaagcttacttccgttcagttttgggagcgaaggctcggaaccggttaaatccatgccattgaattttaatgtaaattcgcgttgcttttacatatttactagcctgaaatctctcggcgtatcagttccatgacacatcgcctttgcaaccggagagcctgctgcctgcatcttggtgcaagtagtttgtttttgccatgagatgtctgagtctgatcttttttggcattaataaatgtgttgttcttggatcacatgatgtagtagggagttgaggcttggttgaatcacatgaccactcacggtcacggtacagcatcggctgagttatgtcgagcagccgcattcatttttttataagcttgatggtgtattgttttataagcttcggctgagttacgctcgaa

SEQ ID NO: 217099 - DNA, 4294 bp, Zea Mays
gtttcccacaaaaaaaacggcgccacggtagcgagtttctagaaccttcccacgccctgcgcccctttgctgtctcatacctgtcttaaaccctagctagtttctaggaccttcccacgccctgcgcccctttgctgtctcaaacctaccttaaacccttgttagtttctagaaccttccagacctccagttcccgacctcggcgccatggacctggacccagaggggatcttccgcgacgacagcgatgaagacgaagacagtgtccaggagagggaggcgaacaaggagatggttgtctaccttgtcgacgcctcgcccaaaatgttcacccctgccaccacccaggacaatgaaaagcaggagacacatttccataccattgttaactgcatcacagagtctctgaagacacaaattattggtagatcttatgatgaagtcgcaatatgtttctttaacactaaagagaagaagaatttacaggactcagccggtgtttatgtttataatgtcggagacagagagcaacttgatagacctactgcaaaactcatcaaggatttttctttgatagaagattcttttatgagcaccattggaagtcgatatggaataacagctggatctcgggagaataccctgtataatgctctttgggttgctcaggcgctgttgcgcaagggatctgtgaagaccgtgagtaaacgaattcttatattcaccaatgaagatgatccttttggtactattacaggagcagtgaaaactgatatgattaggacaacacttcaacgtgcaaaggatgcacaagatcttggcctgtctattgaacttcttccactgagcccgcctgatgaccagttcaacatgtccctgttttatgcagatttgattggtctggatggagatgagatgaccgaatatttgccatctgctggtgataagctagaggatatgactaatcaactgagaaaacggataatgaagaagcgcagaatcaaaactctttcatttgcgattaccaatgatgtgtgcatagaagtcaatacatatgcgctggtccgtcctactactacagggacaatcacatggcttgattcactaagtaacctcccattaaaggttgagaggtctttcatatgcaatgatactggggctctacttcaggatgcacagacacgtttccagatgtacaatgacacaattgtcaaattttctgtacgtgaactctctgaggttaaaagggttgcaagccatcatcttcgccttataggtttcaagccattggattgcttgaaagattaccataacttaagaccatcgacatttatttatccgagtgatgagcgtatatttggaagcacctgtgttttcgttgctttacatagctcaatgttacgtcttggaaggtttgcacttgcattttatgggaatccaactcgaccacaactcatagcccttgttgctcaagaagaggttacttcgtctggtcgtcagtttgaaccgcctggcatgcacatgatctatcttccatactccgatgatattagatatcctgaagaagttcatgtgacttctgatgatgcaccgcgtgcaacagatgaacaaatcaagaaagcttcgaacatattcaaacgtattgatctgataaatttctctgcatgccaatttgctaacccagctttgcaaagacactatgggatcttggaggccttagctttaggcgaagatgagatgcctgatataaaggatgagaccctgcctgacgaagaaggcttgtctaagccaggggtagccaatgctattgaggaattcaagacttcagtctatggtgaaaattatgaccaagaggaggcagaagcggcagcagggaaagcttcccgtggtaatgcttcaaaaaagcggaaggaggtcactgatgcagctgcgcagataagtgctgcttatgattgggcagaacttgcagacaatggaaaactgaaggaaatgaccacggtggaattgagatcctacctgaccgcgcatgatctcccggtttctggtaagaaagatgtacttatcagcaggatcttgactcacctgggttttatgctcagggtactgttgcatgctgcgaaatggctttggcttcaaatgagcttggagacaggagaagctgatgaagtcatgtgttgggcaatccttgtcatctatagggtgacttcctgggctttaggtactcgctttcgcttccaaccagcgcgtcctcagccagcgctggaggccgcccagccgcgcctgcgaccgcagaccgcgcgtcctcactcagccagcgctggagatctcctgtccgcccagccgcgcctgcgacagtgcgaccgccctcctgcccccaggtacgcagccggcccctctcctccctcctccctcttccctccgccagtccgcccacaggctagtgcgccgccgtgccacaggccactgcccagtgcccactgcgccgcgctgcacggccaagctccagtgcccacttgctgccgctgcatccacttgcccggccaagctccagtgcgccgccgcatccacttgttgccgctgccctcaacggcccagatccatccgctgcccttgctgcccctcacagtgaatcacctctgcggctgggagtgaggggtcccagccacttcccactgggccgcagaccgtcggcctctgcgctgcgtctcacgtctgtggccactccacaagaccagcagccaagccaaattctatgtcaagtctgaaaagacgttcaacgttcgtttaaacgtttaaatgttaaaaagttagttcataacgttttaacgttttaccgcttccggggaggaaagcactgcaagatgatactgctccagtccccatcgaggttcctgctccagatcctgcaagaccgtgttctcagtggcgagaagggcatggacattgactgtcacacggtagagttcgatgatgtccggtatcatatccagttttctatgaggaatccaaaggtaatggtgttgtcagttgctttgcctctgccacctcctgaagcgattctgtatgatgggctaccactaggtgccattgaagctataaaagcagcatatgggccagttgtgcagattcttgatcctccaaaggacgggtttgatctcacaatgaagataaatttgacaaaacttccgctagatgaagagcaaaggaatactatcttgacacaaattgcatctattagagaggttgtgttgggtgcaccactgaagctcctgctgaaacatttagcctcaaagacagttgcacctaatgttaacaaccttgttgctcttgttcaccgccctaatgaatcatttttccttgctccccaggcagataaagttactattgtgtatccaatgagattccaggactccattgatattgttttagcaacttccttcctgcaggaatttgtggaggcaagacgaacagctgcacttaataatgttccttcttgtatgtggtctccggtaccacctcttgagttaaaaggagtatctgctgatgcactaaatgcaaatgctggctttgttactttcgttgtttaccctcggcatgttgagggtaaaaagctagatagaacagtttggaatttgttgacatttcatgcttatgtaagctatcatgtaaagtgttctgaaggattcatgcataccaggatgaggcgcagggttgagtcgctgatccaggcgttggaccgggcgaagtctgatgctgagaagttgaagaagttggtacacggtggatctttcaaaagactgagcctgaagaacgagggggactcgcgtttctgaagggaattggcaaatgttgttgttttccatttggctaatgacttctgttgtgggaagcttacttccgttcagttttgggagcgaaggctcggaaccggttaaatccatgccattgaattttaatgtaaattcgcgttgcttttacatatttactagcctgaaatctctcggcgtatcagttccatgacacatcgcctttgcaaccggagagcctgctgcctgcatcttggtgcaagtagtttgtttttgccatgagatgtctgagtctgatcttttttggcattaataaatgtgttgttcttggatcacatgatgtagtagggagttgaggcttggttgaatcacatgaccactcacggtcacggtacagcatcggctgagttatgtcgagcagccgcattcatttttttataagcttgatggtgtattgttttataagcttcggctgagttacgctcgaa

SEQ ID NO: 217100 - DNA, 3749 bp, Zea Mays
gtttcccacaaaaaaaacggcgccacggtagcgagtttctagaaccttcccacgccctgcgcccctttgctgtctcatacctgtcttaaaccctagctagtttctaggaccttcccacgccctgcgcccctttgctgtctcaaacctaccttaaacccttgttagtttctagaaccttccagacctccagttcccgacctcggcgccatggacctggacccagaggggatcttccgcgacgacagcgatgaagacgaagacagtgtccaggagagggaggcgaacaaggagatggttgtctaccttgtcgacgcctcgcccaaaatgttcacccctgccaccacccaggacaatgaaaagcaggagacacatttccataccattgttaactgcatcacagagtctctgaagacacaaattattggtagatcttatgatgaagtcgcaatatgtttctttaacactaaagagaagaagaatttacaggactcagccggtgtttatgtttataatgtcggagacagagagcaacttgatagacctactgcaaaactcatcaaggatttttctttgatagaagattcttttatgagcaccattggaagtcgatatggaataacagctggatctcgggagaataccctgtataatgctctttgggttgctcaggcgctgttgcgcaagggatctgtgaagaccgtgagtaaacgaattcttatattcaccaatgaagatgatccttttggtactattacaggagcagtgaaaactgatatgattaggacaacacttcaacgtgcaaaggatgcacaagatcttggcctgtctattgaacttcttccactgagcccgcctgatgaccagttcaacatgtccctgttttatgcagatttgattggtctggatggagatgagatgaccgaatatttgccatctgctggtgataagctagaggatatgactaatcaactgagaaaacggataatgaagaagcgcagaatcaaaactctttcatttgcgattaccaatgatgtgtgcatagaagtcaatacatatgcgctggtccgtcctactactacagggacaatcacatggcttgattcactaagtaacctcccattaaaggttgagaggtctttcatatgcaatgatactggggctctacttcaggatgcacagacacgtttccagatgtacaatgacacaattgtcaaattttctgtacgtgaactctctgaggttaaaagggttgcaagccatcatcttcgccttataggtttcaagccattggattgcttgaaagattaccataacttaagaccatcgacatttatttatccgagtgatgagcgtatatttggaagcacctgtgttttcgttgctttacatagctcaatgttacgtcttggaaggtttgcacttgcattttatgggaatccaactcgaccacaactcatagcccttgttgctcaagaagaggttacttcgtctggtcgtcagtttgaaccgcctggcatgcacatgatctatcttccatactccgatgatattagatatcctgaagaagttcatgtgacttctgatgatgcaccgcgtgcaacagatgaacaaatcaagaaagcttcgaacatattcaaacgtattgatctgataaatttctctgcatgccaatttgctaacccagctttgcaaagacactatgggatcttggaggccttagctttaggcgaagatgagatgcctgatataaaggatgagaccctgcctgacgaagaaggcttgtctaagccaggggtagccaatgctattgaggaattcaagacttcagtctatggtgaaaattatgaccaagaggaggcagaagcggcagcagggaaagcttcccgtggtaatgcttcaaaaaagcggaaggaggtcactgatgcagctgcgcagataagtgctgcttatgattgggcagaacttgcagacaatggaaaactgaaggaaatgaccacggtggaattgagatcctacctgaccgcgcatgatctcccggtttctggtaagaaagatgtacttatcagcaggatcttgactcacctgggttttatgctcagggtactgttgcatgctgcgaaatggctttggcttcaaatgagcttggagacaggagaagctgatgaagtcatgtgttgggcaatccttgtcatctatagggtgacttcctgggctttaggtactcgctttcgcttccaaccagcgcgtcctcagccagcgctggaggccgcccagccgcgcctgcgaccgcagaccgcgcgtcctcactcagccagcgctggagatctcctgtccgcccagccgcgcctgcgacagtgcgaccgccctcctgcccccagtggcgagaagggcatggacattgactgtcacacggtagagttcgatgatgtccggtatcatatccagttttctatgaggaatccaaaggtaatggtgttgtcagttgctttgcctctgccacctcctgaagcgattctgtatgatgggctaccactaggtgccattgaagctataaaagcagcatatgggccagttgtgcagattcttgatcctccaaaggacgggtttgatctcacaatgaagataaatttgacaaaacttccgctagatgaagagcaaaggaatactatcttgacacaaattgcatctattagagaggttgtgttgggtgcaccactgaagctcctgctgaaacatttagcctcaaagacagttgcacctaatgttaacaaccttgttgctcttgttcaccgccctaatgaatcatttttccttgctccccaggcagataaagttactattgtgtatccaatgagattccaggactccattgatattgttttagcaacttccttcctgcaggaatttgtggaggcaagacgaacagctgcacttaataatgttccttcttgtatgtggtctccggtaccacctcttgagttaaaaggagtatctgctgatgcactaaatgcaaatgctggctttgttactttcgttgtttaccctcggcatgttgagggtaaaaagctagatagaacagtttggaatttgttgacatttcatgcttatgtaagctatcatgtaaagtgttctgaaggattcatgcataccaggatgaggcgcagggttgagtcgctgatccaggcgttggaccgggcgaagtctgatgctgagaagttgaagaagttggtacacggtggatctttcaaaagactgagcctgaagaacgagggggactcgcgtttctgaagggaattggcaaatgttgttgttttccatttggctaatgacttctgttgtgggaagcttacttccgttcagttttgggagcgaaggctcggaaccggttaaatccatgccattgaattttaatgtaaattcgcgttgcttttacatatttactagcctgaaatctctcggcgtatcagttccatgacacatcgcctttgcaaccggagagcctgctgcctgcatcttggtgcaagtagtttgtttttgccatgagatgtctgagtctgatcttttttggcattaataaatgtgttgttcttggatcacatgatgtagtagggagttgaggcttggttgaatcacatgaccactcacggtcacggtacagcatcggctgagttatgtcgagcagccgcattcatttttttataagcttgatggtgtattgttttataagcttcggctgagttacgctcgaa

SEQ ID NO: 217101 - DNA, 4608 bp, Zea Mays
gtggtttcccacaaaaaaaacggcgccacggtagcgagtttctagaaccttcccacgccctgcgcccctttgctgtctcatacctgtcttaaaccctagctagtttctaggaccttcccacgccctgcgcccctttgctgtctcaaacctaccttaaacccttgttagtttctagaaccttccagacctccagttcccgacctcggcgccatggacctggacccagaggggatcttccgcgacgacagcgatgaagacgaagacagtgtccaggagagggaggcgaacaaggagatggttgtctaccttgtcgacgcctcgcccaaaatgttcacccctgccaccacccaggacaatgaaaagcaggagacacatttccataccattgttaactgcatcacagagtctctgaagacacaaattattggtagatcttatgatgaagtcgcaatatgtttctttaacactaaagagaagaagaatttacaggactcagccggtgtttatgtttataatgtcggagacagagagcaacttgatagacctactgcaaaactcatcaaggatttttctttgatagaagattcttttatgagcaccattggaagtcgatatggaataacagctggatctcgggagaataccctgtataatgctctttgggttgctcaggcgctgttgcgcaagggatctgtgaagaccgtgagtaaacgaattcttatattcaccaatgaagatgatccttttggtactattacaggagcagtgaaaactgatatgattaggacaacacttcaacgtgcaaaggatgcacaagatcttggcctgtctattgaacttcttccactgagcccgcctgatgaccagttcaacatgtccctgttttatgcagatttgattggtctggatggagatgagatgaccgaatatttgccatctgctggtgataagctagaggatatgactaatcaactgagaaaacggataatgaagaagcgcagaatcaaaactctttcatttgcgattaccaatgatgtgtgcatagaagtcaatacatatgcgctggtccgtcctactactacagggacaatcacatggcttgattcactaagtaacctcccattaaaggttgagaggtctttcatatgcaatgatactggggctctacttcaggatgcacagacacgtttccagatgtacaatgacacaattgtcaaattttctgtacgtgaactctctgaggttaaaagggttgcaagccatcatcttcgccttataggtttcaagccattggattgcttgaaagattaccataacttaagaccatcgacatttatttatccgagtgatgagcgtatatttggaagcacctgtgttttcgttgctttacatagctcaatgttacgtcttggaaggtttgcacttgcattttatgggaatccaactcgaccacaactcatagcccttgttgctcaagaagaggttacttcgtctggtcgtcagtttgaaccgcctggcatgcacatgatctatcttccatactccgatgatattagatatcctgaagaagttcatgtgacttctgatgatgcaccgcgtgcaacagatgaacaaatcaagaaagcttcgaacatattcaaacgtattgatctgataaatttctctgcatgccaatttgctaacccagctttgcaaagacactatgggatcttggaggccttagctttaggcgaagatgagatgcctgatataaaggatgagaccctgcctgacgaagaaggcttgtctaagccaggggtagccaatgctattgaggaattcaagacttcagtctatggtgaaaattatgaccaagaggaggcagaagcggcagcagggaaagcttcccgtggtaatgcttcaaaaaagcggaaggaggtcactgatgcagctgcgcagataagtgctgcttatgattgggcagaacttgcagacaatggaaaactgaaggaaatgaccacggtggaattgagatcctacctgaccgcgcatgatctcccggtttctggtaagaaagatgtacttatcagcaggatcttgactcacctgggtaagtgaagccgggtatccgaactgttagtttcctgagacccgactgacatctgtagtgctgtctcgcggatccttgtggaccgtaatcctcccccgtgcaggctacgtgccgattttttgtatagcgacaggacagcaccagttgccaatgtaacctgtgttaagtttcgtcttgtggtatcatctgcttgtcattgtcaacatgaaacataatgtaattctggatacttagacccacaatatggagcataactgcataaggtatgttaaagcataggccctctttagcatggctacttgctgtttcaggttttatgctcagggtactgttgcatgctgcgaaatggctttggcttcaaatgagcttggagacaggagaagctgatgaagtcatgtgttgggcaatccttgtcatctatagggtgacttcctgggctttaggtactcgctttcgcttccaaccagcgcgtcctcagccagcgctggaggccgcccagccgcgcctgcgaccgcagaccgcgcgtcctcactcagccagcgctggagatctcctgtccgcccagccgcgcctgcgacagtgcgaccgccctcctgcccccaggtacgcagccggcccctctcctccctcctccctcttccctccgccagtccgcccacaggctagtgcgccgccgtgccacaggccactgcccagtgcccactgcgccgcgctgcacggccaagctccagtgcccacttgctgccgctgcatccacttgcccggccaagctccagtgcgccgccgcatccacttgttgccgctgccctcaacggcccagatccatccgctgcccttgctgcccctcacagtgaatcacctctgcggctgggagtgaggggtcccagccacttcccactgggccgcagaccgtcggcctctgcgctgcgtctcacgtctgtggccactccacaagaccagcagccaagccaaattctatgtcaagtctgaaaagacgttcaacgttcgtttaaacgtttaaatgttaaaaagttagttcataacgttttaacgttttaccgcttccggggaggaaagcactgcaagatgatactgctccagtccccatcgaggttcctgctccagatcctgcaagaccgtgttctcagtggcgagaagggcatggacattgactgtcacacggtagagttcgatgatgtccggtatcatatccagttttctatgaggaatccaaaggtaatggtgttgtcagttgctttgcctctgccacctcctgaagcgattctgtatgatgggctaccactaggtgccattgaagctataaaagcagcatatgggccagttgtgcagattcttgatcctccaaaggacgggtttgatctcacaatgaagataaatttgacaaaacttccgctagatgaagagcaaaggaatactatcttgacacaaattgcatctattagagaggttgtgttgggtgcaccactgaagctcctgctgaaacatttagcctcaaagacagttgcacctaatgttaacaaccttgttgctcttgttcaccgccctaatgaatcatttttccttgctccccaggcagataaagttactattgtgtatccaatgagattccaggactccattgatattgttttagcaacttccttcctgcaggaatttgtggaggcaagacgaacagctgcacttaataatgttccttcttgtatgtggtctccggtaccacctcttgagttaaaaggagtatctgctgatgcactaaatgcaaatgctggctttgttactttcgttgtttaccctcggcatgttgagggtaaaaagctagatagaacagtttggaatttgttgacatttcatgcttatgtaagctatcatgtaaagtgttctgaaggattcatgcataccaggatgaggcgcagggttgagtcgctgatccaggcgttggaccgggcgaagtctgatgctgagaagttgaagaagttggtacacggtggatctttcaaaagactgagcctgaagaacgagggggactcgcgtttctgaagggaattggcaaatgttgttgttttccatttggctaatgacttctgttgtgggaagcttacttccgttcagttttgggagcgaaggctcggaaccggttaaatccatgccattgaattttaatgtaaattcgcgttgcttttacatatttactagcctgaaatctctcggcgtatcagttccatgacacatcgcctttgcaaccggagagcctgctgcctgcatcttggtgcaagtagtttgtttttgccatgagatgtctgagtctgatcttttttggcattaataaatgtgttgttcttggatcacatgatgtagtagggagttgaggcttggttgaatcacatgaccactcacggtcacggtacagcatcggctgagttatgtcgagcagccgcattcatttttttataagcttgatggtgtattgttttataagcttcggctgagttacgctcgaa

SEQ ID NO: 217102 - DNA, 3802 bp, Zea Mays
gtggtttcccacaaaaaaaacggcgccacggtagcgagtttctagaaccttcccacgccctgcgcccctttgctgtctcatacctgtcttaaaccctagctagtttctaggaccttcccacgccctgcgcccctttgctgtctcaaacctaccttaaacccttgttagtttctagaaccttccagacctccagttcccgacctcggcgccatggacctggacccagaggggatcttccgcgacgacagcgatgaagacgaagacagtgtccaggagagggaggcgaacaaggagatggttgtctaccttgtcgacgcctcgcccaaaatgttcacccctgccaccacccaggacaatgaaaagcaggagacacatttccataccattgttaactgcatcacagagtctctgaagacacaaattattggtagatcttatgatgaagtcgcaatatgtttctttaacactaaagagaagaagaatttacaggactcagccggtgtttatgtttataatgtcggagacagagagcaacttgatagacctactgcaaaactcatcaaggatttttctttgatagaaggaagtcgatatggaataacagctggatctcgggagaataccctgtataatgctctttgggttgctcaggcgctgttgcgcaagggatctgtgaagaccgtgagtaaacgaattcttatattcaccaatgaagatgatccttttggtactattacaggagcagtgaaaactgatatgattaggacaacacttcaacgtgcaaaggatgcacaagatcttggcctgtctattgaacttcttccactgagcccgcctgatgaccagttcaacatgtccctgttttatgcagatttgattggtctggatggagatgagatgaccgaatatttgccatctgctggtgataagctagaggatatgactaatcaactgagaaaacggataatgaagaagcgcagaatcaaaactctttcatttgcgattaccaatgatgtgtgcatagaagtcaatacatatgcgctggtccgtcctactactacagggacaatcacatggcttgattcactaagtaacctcccattaaaggttgagaggtctttcatatgcaatgatactggggctctacttcaggatgcacagacacgtttccagatgtacaatgacacaattgtcaaattttctgtacgtgaactctctgaggttaaaagggttgcaagccatcatcttcgccttataggtttcaagccattggattgcttgaaagattaccataacttaagaccatcgacatttatttatccgagtgatgagcgtatatttggaagcacctgtgttttcgttgctttacatagctcaatgttacgtcttggaaggtttgcacttgcattttatgggaatccaactcgaccacaactcatagcccttgttgctcaagaagaggttacttcgtctggtcgtcagtttgaaccgcctggcatgcacatgatctatcttccatactccgatgatattagatatcctgaagaagttcatgtgacttctgatgatgcaccgcgtgcaacagatgaacaaatcaagaaagcttcgaacatattcaaacgtattgatctgataaatttctctgcatgccaatttgctaacccagctttgcaaagacactatgggatcttggaggccttagctttaggcgaagatgagatgcctgatataaaggatgagaccctgcctgacgaagaaggcttgtctaagccaggggtagccaatgctattgaggaattcaagacttcagtctatggtgaaaattatgaccaagaggaggcagaagcggcagcagggaaagcttcccgtggtaatgcttcaaaaaagcggaaggaggtcactgatgcagctgcgcagataagtgctgcttatgattgggcagaacttgcagacaatggaaaactgaaggaaatgaccacggtggaattgagatcctacctgaccgcgcatgatctcccggtttctggtaagaaagatgtacttatcagcaggatcttgactcacctgggttttatgctcagggtactgttgcatgctgcgaaatggctttggcttcaaatgagcttggagacaggagaagctgatgaagtcatgtgttgggcaatccttgtcatctatagggtgacttcctgggctttaggtactcgctttcgcttccaaccagcgcgtcctcagccagcgctggaggccgcccagccgcgcctgcgaccgcagaccgcgcgtcctcactcagccagcgctggagatctcctgtccgcccagccgcgcctgcgacagtgcgaccgccctcctgcccccagcactgcaagatgatactgctccagtccccatcgaggttcctgctccagatcctgcaagaccgtgttctcagtggcgagaagggcatggacattgactgtcacacggtagagttcgatgatgtccggtatcatatccagttttctatgaggaatccaaaggtaatggtgttgtcagttgctttgcctctgccacctcctgaagcgattctgtatgatgggctaccactaggtgccattgaagctataaaagcagcatatgggccagttgtgcagattcttgatcctccaaaggacgggtttgatctcacaatgaagataaatttgacaaaacttccgctagatgaagagcaaaggaatactatcttgacacaaattgcatctattagagaggttgtgttgggtgcaccactgaagctcctgctgaaacatttagcctcaaagacagttgcacctaatgttaacaaccttgttgctcttgttcaccgccctaatgaatcatttttccttgctccccaggcagataaagttactattgtgtatccaatgagattccaggactccattgatattgttttagcaacttccttcctgcaggaatttgtggaggcaagacgaacagctgcacttaataatgttccttcttgtatgtggtctccggtaccacctcttgagttaaaaggagtatctgctgatgcactaaatgcaaatgctggctttgttactttcgttgtttaccctcggcatgttgagggtaaaaagctagatagaacagtttggaatttgttgacatttcatgcttatgtaagctatcatgtaaagtgttctgaaggattcatgcataccaggatgaggcgcagggttgagtcgctgatccaggcgttggaccgggcgaagtctgatgctgagaagttgaagaagttggtacacggtggatctttcaaaagactgagcctgaagaacgagggggactcgcgtttctgaagggaattggcaaatgttgttgttttccatttggctaatgacttctgttgtgggaagcttacttccgttcagttttgggagcgaaggctcggaaccggttaaatccatgccattgaattttaatgtaaattcgcgttgcttttacatatttactagcctgaaatctctcggcgtatcagttccatgacacatcgcctttgcaaccggagagcctgctgcctgcatcttggtgcaagtagtttgtttttgccatgagatgtctgagtctgatcttttttggcattaataaatgtgttgttcttggatcacatgatgtagtagggagttgaggcttggttgaatcacatgaccactcacggtcacggtacagcatcggctgagttatgtcgagcagccgcattcatttttttataagcttgatggtgtattgttttataagcttcggctgagttacgctcgaa

SEQ ID NO: 217103 - DNA, 2260 bp, Zea Mays
ggttgggagaggagcacgtggccgtccagaatccagtgatccaccacaaccgcccgtccattctccaggccatgccgcgcacggcactgctccgcctcgccgctgcttcgacgacgcgcgcgtcctcggcttccgcggcggcgcggcgactgtgcccgtcctcagagtcagacgacggcggcgagcggcacgcggccgcccggaaggatgagctcctcccgccgccccgcacgccgcgccccgacgagcggcggctgtctcggcgtggagagcatcggagagagttattatctgtcacaatggcctccagagaccacactggcttgacccgacaacttttggattttcaacatgatacaatagatgaggtaggtgcagaacacggtccattcatggatttgaaagcgagattcatggacttcaaacagagaaactatgtggagaatttttcaaattaccaaaatcttgctgaacagcaaacaccaaagttcatggtgattgcttgtgctgactccagagtctgccctaccgctgttttggggtttcagcctggcgaagcatttacggttcgtaatgtggcgaatttggtaccaccatatgagcatgagggatcagagactagtgcagcactagagtttgctatcaatacactcgaggtagagaatgtactggtggtaggccacagtaggtgtgggggcatccaggcactaatgagcatgaaagatgattcaacgtccggaagcttcattaaaaactgggtttcaattgggaagagcgcaaggttaagcacaagagctgcagctggaaatttgagttttgacatgcagtgcaaacattgtgaaaaggaatcaataaatagctctctgttgaacttgttaacatacccatggatagagaagagggtgaatgaagggttggaaggtggaagcaagtacgctataaagaataggtccacctggtcttgaccaatgaaggcctcatttacttgggtaaatttcactctgcgccctgcagttaagcatggttttgctttgccactacgctgtgcatttccgtcgcacctttgctccattgtggtattgatgtcctgcagaagcgagtccctgtatcaaataactgtgtccattgcgatgcatggcactatggcactagcatgtcagcttgctgtagtattgcatactcacgggcaggtgcatcggcattgtagttgtagcagctattgtttgatacgtacaggaactctccactgtggaagcacaaagccacaatggagtgaggtgcgacgcaatgaacaatatggtggcaaagtgaaagtctgtggaactaccggggggcaaagtggattttgtgcaactatttgtgtgtcgttttccggttgataccattgagaaaatacgaataagttacaggatcagtcatagtgcatgtaattgtcgccacatttggcgttaccttgttattgtaattgtaacatttgtaccatttgttgtatcattataactgtgagatacaatacaaatattatacggtctcggcaaatttgcttgatgacagtgttgttcgttcggaagagtcggcaatgcaaattctgtgatattccacatgttccaactaaaaaagtacgagtagcaccatgggagacatgtcacacagtaccccttcccttccgtctcccatcactccatcagtcagtcacttctacggcgccactgtcgtaaaccctagcgaggtgcgccgagaagcgctgcctcttgtagcactcggcgccgagcatctcctcccggctgagcagcacggcccggagcgccgcctgcagcgctggccgtgacgacgtcgacgttccctcgccatcgtggtgccgcccgccgacgtccagctccaggacgctccgcgtcctcccgccgacggtggctatctccgcgcgcacggccctcgcgctgacggaccgcacggcgcggcccagctcggacatgagccccgggcggtcggcgcagcacacccacgccctgacgcgcctggcggccctctccccgccgtggcagaagcggtgctggtggccctcctcgacgccgacctcgtcgccttcccccgggacggccactgccgcgcccgccgccgcggcgtccgcctcgccccgcagctcccgcacgtgccgcaccacctcccctagcagcgccgccttgtccatctgcatgattaattcgtacacgcacacgtacgtaaccgtgttcgctatcgagttcgatgatgaactgccacg

SEQ ID NO: 217104 - DNA, 1406 bp, Zea Mays
cggggcaccatacaccacaccacttcgcgcccaagatggcgctttattatctctggtctggtcgctgcgcctcccgcttggccgcgagcccgcgaccatggcggcgccacccgtccccgtcctctgcagcgcttccccatgtcgcatcaccacccacctcgcccctcctgcctttcggaccgttgccgcggcgcggccgcaggccttgcccttcgtcttgtgcgtcgagcagcgcgtggggccctcggcgcgcgcgcgcgcgccgttcgcggccaagcgcggcggcggcggcgaggtatccgcggaagctccagacggcacgcgcgcgctgctccaggcggcgctctggggcgccgaggctgcctatatactctggctcttccttctgccttacgccccgggcgacccggtctgggcaatctcgcaggctaccatcagcgacctcatcggcctatcactcaacttcttcttcgtcctgccgctgctcaactcagttggcgttcacctgctcgaatcgcctctacttcaccctatggcagaaggattgttcaacttggtgctcgcttggacgctgctttttgcgccactcctcttcacggattgtaggagggaccgctacaagggatcgctcgatgtcctgtggggctttcagatgttcctcacaaacactttcttgataccttacatggcgatccgactgaacggtccggaagcggaccggtctccgccacgaagatcacagctgggttcagtcatggtcaacggcgcgccggctgtgggcgcggtcggcggcctcgtctgcgttctctcgatcgtttgggcgttctctggccgcggagattctggtttcggaggcattgcggaacggtggcagtatctgcagagctacctgttctcggagcggcttgcttacgcgtttctctgggatatgtttctgtactccgtattccagccgtggctgatcggggacaatcttcggaacgtgaaggcggatgctgctgggctttggatttatagcatcggagcaacggcgatgcacggtaatggtgtgtgttcctgagctgggagcctgggactgggacctcgcatcgcatgcatggcgggctggcggctgcttggcagatttgcgtgacgccctgcatggaaggcgggagcgttccgtgtgagccgctgcggcgttagtaggattcgctcgcagtcgtaggtgtagcaggctttgccaacgggcaatgaagcacagggatggtgtgcttcagacccttcagttcagtgcttgtacgtcgccgtgtcgtgctccatgtgcgtgccatgtgaactgctgtctatattaccggcttgttgaaactgataaatcataaatgcagatcactctggctgaattcactagttcattttttatcttctaa

SEQ ID NO: 217105 - DNA, 3716 bp, Zea Mays
cccctcccctccgccctccgcacgccgcctccgaaccccatcgcccatcctcactacggcgacggctattgccacagccgccgccatcttgacgcgtacgagattctgaggccttgatctgaaacccgcctcgatcccacagccattcacccaccgttccaccggtcacggtagcggcgatccctactctcaggccgtagctacgacctagccggcgccatgcgacacggaggcggaggcaggggaggtggaggtaaaagaggtcgaggaagaggagcgggctccggacgcagagacgcgcgccccggcaacgattcgtaccgcggcgaccgtggtaggcgccacgactaccgctcccgccgcaccgcttccccggaccaccgcccacgccgcccgaggggcgaggacaacgaccgcgatccgccccgcggcggtcgcatcggctacggcgaccgtagccctccccgcggcggccgcaccggctacggcgaccgtagccctcccggcggcggccgcaccggctacggcgaccgtagccctcccggcggcggccgcaccggcccgccccggcgcgagcgcgctggctacggccaccttgacgcgtcgccccgccgcgggcatgcgccgtacaaggacgccttcggctcgccgggcggcgaccgccacgcttctccccgcgggcgcagggaatacggagatagccgcgtctcgccccccgggggtagggactacgaaagggcgccctgccgcgaggagcgcgaccggtacggccgccctggccgcggtgccgatctcgggcacaactccccgccagcccacatgctcccagaccacccgtccgacctgggacgttcagcatccctacgcgctgacgaccatagccttctcaaggacgactaccctaggggaggccctcatcggagcatcagaaaggagaacgagttgtttgcgaacggtgacctgactctcagaataagtgcaactgaaatgggaaggactagcgccatgtactcccaagaccgcaggctctcacctccaccacctatttatccctatgtgccacgtgagacgggattcttgacaggcggatctgccatgaaggccagtgatggttatggtgctggaactggaagcgcccagcggctgcatgatgatgacgattttaagtaccacaaggatgccccacacattgagaggagtagagatattgataggcattattctggcagtagggacttagttgttgagaaaggtggagttgctgaaaggtatgcttctgctgatgatctgccttctgggaggattcgagaaacagagagtctttactctagtagaggtatgctggagtctgacctggtgccgtgtaggcagttgaaggttcttggtgatccttcctcagctttgcctgccaaggaccaccatccatacaggatgtacactgaacctggctacgagacaagcaacagatacatcatggagggccttggcaggtcatctcatgactcactggggcatgggagtgaccatcctcataggttttcaggaggttcattagagcatgtaagcggtcatggtgatgaaacattattggatattgcaaggcaggcacactctaagcatacaccaagagctgcatcattggagtacgatgtacatgatacgcatagtgaaccagagaacttacgtgggaatgtctcaatgacttcaaggcacacatctgtctcaacatctttgagaggtcttagggatgaaaggattaacgacaatctgaggttatcccgtaggattgaagaagatgagggtagcattgaatccatgcatcaggacacagagcacttaattcgtcattgttacaacggtgacgcttctgtacagtaccaaacagcaaggggtggtgatgatcactattcccactcccctggaactgaacctattggaattgcaaggcggctagctcatcaacatgagtttgattcctttggttactcaagtgatcaagaagcttcccttatggtttctaggaaaagatgcaggagtcctgaatatcatgatcatgagattgatatgtatcaagctgatcatgggtttgcaggacatgagcactatgatgatgatgttgttgatgaatatgatatacccccaccaagaatgtcacggtttgatgatgaatatgatgaaatacatgatgtgctagctaatcgtgatgttttctcaaggatttctttgccacatgaaaccaatcaggaatggactgatatggatcaggggaaccatcctcattctaacatcttgggttacgggtgttcaaaacacgtacctatgcatcagaggttgtctaaacccaattaccactcacaatttggggaaactcccatgcatggaagaggaagaggaagaggaggattgactaaaagtgccaaaaagggactgagaactgctcctcatcagttgcatgatgggtacccatcaggtagaaatgaatttgttagaccaaataaattttcaaagtcgtcaaaagatgaacttaatggttctgaagtgaagcatgaagatgctccagagtatgaggatgttcctctgcagaaagatccaccagaaggttcagaggagttcagtaaacaggttgatgaagcctttcttaagtacacaaagatattaaatgagagtccagctatgcagaagaaataccgggaggcgccaaaaggatctttgccatgctgtgtctgtggcagtgtagcgaggaaatttctggaccttgatgcattgctatcacatgcttatgatacatgcaaggccggtttgaagacaaaacacttggggtttcacaaagcactgtgtgttctgatggggtggaattggcatgttgctccagacacatctaaatcacatcactccattccatctgaggaagtaaatgccatgaggggagacctcatgctgtggcctccagttgttgtgatacataacagctcgactggtcatgaggcaaaggatactgatgcaaagattgtgtccatagaagaaatcgaaggtgtattggcagatattggggtagcgcatgagaaggctagggttagccatggaagatcagccaatcagagcgtgttcctggtgaagttccagccaacaatatctgggttccaagaagccatgagagtgcatacccatttctccaccagaaaccatggcaaggaagagttccagctgatgaaaggcagcaaaggtaagaaggctgcctccactgatagcctggaagagctgctgtatgcgcatattggggtcgtggaagacctggggctgctggatgagggaacaaagaagagatgcaaggtcatgaggaagaaggaaattgaggcaaatgcagaggcaacactgaatttagaagtttattaggtctagtactaggatccgaaccatttgaagtggtcctcttttgcttcatcttgcagctgcttgcttgtccttgcggctgtaacgtcaaaagaagaaaagaagtgtaaattctgcttttgccattaaagagtgacgaaactcagttggcttctgtctgctggggaaggcctgcctcggtttgcatggcatggcaaggacataattttgtggctagatggggacaccttaacggcaaaagcagaattacctggtcgaagaaccgagtttaatctttatattatggaatcccttctttttttaagtcttttgctgcgtgaagttat

SEQ ID NO: 217106 - DNA, 5742 bp, Zea Mays
cccctcccctccgccctccgcacgccgcctccgaaccccatcgcccatcctcactacggcgacggctattgccacagccgccgccatcttgacgcgtacgagattctgaggccttgatctgaaacccgcctcgatcccacagccattcacccaccgttccaccggtcacggtagcggcgatccctactctcaggccgtagctacgacctagccggcgccatgcgacacggaggcggaggcaggggaggtggaggtaaaagaggtcgaggaagaggagcgggctccggacgcagagacgcgcgccccggcaacgattcgtaccgcggcgaccgtggtaggcgccacgactaccgctcccgccgcaccgcttccccggaccaccgcccacgccgcccgaggggcgaggacaacgaccgcgatccgccccgcggcggtcgcatcggctacggcgaccgtagccctccccgcggcggccgcaccggctacggcgaccgtagccctcccggcggcggccgcaccggctacggcgaccgtagccctcccggcggcggccgcaccggcccgccccggcgcgagcgcgctggctacggccaccttgacgcgtcgccccgccgcgggcatgcgccgtacaaggacgccttcggctcgccgggcggcgaccgccacgcttctccccgcgggcgcagggaatacggagatagccgcgtctcgccccccgggggtagggactacgaaagggcgccctgccgcgaggagcgcgaccggtacggccgccctggccgcggtgccgatctcgggcacaactccccgccagcccacatgctcccagaccacccgtccgacctgggacgttcagcatccctacgcgctgacgaccatagccttctcaaggacgactaccctaggggaggccctcatcggagcatcagaaaggagaacgagttgtttgcgaacggtgacctgactctcagaataagtgcaactgaaatgggaaggactagcgccatgtactcccaagaccgcaggctctcacctccaccacctatttatccctatgtgccacgtgagacgggattcttgacaggcggatctgccatgaaggccagtgatggttatggtgctggaactggaagcgcccagcggctgcatgatgatgacgattttaagtaccacaaggatgccccacacattgagaggagtagagatattgataggcattattctggcagtagggacttagttgttgagaaaggtggagttgctgaaaggtatgcttctgctgatgatctgccttctgggaggattcgagaaacagagagtctttactctagtagaggtatgctggagtctgacctggtgccgtgtaggcagttgaaggttcttggtgatccttcctcagctttgcctgccaaggaccaccatccatacaggatgtacactgaacctggctacgagacaagcaacagatacatcatggagggccttggcaggtcatctcatgactcactggggcatgggagtgaccatcctcataggttttcaggaggttcattagagcatgtaagcggtcatggtgatgaaacattattggatattgcaaggcaggcacactctaagcatacaccaagagctgcatcattggagtacgatgtacatgatacgcatagtgaaccagagaacttacgtgggaatgtctcaatgacttcaaggcacacatctgtctcaacatctttgagaggtcttagggatgaaaggattaacgacaatctgaggttatcccgtaggattgaagaagatgagggtagcattgaatccatgcatcaggacacagagcacttaattcgtcattgttacaacggtgacgcttctgtacagtaccaaacagcaaggggtggtgatgatcactattcccactcccctggaactgaacctattggaattgcaaggcggctagctcatcaacatgagtttgattcctttggttactcaagtgatcaagaagcttcccttatggtttctaggaaaagatgcaggagtcctgaatatcatgatcatgagattgatatgtatcaagctgatcatgggtttgcaggacatgagcactatgatgatgatgttgttgatgaatatgatatacccccaccaagaatgtcacggtttgatgatgaatatgatgaaatacatgatgtgctagctaatcgtgatgttttctcaaggatttctttgccacatgaaaccaatcaggaatggactgatatggatcaggggaaccatcctcattctaacatcttgggttacgggtgttcaaaacacgtacctatgcatcagaggttgtctaaacccaattaccactcacaatttggggaaactcccatgcatggaagaggaagaggaagaggaggattgactaaaagtgccaaaaagggactgagaactgctcctcatcagttgcatgatgggtacccatcaggtagaaatgaatttgttagaccaaataaattttcaaagtcgtcaaaagatgaacttaatggttctgaagtgaagcatgaagatgctccagagtatgaggatgttcctctgcagaaagatccaccagaaggttcagaggagttcagtaaacaggttgatgaagcctttcttaagtacacaaagatattaaatgagagtccagctatgcagaagaaataccgggaggcgccaaaaggatctttgccatgctgtgtctgtggcaggtttgtcttcctttgcctgcgaactaaacagttcctcctctaacttcgttagcagttgcctacttgctggtatggttactggaatggagaaatccaaggaaaagttatgtcttctgtagtcacattaaaatgcacctcatactgtagataaactttataatttaatcatacagtttaagctaacatactgagttattgacatctttaggaaactggcataatattatgtagctttaatgcccattctgcccctcgttaaatcgaacctacatgttttatgtggggtgcgttactatctatatgtgcgattagtaggatgaaatggactcatgggcggacgtagtcacaaagttcctgggacgattaggtcgtggaacaggggatgaggaacatgatatgctccttaaaaaaggtttttcacttcggggatgatattgttcctggaacggaaacggcgttcccggtgacgaacatgtgatggtgctcatgggattgagtatgcataatgaaagattttgaggaaccatcatgtggatgtgctggactatggcaacattctcggtttaatgtccaatcacatgtctaaagcatgctggtgatttttataagaattcagacataaacattggcgcccaaaggtttgagcattggtctttgttgtgaactgcattctatcctgtggcgagatcagatggtgatgcagtttgaatggagttctgcattgcagtctttcaggtatatttgtacaatatggctgaaaggaagtaaaagtaacagcattgttctgttgatgaaaaaatagcttcagaattcagaatgttgtgccatgagttagttgggttgtcggatcttcttgttgataatgtttgacaccaaagacgaccgtgtcctgtgaagtcagctagctacattggcaaactgctctttctccatggtaacatggagtgaacactcggcaggccacatgtgcaaatttggagaccattaacatgtgcaaatttggagaccattgtgcaagtttggcaatttctttgtaggaataacattatggcaattttatcgagccctcaagcatgtttacttctttaggtcgtacctagcctaccagtaccagcgtattagaattttgctagcacagtttgaaaaccatgcgtgtgcaggtttgccaaatcaagattgcaaaggctgctgcttacatatacggtctggagaggtagagcagcctgagctatgcatgggctgtatggtggcatgctgctacttatttcttgcaagaatctgtaggttgaactattcgtctgaactaaccaagggttttgtttaaactataagtagggttttagggttctatttttatatcttacatatattgtttccctggttattggaacatgaattctcttgcatttgaaatccatgaaatctaattagttttactatggtattctatactaatacagtacagatcagctccatgtagactgctgtccttttcatgtcctatgttttaaatagtgtttgtagtggcatatcaactagtgccaagacaccacaccacgtatacatgtgtatcacttggttatagttatctatttataccaattttctatgagtgattatcgtaacctttgttttatcaaataaaaatgtgtttgctttattttttcaacaataactttagattactaagtgaagtatgctgttaatttgatttattttgcttgtgcaaactagatggcactgcattttgattaatttacatcaaatataagctcaggcacaggtccaaatgtttttttattggagcaggagcagtgtcccattatttcttctagttagtgcggcagagacttggggatcaatttttaacaaagttttatcttctgatgatttagtttgctatttgctctttgtgttccacttgatttttgtttgtgaaaattggtgactacacccttgtgaatcgttttaaatactgggatgtgaatgaccatgatcatggtgccctcaggaggattgttgaaattgtagcgaggaaatttctggaccttgatgcattgctatcacatgcttatgatacatgcaaggccggtttgaagacaaaacacttggggtttcacaaagcactgtgtgttctgatggggtggaattggcatgttgctccagacacatctaaatcacatcactccattccatctgaggaagtaaatgccatgaggggagacctcatgctgtggcctccagttgttgtgatacataacagctcgactggtcatgaggcaaaggatactgatgcaaagattgtgtccatagaagaaatcgaaggtgtattggcagatattggggtagcgcatgagaaggctagggttagccatggaagatcagccaatcagagcgtgttcctggtgaagttccagccaacaatatctgggttccaagaagccatgagagtgcatacccatttctccaccagaaaccatggcaaggaagagttccagctgatgaaaggcagcaaaggtaagaaggctgcctccactgatagcctggaagagctgctgtatgcgcatattggggtcgtggaagacctggggctgctggatgagggaacaaagaagagatgcaaggtcatgaggaagaaggaaattgaggcaaatgcagaggcaacactgaatttagaagtttattaggtctagtactaggatccgaaccatttgaagtggtcctcttttgcttcatcttgcagctgcttgcttgtccttgcggctgtaacgtcaaaagaagaaaagaagtgtaaattctgcttttgccattaaagagtgacgaaactcagttggcttctgtctgctggggaaggcctgcctcggtttgcatggcatggcaaggacataattttgtggctagatggggacaccttaacggcaaaagcagaattacctggtcgaagaaccgagtttaatctttatattatggaatcccttctttttttaagtcttttgctgcgtgaagttat

SEQ ID NO: 217107 - DNA, 2623 bp, Zea Mays
atgagtccctgactagtcagagagtggcccctacgcgcgcagccttaaccccatccgcagacatcagccggcgcctgtgttcctctccccgagccggtgcacgcaccacttcccccacttcgatctagcataatccgactccgccgactcgcctgaaccctagccagccgccgccatgccgccgcgacgcggtaggggaaagggtaagggtagggcaaagccaagagcgaagcccaccgagcccgagcccgagtccgatcccgaactagacgaagccgccaagtccgaaatcgaggcgggggacgcggaggctggggaggagtccagcgccgagagcgaggactcgaaggaagacgaatcggagagcgacaccgagtccatggatgcagaggccagcgaagaagctggcgagaacggaacggaggagatggatgcagagcctgaagccaaagccgtcgaggccaaggctgaaacggtggccacggaggcggaggcgaagcctgacgcctcggatgaagaagctggtgagactggctcagaccgcgaagcagatggcaagggtgctgatccgaaggcgaaagcggaggagtccgacggcgaggatgaggagggagccaccgccgtgaccgacggcgatagtgaagaggaagccgctgagacgggcggcgagagcgaagaggatggtggcgactccgacaccgaaggtgatgccgaggaatctcctccatcccctcctcgccgcagtcgccgccgtaagcgagcggccactcccgatgacgaagcagaggagacccctacgccgtcgcgtcgccggcgccgtcggaagtcaggggagcgtggtgactccccgccgccacttcctgaccacctccgctgccgtcgcagcgacgggaagaagtggcgctgctcgggccgtgcactcccaaccgttagcttttgcgagtaccactacgcgagggctaacaagggtaagaagttaccagcggatgaggaggtccttgctgttgttcttcagaggcagaagaacaagaggaagggcaggaggagcatcaatcctccgacgtcccctcaggcagccacgagtgacccccagaccagggatctcccaaatggactgatgacgatctcgccaggtagcagtggacctgcggcattgtcaactcctgtgaagattggtgtagaaattcctgcacccatacagcggtgctatcgttccaagaatgctgagccattgcctgttggtcctgtgaaggttgttcctcgtgcgatgagtgtgacaaaaacagcaagaacatgtcactgctgtggaatgaagaaggctgcacgtgtggccaattgcaagaactgtgataagaacttctgtaacagctgcattaataaatggtattctaagttgtccaggaaagatataaaggctcgttgtccagcttgccgtggtctctgcaattgtaaaccatgcagccttggtaattccaagggttctacgcctaaggaaccgccaaaagttgaaaggaagatacttagcataaaaatttccaaccatcaattttacaagcttttacctgtaagacttgaccaggaacagctagatgagttggaactggaagctaaaatacaaggaacaaaaatatctaatgtctgcgtccaggttgctgaaactggtcagagtgagtcactctactgtaataactgtaagctctcgatgagccgattattaaggtgctgcccaacatgcccgtttaagctgtgcctaagttgctgtcagaagatacgtgaaggaaacatgtcggacaacacccctgaagataaattcaagaatcggttgattcaacaagagtctgtccatgaggatggcagtattacttgcccttcgattgagctgggtggatgtggtgacgccatgctgaacctaatatattcatctccatctagccagtccgaagagctcagttcagaatgtgagctagatgctgcaggcaatcattctggagtgaaggatgctcaggctcatgggtcacctgtacctgagagtaatggaagattattggctgctgcccaggcagaaacagtgtctgaggaatgaagatgcagctatggttggctcatcgttcagtgctattccgatcgattcatcaacgcatgaagcaggtgcatccgccgcgatcgtcccctgctccgcagggcgccatgaacacgcccgtccgtggccttgggatggagcacttccacctgccgtgcccacagcttgacgatccacgatgcagccagccctcgaaacacccgcggagggagagagcgtgccgcgatggagttcttgaagaacggcagtgggagggtgagcagtgaatggataaacgatagggataggtgagaataggaacacacgggtgagcagtgaatgggttaaaaaatgttcttattttacactagtgttgttaaccattttttctattttatgaattatgactttctatctccatattccaaacagcacatttttctataacttccccatgctttgcatttatcggttttctcccttcattaccattttatccgtatggttcttactttaatacatcagtttttagacctattattttttaaaaagtttaacccaagt

SEQ ID NO: 217108 - DNA, 2185 bp, Zea Mays
ctgactagtcagagagtggcccctacgcgcgcagccttaaccccatccgcagacatcagccggcgcctgtgttcctctccccgagccggtgcacgcaccacttcccccacttcgatctagcataatccgactccgccgactcgcctgaaccctagccagccgccgccatgccgccgcgacgcggtaggggaaagggtaagggtagggcaaagccaagagcgaagcccaccgagcccgagcccgagtccgatcccgaactagacgaagccgccaagtccgaaatcgaggcgggggacgcggaggctggggaggagtccagcgccgagagcgaggactcgaaggaagacgaatcggagagcgacaccgagtccatggatgcagaggccagcgaagaagctggcgagaacggaacggaggagatggatgcagagcctgaagccaaagccgtcgaggccaaggctgaaacggtggccacggaggcggaggcgaagcctgacgcctcggatgaagaagctggtgagactggctcagaccgcgaagcagatggcaagggtgctgatccgaaggcgaaagcggaggagtccgacggcgaggatgaggagggagccaccgccgtgaccgacggcgatagtgaagaggaagccgctgagacgggcggcgagagcgaagaggatggtggcgactccgacaccgaaggtgatgccgaggaatctcctccatcccctcctcgccgcagtcgccgccgtaagcgagcggccactcccgatgacgaagcagaggagacccctacgccgtcgcgtcgccggcgccgtcggaagtcaggggagcgtggtgactccccgccgccacttcctgaccacctccgctgccgtcgcagcgacgggaagaagtggcgctgctcgggccgtgcactcccaaccgttagcttttgcgagtaccactacgcgagggctaacaagggtaagaagttaccagcggatgaggaggtccttgctgttgttcttcagaggcagaagaacaagaggaagggcaggaggagcatcaatcctccgacgtcccctcaggcagccacgagtgacccccagaccagggatctcccaaatggactgatgacgatctcgccaggtagcagtggacctgcggcattgtcaactcctgtgaagattggtgtagaaattcctgcacccatacagcggtgctatcgttccaagaatgctgagccattgcctgttggtcctgtgaaggttgttcctcgtgcgatgagtgtgacaaaaacagcaagaacatgtcactgctgtggaatgaagaaggctgcacgtgtggccaattgcaagaactgtgataagaacttctgtaacagctgcattaataaatggtattctaagttgtccaggaaagatataaaggctcgttgtccagcttgccgtggtctctgcaattgtaaaccatgcagccttggtaattccaagggttctacgcctaaggaaccgccaaaagttgaaaggaagatacttagcataaaaatttccaaccatcaattttacaagcttttacctgtaagacttgaccaggaacagctagatgagttggaactggaagctaaaatacaaggaacaaaaatatctaatgtctgcgtccaggttgctgaaactggtcagagtgagtcactctactgtgctattccgatcgattcatcaacgcatgaagcaggtgcatccgccgcgatcgtcccctgctccgcagggcgccatgaacacgcccgtccgtggccttgggatggagcacttccacctgccgtgcccacagcttgacgatccacgatgcagccagccctcgaaacacccgcggagggagagagcgtgccgcgatggagttcttgaagaacggcagtgggagggtgagcagtgaatggataaacgatagggataggtgagaataggaacacacgggtgagcagtgaatgggttaaaaaatgttcttattttacactagtgttgttaaccattttttctattttatgaattatgactttctatctccatattccaaacagcacatttttctataacttccccatgctttgcatttatcggttttctcccttcattaccattttatccgtatggttcttactttaatacatcagtttttagacctattattttttaaaaagtttaacccaagt

SEQ ID NO: 217109 - DNA, 2461 bp, Zea Mays
gctagcttctccgtgggcgcttgggcggagatctagatagcgctgcacgccgctgcttctccttccccgcgagtgtccgctccgtacgccggcgactacgatcctgtttctggtgaaagggagtgttgcattccccatcagcactgttactgacggccgccgcgtggtgttcccgacgtgtgctaccatctccaatacacccaatcctcaatgtgtcgacgatccacgcaggtccatgtctcaagaaaatggtctttccatggtgccactgaaaatggtcccttgcagcacatcgacatggtcctatcagattgcaagggtaatagtatgtatgctgaaataccagcaaatcttgccgaagaaaagggagcactcatcgaaacaaatcagatctacgacatcagtcgttttagagttactgcagcaaaaacagcctacaaacccattgatggtgacaagatgatacaatttacgatttacacaattatcaagcctgcaagtaacccaccacctacattttctttatatatctatcaattaactccatttgatgagattgaatctcaaattcagcacaagaccaaatttctagatgttcttggaactataaccgaggtaactgctttgaagacagtacacatagaaggacagctcagccccactattattagagacataatgatagaagatctaagccgcaaaactctcaaaatcactctttgggcaaaacgagcaacatcatttacaatacaaaatgtgtatgacccagttagcaaaaagccaattcttgctctttttgttggttgcctacctaaattctacaaaggtgtttacttaagtggtggtgcggcttgccattggtatttcaatcccgcaatacctgaagctgaagcgtaccaaaatagtataacaaagtattatgcttacaaacatggtggtgaaacaattcagctccaccttcctacacaaccggaacatgcactacaaaccttccaacctccaacaatagaacataaaactctggagcaactcctgacaatgaacccatatgattacccagacacgggatatgaatgcacagtgacagtcaccgaaatagatacatcaaacacatggtggtatccatcatgcacaaaatgcggccgaaaaacaactccacataatacaacatattattgtgatttgtgtaagtgggatggctacaaattcaaatacaagctcaaatttcgagcatcagatgcaacagccatagcacaaatgttttgctttgataacatagcacgatatattgttggcaaatcttgcaaagttatcttacgatctacaaatgcagcgacaccaattcctccagatttagctcagattgtttcactgaaattcacctttagagtaataccagatgacagttctttcgataaccaagaccaggtccccattgcccttcgcatcatctctataactgcagcgcatggtagacaacatgcactaccattgaagccaaccaatatcatagaaggtacatcaacaccacagaacaagttacaactgcagttaatcgagaactcaccatcaaatccttttcaaaatttatccacaagtactccaccacccaaacaggctacaaggaagctaatatatccaccgctcagtaaccccctcacatatcaacatactcccaagtctgatggcgaagaagaaattacagagcaaacaatggacaccagtcaaatcaaaggaaaaaaagtatgcactcattcgaatctcctccaaaaaggttcaagaaaggaagcttacatatccaaagcaatgatgacgatgtccaggagaactaaacacagatgtttagagcaccaaattttcttgcttttgacacgatgtcttctacaaactttggtgtaatccgatctaaaacgtatttgcctgccaaagtccctacgaactttcttttgatgtaaacaatatatccatgccgaaacaaatactacaactagaaaggcatgtagctatagttctgacatgtcatcttttgcggtctttaggaccaatattctggtgcctcaacaaatatgtacatataactaggaatttgctatcaactatggttagcttacaacccactgtaatataacacatccaatctggacgtgatcctatatttgcatatcccaacttttcagtggtacaaacatattcgtgcttgcatattttttcattcatattacataccgtcttctacgcatatattactaagatacaaattgcttatatacacccacaacatcaatttacttaatgtctatatacatcaaatcagctattcaattatgttataaaaaactcgtgcaaggcgcgagcaagtttctagtaaggggtaagaaaggggattgacctccggtcgcgtcgcgccctctcgcaagctcagagtcctcatcccgaaggcgatccacgtcgccacgagccc

SEQ ID NO: 217110 - DNA, 1122 bp, Zea Mays
actttgatatttcattaggatgctgagttggactcctcgatatgtggaagctcctactccaaactttcgtataatcttgctatctatgaatcaattcgaccccaagacaaattcagggcctcaaaagcatggtcgatatgaagatgatatgttctatacagcgcttgcattctctaaaactggatcagaaaaagaacttgattctacttcttattctcttccttacataatgacctcagagcgttacaacctactgtcctgatctggaatgaaaacttaattacaatatctaagtttgaagacaaaatatatgtgttgctgaacgatttgtccttgttgagaactgaaaccgatgctgtgtgggaaaggttaacgcaggcaaatggtgatggagtttttgttgattgtaactttgtgcctacagattctaagattcaatcagtactgccactgacgaaaactgaaagaaagaaaaggataaaagagaagatggatctgaagaagaaagagaaggatagtaacaaggacaaagatgatgaggataccaaggataaagatgatgggaaagaagaggatagtaacgaggacagagatgatgaggagaccgaggagaaagatgatgggaatgttgcccctcaaacctatttcttgcagggcaggcatatcaacttgaatgttaggcctatcaattttcttggactatctacccatgttatccaccagataaatgatggcccatgcgcccttattgcagcaatgttctattctcagggggacatctcttttgaaccacatgaaactgtggtgtcaatggagtatctacttggccttgtcctcgctcttcttggaggaagtgtgaaaatgcaggactattctgatgaaagaaaaagtcagatattgaatgtggtgaagagtctggccggagggtttgatatggatgttatcttcaccagaacggatggttttacaatgactccagagtggttgcttctggattgcttagatctcaaccttcgacatggttggattgctgctaggatcaatggagtattaaattctctagtcactgattctaattatttagaaactcgtgtagtttggcagacgcttgacgggatgtag

SEQ ID NO: 217111 - DNA, 1158 bp, Zea Mays
attaggatgctgagttggactcctcgatatgtggaagctcctactccaaactttcgtataatcttgctatctatgaatcaattcgaccccaagacaaattcagggcctcaaaagcatggtcgatatgaagatgatatgttctatacagcgcttgcattctctaaaactggatcagaaaaagaacttgattctacttcttgtgcaacaatctcaacatttttgcagggccctcagctaacccgatatggattctcttccttacataatgacctcagagcgttacaacctactgtcctgatctggaatgaaaacttaattacaatatctaagtttgaagacaaaatatatgtgttgctgaacgatttgtccttgttgagaactgaaaccgatgctgtgtgggaaaggttaacgcaggcaaatggtgatggagtttttgttgattgtaactttgtgcctacagattctaagattcaatcagtactgccactgacgaaaactgaaagaaagaaaaggataaaagagaagatggatctgaagaagaaagagaaggatagtaacaaggacaaagatgatgaggataccaaggataaagatgatgggaaagaagaggatagtaacgaggacagagatgatgaggagaccgaggagaaagatgatgggaatgttgcccctcaaacctatttcttgcagggcaggcatatcaacttgaatgttaggcctatcaattttcttggactatctacccatgttatccaccagataaatgatggcccatgcgcccttattgcagcaatgttctattctcagggggacatctcttttgaaccacatgaaactgtggtgtcaatggagtatctacttggccttgtcctcgctcttcttggaggaagtgtgaaaatgcaggactattctgatgaaagaaaaagtcagatattgaatgtggtgaagagtctggccggagggtttgatatggatgttatcttcaccagaacggatggttttacaatgactccagagtggttgcttctggattgcttagatctcaaccttcgacatggttggattgctgctaggatcaatggagtattaaattctctagtcactgattctaattatttagaaactcgtgtagtttggcagacgcttgacgggatgtag

SEQ ID NO: 217112 - DNA, 2025 bp, Zea Mays
tggttgactaacacacttagtgttaaataagtgtatgattttgatcgggattacaaagatataggcattgccctgtttacaactaaatactttgttgtgcggaattgcatggttaatgcgaaatgtgacaccttattgtctgcctggaacacacctcctggaaaaattaacatgcttcgtgtggatgccaagcaaggtgctcctaaggatggaagttctccacttgagctcttccaggtggagatctacccactgagaatatatctatctgaagcaatgtatagaatgatgtgggattacttcttccctgaagaagacgattcacaacgaagacaggaagtttggagagtttcaacatcaaccgggcctagaagaacaagaaggctctcttctggtgtcgatgctgttacttctagcagctattctgtcagagatcatgaacttcctgggaaatcaagtacaactgtatctacatcaacaaatgtttcaagttggcaaggtatactcagcgataactcacaggtgtcaaagtttcagagtataaaagcaaatatggtatgtggttcgcatcaagagttgcaccggtcgtcttcatttgaaaggaattgggaagaaagcgctgcagaaagtgttgcaagtaatgatgtggtatcactcctgaattcttcaattgtttcttcaaaagtagatgctagcaattctgtcttagagaaccctgttgtgggaagtgagatgtggagaagtaaaacgaaagattctaagcctgccaagtctggacgtctatctcacgaagaaaagaagcttgggaagtctaatgatgaaaagaagacaaaacctcggaagtcaatggaatttcataacatcaagattggcaaggttgaacttcttgttacatacgagggatcaaggcttgctattaatgacctaaggttgcttatggatactttccacaaggcagaatttactggtacatggaggcgactattctctagagtcaaaaaacatatcatctggggagttttgaagtcggtaaccggaatgcaggggaagaagtttagcaaccatagggaaacacttgagggttctattcctgaaaatgatcttaacttgagtgacagtgatgttggtcaacctggaagacatgatcaattaacagcttcatggttgaagaggccaggcgatggtgcaggtgatggatttgtcacgtcaattagggggcttttcaatacacagcgccgtaaagcgaaggcctttgtgattcggacaatgcgcggtgaagggcataatgacgaatatcaagacgaatggagcgagagcgatggtgaatacccttttgcgaggcagcttacaattacaaaggccaagaagctcatacgaaggaagttccgtccaagggtgcaaaagaacccaggtctgtcgatgcaagattcactcccatctagtccgcgggaaacaactccatatcaaagtgactcctccaggtcatcttacgaggacttccatgagcagtaaaacaatctggtgatgctgctttcagcttctacatttggtcgataagatgcagccatttatattggttatagtagggtgtatgtatatagtaggatgtaccatcaaaatccaatgtatcatgtatagtggttaggcaatactccgtaattatgtgcttgtaagttaataagaggccagctcgtactcctagaaaacaaaacccgtgatctatggcatggggcattctcattcccttgtacttcaggactagtatggattgtaaattcaacggtgaaggtgttgcaacatttattcagtaaagtatccttgttgaagaatttgtaaaaactatggcagaaacaatagggaaggagcaagtgactaggtgcctaggtgtattatgattcttttgctgactagttggaagttagaaatgcattgctccacgtcaaaaagaaatgcgtggcagacaaggttgttgcttaacagatcggtgagctatgaaatgctatctgttcacgtgtctagagtcta

SEQ ID NO: 217113 - DNA, 4910 bp, Zea Mays
ctagttagctagcattgtggcaacatgttttcaaccccaaatacaccaagagttgtatattggaagatggcaaaaggtcacgatgctacgttctgccagtggtactacgccagcaatgaaaatgtactctaatttacctatttatttccagaagggagagatatcttttggagttggttatgagccatctttcgctgatataagctatgcatttcaagtagccctgcggaaagttaaccttagcactagagcaagctgttctggtctagcagtccaactgcctaaaaaggagcgcagcttaccatggtgggatgacatgagatactacttgcatggaaagataattttatatttcaatgagaccaaatggaagttcctggcaacaactaatccttatgagcatgtggataaactccaaattgtctctgaatacatggagatccagcaaactgatggtcgtgtggatgtttctgcgaaagaattcaagatatacataagcagcgtagagagtattacaaagaaccgccgcataaaagttccatctcgtgtgcccagaccttttatatatgctcctctattctccctaaatgtggttattgattggcagtgcgaatctaggaatccattgaatcattatttgcatgcactccctgttgagggggaacctcggaagaaagtttatgatccatttcgatctacttatctctctcttaggtggaacttctccctcagaccattgcaatcccagtatggtaatggcccaccacctcccttttatggaaataattcaatgctccgtgggatcatgtctggtagtccttgcaaaatgactgatgatgacttccctaccatgaacctgggagctcatgaccttgcttgggttttcaaatggtggagcttgaattacagcccccctcacaaacttcgttccttctctagatggcgtcgttttggaattcctcgggctactagatctggtaacctctcgctggacaaagttttggttgaattctttttccgtgttgatgctactccctgttgcataaggcatgcacctttaagtgaggatgatgaccctgcttttggtttgacgtttaagatgtcaaatttgaagtacgagttatgttacagtcgaggtaaacaacagtacacatttgattgtaaacgtgaatcactggaccttgtttatcgtggtctggatcttcacaggccggaggtttatttgatgcgagataacaatttgtcttcagttgaaaatgtatccaaagtaaggactatggtccaacagtcacatggaaaatttgttcatgacagatgcaacatgggtaatttccaagaaaagcatgaggatggcttcctcttgtcttcagattatatcacgataagaaggcaaacacgtaaagcagatcctgaaagacttatgggatggcaggatactgggaggagtcatgagataacatatgttaggtctgagtttgaggatgacagtgaaagtgaccacactctatctgagcctagcgacgacgacgatgattttaatgtggtgcttgctgacaattgccaaagagtatttgtttatggccttaggattttatggactattgagaatcgagacgcggtttggtcgtgggttggaggaatttccaaagcatttgagcctccaaaaccctctccttcacgacaatatgcacaaagaaagatgattgaagaaaggaatgctgagggctccaaggtgccgcaagattccagctcttccatacatgtgggttctccatcagtgcaacatctggatgcttcgggttcatcttcctcgttgcatagtaaagccaatcgctcctctgatgtggctgtaaatcatgacatttttgatgattcggataaaggagggacagcccaatatatggttaatgttattacaccccaattcaacctacactctgaagaagcaaatggaaggtttctacttgctgcagccagtggtcgtgtactggctcgttcatttcattcagttgttcatcttgggaaagaaatactagaacaagcacttggaacaagcagtgcacagattcttgagttacaacctgaaatgacctggaacaagtcggaactctcggtgatgcttaaagatgttcaagctcatgtagcccccactgatgtggatcctggtgctggtctacagtggctccctaaggttctgggtagctctgagaaattgaagcgcacaggttaaaccactgaaggagctacgctttaactctccagacattactgcaacgatgacctctcgccagtttcaagttatgtttgacgtgcttagaaatcttctattcgcaagacttcccaagcctaggaaaaacagtcttcagtatccatcagatgatgaagatattgaagaagaggctgacgaggtagtacctgatggagttgaagaagtggagcttgcgaaaattacactcgaacagagggaaagggaaattaagttactgcttgatgatataaggtctctcactggaaatggtgataatgggaccgatcactgtcattctgcagaaaaaggtgattgtttatggatgatcaacagcgggaaagcttcattggtggaaggactgaaaagggatttcgcaaacctacaaaagtctagaatatttgcatcatcagcattgaggaaagcactttcaaatgcttcacaatcacatttggagaaagaaaagaacaaaaccacttcttgtgccatgcggatttctatgaaaattagcaaggttgtatggagcatgctcgcagatggaaacacttttgcagaagctgagatcaatgatatggtgtgtgctcagccttgtcccttcacctctgtggctgtctgtagcttcaatcgggttggagagagcgagaggcgtcaaggaggatgaacggcgagggtgtatgattttgatcgggattacaaagatataggcattgccctgtttacaactaaatactttgttgtgcggaattgcatggttaatgcgaaatgtgacaccttattgtctgcctggaacacacctcctggaaaaattaacatgcttcgtgtggatgccaagcaaggtgctcctaaggatggaagttctccacttgagctcttccaggtggagatctacccactgagaatatatctatctgaagcaatgtatagaatgatgtgggattacttcttccctgaagaagacgattcacaacgaagacaggaagtttggagagtttcaacatcaaccgggcctagaagaacaagaaggctctcttctggtgtcgatgctgttacttctagcagctattctgtcagagatcatgaacttcctgggaaatcaagtacaactgtatctacatcaacaaatgtttcaagttggcaaggtatactcagcgataactcacaggtgtcaaagtttcagagtataaaagcaaatatggtatgtggttcgcatcaagagttgcaccggtcgtcttcatttgaaaggaattgggaagaaagcgctgcagaaagtgttgcaagtaatgatgtggtatcactcctgaattcttcaattgtttcttcaaaagtagatgctagcaattctgtcttagagaaccctgttgtgggaagtgagatgtggagaagtaaaacgaaagattctaagcctgccaagtctggacgtctatctcacgaagaaaagaagcttgggaagtctaatgatgaaaagaagacaaaacctcggaagtcaatggaatttcataacatcaagattggcaaggttgaacttcttgttacatacgagggatcaaggcttgctattaatgacctaaggttgcttatggatactttccacaaggcagaatttactggtacatggaggcgactattctctagagtcaaaaaacatatcatctggggagttttgaagtcggtaaccggaatgcaggggaagaagtttagcaaccatagggaaacacttgagggttctattcctgaaaatgatcttaacttgagtgacagtgatgttggtcaacctggaagacatgatcaattaacagcttcatggttgaagaggccaggcgatggtgcaggtgatggatttgtcacgtcaattagggggcttttcaatacacagcgccgtaaagcgaaggcctttgtgattcggacaatgcgcggtgaagggcataatgacgaatatcaagacgaatggagcgagagcgatggtgaatacccttttgcgaggcagcttacaattacaaaggccaagaagctcatacgaaggaagttccgtccaagggtgcaaaagaacccaggtctgtcgatgcaagattcactcccatctagtccgcgggaaacaactccatatcaaagtgactcctccaggtcatcttacgaggacttccatgagcagtaaaacaatctggtgatgctgctttcagcttctacatttggtcgataagatgcagccatttatattggttatagtagggtgtatgtatatagtaggatgtaccatcaaaatccaatgtatcatgtatagtggttaggcaatactccgtaattatgtgcttgtaagttaataagaggccagctcgtactcctagaaaacaaaacccgtgatctatggcatggggcattctcattcccttgtacttcaggactagtatggattgtaaattcaacggtgaaggtgttgcaacatttattcagtaaagtatccttgttgaagaatttgtaaaaactatggcagaaacaatagggaaggagcaagtgactaggtgcctaggtgtattatgattcttttgctgactagttggaagttagaaatgcattgctccacgtcaaaaagaaatgcgtggcagacaaggttgttgcttaacagatcggtgagctatgaaatgctatctgttcacgtgtctagagtcta

SEQ ID NO: 217114 - DNA, 8757 bp, Zea Mays
ctgctacagtgctgcccctctcgctctgacttgtgaaaagtcctgaggatacaaggtagtaagcggcatctcgtctcgtctccccagtccccaccccgagatcgctcgtcgccgccgccgtctctttactgaacagggattccctcgcggaccgcggcccgaccgcctccccgaagctagggttcgagggaggttatgccggcgctgtcgcaggcacggatccgggcggcgtgacgcggatccgccggacgctggcagggtcggccatggcgtcctccccagtcaagttcttctcggtgttcctggccgtctccgtcgtcggatggatcgtcttcacgtttgcttcaagattgttagcttggttcttgagccgtgtattctctgcttctgtcggatttcgagttgctggtttcaactgtttgagggatgtaacaataaagttctgtaagggttcagttgaatctgtttcgattggtgaaataaaactaagtttccgcaagtctctagtcaaactaagttttggtgttatctcaaaagacccgaagttgcaattgcttataaatgatctcgaaattgtaactagatcatcttctgaaaataaaaagatacgaaagtcagcaaagcctcgctctacaggaaaagggaaatggctggttacatcaagcatggcaagacttttatcagtttccgtgacagatctgataatcaaggtaccgaaaggcgctcttgacatcaaagaactaacggtggatacatttaaaattgctgggcctaatcatactcttggtgtcaagttgcatcttttacctttgaatatactccttggagatttgggattgactactgatccaatgggcagttgtagtctgtttgatgctttccagtctgatcaagcttctgtatctaactcagagaaaagcttggccccatttgtttgtgaagatttgttggttacttgtaaccttggccatgaaaaggagaaaggtattaaaatcattaacctggaattgaaatgtgggtatgctattgccaacattgatgaaaggatgtttcacaagaagcgcacgattccagaatataacactgtctctttgaacaccggagattctatcacagatacttcagcgctcaaacaaacatcgaaaagcaaatctattctaccgctgttaaagaaacacatgctcacatttccagataagcttcagtgtgccgaagcttgatgtgaagttcagacacctgcatgaaggacttagtgttgacaacaacattacagggatccagtttacttgtgcaaaatccctaccacaagatgattttgaagaagcgacaccacacttcgatgttcaaattgatcttagcgaaattcatttaattagagaaggttctagttctctgttggaagttctgaaagtttttacaatagcttctttggatgtccctgttgacccatttcttccaatcagagctgagattgatgccaagcttggtggtacccaatgcaatattatgttaagcagactgatgccatggatgcggcttcattctttgagaaccaaaggaatgaaactttctaaaagaaactccaatcaagaaatttctcaaaaaaaggagatgaagccaattttgtggacttgcacggtcgctgccccagaaatgactgtcttgctttacagtctaaatggattggtcttgtaccatgcttgttcccagtcatcacatttgtttgcaaataatattgcaagcaaggggattcagatacacacagaacttggtgaattgctggtgcacatggaggaggaatatagagagttattaaaggaaaacatatttggtgtggatacttactctggttccctaatgcatattgctcggatgagccttgattggggatatagggaaagtgatgtccaagatatggttgaaactagcaggaatgcacttgttttttcgattgatataagtgatatggaagtgaaatttggcttcaagcatttggaatcaattgtgcttaatttgatgtcgtttaggactctatttaagagtctccagctatctggcggaagtgctaaagaaaagaatttggagcgtaaaggggagaagaaaatgaaaggtgtgaagaaactgaaattaagcctacaaaaattctctattacatactgtggtgatgcaaacataataagtatgccaattgctgatccaaagcgtgtgaactacggctctcaaggtggtcaagtaattgttagtgtttctgctgatggcacaccacgtagggcaagtataacatcagttttaccagactgccacttgcggttctccgcatctttggtaatatctcatctctctatgtgtatagacaaggagagaaagacaacagaagcggaattggaacgggtgaaggcaatctatgaggaattacctgaggatcgctctggtgtcagagtaactttactagatatgcagaatgctaaaattgttcgccgatccagtggtcatgcggaagttgctgtttgttccctctttagtgctactgatatttatttgagatgggaacctgatgctcatttagcactatatgagacattcatccgctttaagcatttcctacatcataatgtgtcccaaaattctgaaaagatgattaatactgaagttgcaagtaccaaatcaaatgaacatggcaacataactgccggtttcattaattctcagaaatccaacagaaaagggtcaatttttgccattgatgtggacatgttaagggtatctgctgaacttgctgatggtgttgaagcaaacatgcatgtacagtcaatctttactgaaaatgccaagataggtgtactgtctgaaggtctttctcttacttttaatggcgctagagttctaaagagcacccgtatacaaatatcctgtatacctttcagcactgggagtttacttgatgcaaagattgaaccatcatccaaaagagactgggttgttcaaggtctagatgtccatatttgcatgccttacaggttgccattgcgtgccatagaagatgctgttgaagatatgtttcgtgcccttaagcttgtctcatctgccaaaagaagtataatctgtcctgatgaaaaggaaaaatctagaaaggttaattctgggggatccaaatttggatctgtgaaatttgtattgcgtaaattgacagcagatatagaggaagagcccatccaaggttggctcgatgaacattaccatttgatgaggaacaaaatctgtgagctaggtgttaggttgaattatcttgaggaagctatatcaggaagtgtagatccgagcaatcacagctctgagagaaaagttctctacaatggtgttgaagttgacattcatgacaccacagctcttcaaaagttgcaggaagaaatccataagcaagcatttcgatcatattatgtgtcttgtcagaacatggtacttgcagaagggtcaggagcgtgctcagaaggttttcaagctggattcagacaaagctcgcgaagagcttctcttctttcactttctgcttccgatctggatgttactttgaccaggatagatggtggagagatagaaatggttgaatttataaaggggcttgaccctgtctgtcaggagcaaaacataccattttctcggttgtatggtagtgatgtttctgtcgttgctgggtccttggttgtacagctaagagactatacttctcctctgttctcttcactcagtgggaaatgtcaaggccgtattgtgcttgctcagcaggcaacatgttttcaaccccaaatacaccaagagttgtatattggaagatggcaaaaggtcacgatgctacgttctgccagtggtactacgccagcaatgaaaatgtactctaatttacctatttatttccagaagggagagatatcttttggagttggttatgagccatctttcgctgatataagctatgcatttcaagtagccctgcggaaagttaaccttagcactagagcaagctgttctggtctagcagtccaactgcctaaaaaggagcgcagcttaccatggtgggatgacatgagatactacttgcatggaaagataattttatatttcaatgagaccaaatggaagttcctggcaacaactaatccttatgagcatgtggataaactccaaattgtctctgaatacatggagatccagcaaactgatggtcgtgtggatgtttctgcgaaagaattcaagatatacataagcagcgtagagagtattacaaagaaccgccgcataaaagttccatctcgtgtgcccagaccttttatatatgctcctctattctccctaaatgtggttattgattggcagtgcgaatctaggaatccattgaatcattatttgcatgcactccctgttgagggggaacctcggaagaaagtttatgatccatttcgatctacttatctctctcttaggtggaacttctccctcagaccattgcaatcccagtatggtaatggcccaccacctcccttttatggaaataattcaatgctccgtgggatcatgtctggtagtccttgcaaaatgactgatgatgacttccctaccatgaacctgggagctcatgaccttgcttgggttttcaaatggtggagcttgaattacagcccccctcacaaacttcgttccttctctagatggcgtcgttttggaattcctcgggctactagatctggtaacctctcgctggacaaagttttggttgaattctttttccgtgttgatgctactccctgttgcataaggcatgcacctttaagtgaggatgatgaccctgcttttggtttgacgtttaagatgtcaaatttgaagtacgagttatgttacagtcgaggtaaacaacagtacacatttgattgtaaacgtgaatcactggaccttgtttatcgtggtctggatcttcacaggccggaggtttatttgatgcgagataacaatttgtcttcagttgaaaatgtatccaaagtaaggactatggtccaacagtcacatggaaaatttgttcatgacagatgcaacatgggtaatttccaagaaaagcatgaggatggcttcctcttgtcttcagattatatcacgataagaaggcaaacacgtaaagcagatcctgaaagacttatgggatggcaggatactgggaggagtcatgagataacatatgttaggtctgagtttgaggatgacagtgaaagtgaccacactctatctgagcctagcgacgacgacgatgattttaatgtggtgcttgctgacaattgccaaagagtatttgtttatggccttaggattttatggactattgagaatcgagacgcggtttggtcgtgggttggaggaatttccaaagcatttgagcctccaaaaccctctccttcacgacaatatgcacaaagaaagatgattgaagaaaggaatgctgagggctccaaggtgccgcaagattccagctcttccatacatgtgggttctccatcagtgcaacatctggatgcttcgggttcatcttcctcgttgcatagtaaagccaatcgctcctctgatgtggctgtaaatcatgacatttttgatgattcggataaaggagggacagcccaatatatggttaatgttattacaccccaattcaacctacactctgaagaagcaaatggaaggtttctacttgctgcagccagtggtcgtgtactggctcgttcatttcattcagttgttcatcttgggaaagaaatactagaacaagcacttggaacaagcagtgcacagattcttgagttacaacctgaaatgacctggaacaagtcggaactctcggtgatgcttaaagatgttcaagctcatgtagcccccactgatgtggatcctggtgctggtctacagtggctccctaaggttctgggtagctctgagaaattgaagcgcacaggtgccttgttagagagagtgtttatgccttgtcaaatgtatttccgttacactagacacaagggtggaactgcagacttgagggttaaaccactgaaggagctacgctttaactctccagacattactgcaacgatgacctctcgccagtttcaagttatgtttgacgtgcttagaaatcttctattcgcaagacttcccaagcctaggaaaaacagtcttcagtatccatcagatgatgaagatattgaagaagaggctgacgaggtagtacctgatggagttgaagaagtggagcttgcgaaaattacactcgaacagagggaaagggaaattaagttactgcttgatgatataaggtctctcactggaaatggtgataatgggaccgatcactgtcattctgcagaaaaaggtgattgtttatggatgatcaacagcgggaaagcttcattggtggaaggactgaaaagggatttcgcaaacctacaaaagtctagaatatttgcatcatcagcattgaggaaagcactttcaaatgcttcacaatcacatttggagaaagaaaagaacaaaaccacttcttgtgccatgcggatttctatgaaaattagcaaggttgtatggagcatgctcgcagatggaaacacttttgcagaagctgagatcaatgatatggtgtgtgctcagccttgtcccttcacctctgtggctgtctgtagcttcaatcgggttggagagagcgagaggcgtcaaggaggatgaacggcgagggtgtatgattttgatcgggattacaaagatataggcattgccctgtttacaactaaatactttgttgtgcggaattgcatggttaatgcgaaatgtgacaccttattgtctgcctggaacacacctcctggaaaaattaacatgcttcgtgtggatgccaagcaaggtgctcctaaggatggaagttctccacttgagctcttccaggtggagatctacccactgagaatatatctatctgaagcaatgtatagaatgatgtgggattacttcttccctgaagaagacgattcacaacgaagacaggaagtttggagagtttcaacatcaaccgggcctagaagaacaagaaggctctcttctggtgtcgatgctgttacttctagcagctattctgtcagagatcatgaacttcctgggaaatcaagtacaactgtatctacatcaacaaatgtttcaagttggcaaggtatactcagcgataactcacaggtgtcaaagtttcagagtataaaagcaaatatggtatgtggttcgcatcaagagttgcaccggtcgtcttcatttgaaaggaattgggaagaaagcgctgcagaaagtgttgcaagtaatgatgtggtatcactcctgaattcttcaattgtttcttcaaaagtagatgctagcaattctgtcttagagaaccctgttgtgggaagtgagatgtggagaagtaaaacgaaagattctaagcctgccaagtctggacgtctatctcacgaagaaaagaagcttgggaagtctaatgatgaaaagaagacaaaacctcggaagtcaatggaatttcataacatcaagattggcaaggttgaacttcttgttacatacgagggatcaaggcttgctattaatgacctaaggttgcttatggatactttccacaaggcagaatttactggtacatggaggcgactattctctagagtcaaaaaacatatcatctggggagttttgaagtcggtaaccggaatgcaggggaagaagtttagcaaccatagggaaacacttgagggttctattcctgaaaatgatcttaacttgagtgacagtgatgttggtcaacctggaagacatgatcaattaacagcttcatggttgaagaggccaggcgatggtgcaggtgatggatttgtcacgtcaattagggggcttttcaatacacagcgccgtaaagcgaaggcctttgtgattcggacaatgcgcggtgaagggcataatgacgaatatcaagacgaatggagcgagagcgatggtgaatacccttttgcgaggcagcttacaattacaaaggccaagaagctcatacgaaggaagttccgtccaagggtgcaaaagaacccaggtctgtcgatgcaagattcactcccatctagtccgcgggaaacaactccatatcaaagtgactcctccaggtcatcttacgaggacttccatgagcagtaaaacaatctggtgatgctgctttcagcttctacatttggtcgataagatgcagccatttatattggttatagtagggtgtatgtatatagtaggatgtaccatcaaaatccaatgtatcatgtatagtggttaggcaatactccgtaattatgtgcttgtaagttaataagaggccagctcgtactcctagaaaacaaaacccgtgatctatggcatggggcattctcattcccttgtacttcaggactagtatggattgtaaattcaacggtgaaggtgttgcaacatttattcagtaaagtatccttgttgaagaatttgtaaaaactatggcagaaacaatagggaaggagcaagtgactaggtgcctaggtgtattatgattcttttgctgactagttggaagttagaaatgcattgctccacgtcaaaaagaaatgcgtggcagacaaggttgttgcttaacagatcggtgagctatgaaatgctatctgttcacgtgtctagagtcta

SEQ ID NO: 217115 - DNA, 3073 bp, Zea Mays
tagaagttggtgtagccacccaccctaaccctagatccgctttggtctctggaatctggaagtcaccggatccacaactcgcccctctggccgcctccgtcctccgccttatcggccgccgcctcctccttcgtcagtcgcatgtctctcgaggacgagaagcctttcttcgtcgtcgctgtcgtccccaactgggtgatgctagagcgcgtcgtcttccgcagggacgacgagtccttctcggacggaagcgaggccatcgtggcgaccgaccggcatcgcgtcctgtttcgcgtcggcaccatgatgttcgcaagtctggttcaggaattcttcatctacagcacctcaggtgccgacacttcctcttcgctgactgcgctcccgccttgtgccgagcctgacatggattgtagccgccgtgagggccgcctacctcgtaaacgtgcttctcggggatgacgcctactggcggtcaggtccatgggcctcctgtgccgaggcgaagaagagttcgcggtggtagagctgtaggtttacaagcacaactgctacatggcctttgctgacatctacttgttcctgaaatcagctggcaaatgagactccatgcgtttgcccatcctctgcagcaccgaccccaatgtgatctggcaactttgcttatggcagaccgacacggttatcctggtcgaccgctggctttgctgggttgactatgagcgaggcatccttttctacgatatgtttggggagcccagccctactgttatcttcagccagttccctctggacaagttccctgacaacaacactcgcaacaaggactgctgctggttgtaccgcagcatgtcgaccacccgtgaggggggtgcgctcctgttcaccaacggctggtgctggcttcactatcaggtgccactccctcatgttatgcaacatcacggagccgaacacggttgggtgtgtatgggaagaggactacacggtcacctccgatgagctttggtctgccaaccctgagtgcctaccgcatgacattctcatgttcccccaagctgacatggacaggccacatgtagtgcactttgtcatcagcgagttcggatacgtgagaaagaatatgtagctggtcaccattgacatgagcaccaggagagtggagtcattttctcagtataccaatgggaggcagtatgccattggaaccgagggcgcttacttgaccaaaataagtgatgatgtgaaggatatgaaaccaccgaatgatcgcattctgattaaggttgctgctggtggtttgctattgacgcaggcaactaaggagaaaccttctgttggatcagtgagtattttaggtttagtatatgctggatttgcagtaatttattcgattatctgtttattatgaaaaactcggtcggggagggaaagagaaagaccgcactcccgatattatattaagaaaaaaccgaaacatggttccggccaaaaaaaaattcctcgaacctggccgtccatcactagcaggccgtcaccgcccactctgcaacggtccagccggagggtggcgtgcaggacgtaacccgagagcagacggggcatagcgagaggattttttaatcaagccagaaattcgtccccgagggggatcgaacccgggacctgggtgctactcggaagcattgaccattacgctagaggccttaatcattatctgttgattatgattgtttatgttttcaaattatgaacacatggtcaacaactgaatcctttcaaagatttacttattttgatttgggccttttttgaatctacatgttaaatgcatcaatggtgcatttaacatgttctagacttctagtggactagtaacagctgagtatgaggtttgctcgactttttaagtttcaacagttttattatacttacaagttgcaaggattggatttgttttgaataagctgcagattttggccagtaattgatgtcctttagttgtctcgtacttgtgtggttcgcgcgctagaggtttggggatgttactatgtctatagagaaaaacacaagacagaatttagcttgcagctgttagtgcagctgcctaagagttacaatggaggttaggggatgttacaatagggtgccgccttgactggagggaggctggcggcggggggctggaagacgggacctggcaggtggcatgaaggccgacagtggaggacggctggcatggaggtgggcgatgcctgctgcggagagcagggaggtggggaagacgggactggggggcggtcacaggggaggcgccgcggaaggaggcgtagaggacaggggtgggggccagaggggccatgtgggggaaaatcatttcgcttacaatataagcgctttccaggccgcgtactagaaaatcgggatggacgttgtattttggatggtgggctaagcggcttgagaattaagcaaggtgtttgggtggacttatggcttagtttcaccaataagcgggaaataagcagatacaaacagggccttagtgaaggtaagcagtaggcccatgaacaatggattgtcaataccatggtttaaaagtcgtcgcctaggcgtcgcctaggcgacgcctaggcgtccaggcggggaaatcttctaggcgtcggcgccgcccagaggaaatcgtgtatggcgtccgccttggcgaggtaggcgtccgccttggcgtcgtaggcgtctgggcgacgccttttcctccctgggcgacgccttatctcgttttgggctttagggttttggcggctaggcgcgcgttctgttttgggcctgttccactgtgcgcgcgcggcaaaaatacattgtgcgtgcgcggcgccgcggctgctccttcgcgcgcaaatctctctgcgctctctccctgctgctcctctctccctgcgcgcggcggctgctcctctctccctgcgcgcggcggctgctctgcgcgcggcggctgctgcgttctccctgcgcgcgcgcggctgctgcgtgctcccagcgcgcggctccctgctaccagcgcgcggctgctgct

SEQ ID NO: 217116 - DNA, 3180 bp, Zea Mays
tagaagttggtgtagccacccaccctaaccctagatccgctttggtctctggaatctggaagtcaccggatccacaactcgcccctctggccgcctccgtcctccgccttatcggccgccgcctcctccttcgtcagtcgcatgtctctcgaggacgagaagcctttcttcgtcgtcgctgtcgtccccaactgggtgatgctagagcgcgtcgtcttccgcagggacgacgagtccttctcggacggaagcgaggccatcgtggcgaccgaccggcatcgcgtcctgtttcgcgtcggcaccatgatgttcgcaagtctggttcaggaattcttcatctacagcacctcaggtgccgacacttcctcttcgctgactgcgctcccgccttgtgccgagcctgacatggattgtagccgccgtgagggccgcctacctcgtaaacgtgcttctcggggatgacgcctactggcggtcaggtccatgggcctcctgtgccgaggcgaagaagagttcgcggtggtagagctgtaggtttacaagcacaactgctacatggcctttgctgacatctacttgttcctgaaatcagctggcaaatgagactccatgcgtttgcccatcctctgcagcaccgaccccaatgtgatctggcaactttgcttatggcagaccgacacggttatcctggtcgaccgctggctttgctgggttgactatgagcgaggcatccttttctacgatatgtttggggagcccagccctactgttatcttcagccagttccctctggacaagttccctgacaacaacactcgcaacaaggactgctgctggttgtaccgcagcatgtcgaccacccgtgaggggggtgcgctcctgttcaccaacggctggtgctggcttcactatcaggtgccactccctcatgttatgcaacatcacggagccgaacacggttgggtgtgtatgggaagaggactacacggtcacctccgatgagctttggtctgccaaccctgagtgcctaccgcatgacattctcatgttcccccaagctgacatggacaggccacatgtagtgcactttgtcatcagcgagttcggatacgtgagaaagaatatgtagctggtcaccattgacatgagcaccaggagagtggagtcattttctcagtataccaatgggaggcagtatgccattggaaccgagggcgcttacttgaccaaaataaggttggtgcacaagttgtgtactcgaaatatgcaggcacagaattgaaattcaatgacgccgaccatctcattttgaaataagatgacataattggtattcttgacagtgatgatgtgaaggatatgaaaccaccgaatgatcgcattctgattaaggttgctgctggtggtttgctattgacgcaggcaactaaggagaaaccttctgttggatcagtgagtattttaggtttagtatatgctggatttgcagtaatttattcgattatctgtttattatgaaaaactcggtcggggagggaaagagaaagaccgcactcccgatattatattaagaaaaaaccgaaacatggttccggccaaaaaaaaattcctcgaacctggccgtccatcactagcaggccgtcaccgcccactctgcaacggtccagccggagggtggcgtgcaggacgtaacccgagagcagacggggcatagcgagaggattttttaatcaagccagaaattcgtccccgagggggatcgaacccgggacctgggtgctactcggaagcattgaccattacgctagaggccttaatcattatctgttgattatgattgtttatgttttcaaattatgaacacatggtcaacaactgaatcctttcaaagatttacttattttgatttgggccttttttgaatctacatgttaaatgcatcaatggtgcatttaacatgttctagacttctagtggactagtaacagctgagtatgaggtttgctcgactttttaagtttcaacagttttattatacttacaagttgcaaggattggatttgttttgaataagctgcagattttggccagtaattgatgtcctttagttgtctcgtacttgtgtggttcgcgcgctagaggtttggggatgttactatgtctatagagaaaaacacaagacagaatttagcttgcagctgttagtgcagctgcctaagagttacaatggaggttaggggatgttacaatagggtgccgccttgactggagggaggctggcggcggggggctggaagacgggacctggcaggtggcatgaaggccgacagtggaggacggctggcatggaggtgggcgatgcctgctgcggagagcagggaggtggggaagacgggactggggggcggtcacaggggaggcgccgcggaaggaggcgtagaggacaggggtgggggccagaggggccatgtgggggaaaatcatttcgcttacaatataagcgctttccaggccgcgtactagaaaatcgggatggacgttgtattttggatggtgggctaagcggcttgagaattaagcaaggtgtttgggtggacttatggcttagtttcaccaataagcgggaaataagcagatacaaacagggccttagtgaaggtaagcagtaggcccatgaacaatggattgtcaataccatggtttaaaagtcgtcgcctaggcgtcgcctaggcgacgcctaggcgtccaggcggggaaatcttctaggcgtcggcgccgcccagaggaaatcgtgtatggcgtccgccttggcgaggtaggcgtccgccttggcgtcgtaggcgtctgggcgacgccttttcctccctgggcgacgccttatctcgttttgggctttagggttttggcggctaggcgcgcgttctgttttgggcctgttccactgtgcgcgcgcggcaaaaatacattgtgcgtgcgcggcgccgcggctgctccttcgcgcgcaaatctctctgcgctctctccctgctgctcctctctccctgcgcgcggcggctgctcctctctccctgcgcgcggcggctgctctgcgcgcggcggctgctgcgttctccctgcgcgcgcgcggctgctgcgtgctcccagcgcgcggctccctgctaccagcgcgcggctgctgct

SEQ ID NO: 217117 - DNA, 2905 bp, Zea Mays
tagaagttggtgtagccacccaccctaaccctagatccgctttggtctctggaatctggaagtcaccggatccacaactcgcccctctggccgcctccgtcctccgccttatcggccgccgcctcctccttcgtcagtcgcatgtctctcgaggacgagaagcctttcttcgtcgtcgctgtcgtccccaactgggtgatgctagagcgcgtcgtcttccgcagggacgacgagtccttctcggacggaagcgaggccatcgtggcgaccgaccggcatcgcgtcctgtttcgcgtcggcaccatgatgttcgcaagtctggttcaggaattcttcatctacagcacctcaggtgccgacacttcctcttcgctgactgcgctcccgccttgtgccgagcctgacatggattgtagccgccgtgagggccgcctacctcgtaaacgtgcttctcggggatgacgcctactggcggtcaggtccatgggcctcctgtgccgaggcgaagaagagttcgcggtggtagagctgtaggtttacaagcacaactgctacatggcctttgctgacatctacttgttcctgaaatcagctggcaaatgagactccatgcgtttgcccatcctctgcagcaccgaccccaatgtgatctggcaactttgcttatggcagaccgacacggttatcctggtcgaccgctggctttgctgggttgactatgagcgaggcatccttttctacgatatgtttggggagcccagccctactgttatcttcagccagttccctctggacaagttccctgacaacaacactcgcaacaaggactgctgctggttgtaccgcagcatgtcgaccacccgtgaggggggtgcgctcctgttcaccaacggctggtgctggcttcactatcaggtgccactccctcatgttatgcaacatcacggagccgaacacggttgggtgtgtatgggaagaggactacacggtcacctccgatgagctttggtctgccaaccctgagtgcctaccgcatgacattctcatgttcccccaagctgacatggacaggccacatgtagtgcactttgtcatcagcgagttcggatacgtgagaaagaatatgtagctggtcaccattgacatgagcaccaggagagtggagtcattttctcagtataccaatgggaggcagtatgccattggaaccgagggcgcttacttgaccaaaataaggtccggctgtcccatgtccttcctcccctctgagttctccaagtacctctgttaggtaatattgttgctggcttttatctatcacctaactaattttttgctggttgcacacgtattgctgtatgtatgcaagttcttcactttaatcttgttagcattagaatttcactacggggagagcagcctatttatccaaccagaacagtaatgtatcctgcaggctacttagtgaaagataagaaataggcttatgaacgatagagttaggccctgtttgtagtcgcttttcaggaactcgattctctgggtagcagcttgtttgataattttgctgtccagagaatctgctgcctcaataagctgagtttttggctatcctgattatagctgtaaaacgacctgaatgcccgagttgataatagctcatagccaataattgtaatgtcttttgagtttgttaaatagaaattgctgtacaataaagatagataggtctaaaatatggctacagtattatacaattaaatataaatctaccgtgtgtatcgatcatggacaagtgctgtcaatctatccattgcagagcagcagcaaaaacaatgaacggagagctgcattagaaatacatagatgtagggaggccggcaccttggaggagctcggtgtggcctgcgggtgaccataaataaagtagctgtatgttttgtatgctaagattttttctgtatccaatcttcttctaggtttgaacttctaattttggaagacaattttcctcatggccttgtcaccagacaccagtaacattttttttccgttgtaacacacttgtactgtcctaagccaattgagtaacttgacattgatttataatcttgtacaggttggtgcacaagttgtgtactcgaaatatgcaggcacagaattgaaattcaatgacgccgaccatctcattttgaaataagatgacataattggtattcttgacagtgatgatgtgaaggatatgaaaccaccgaatgatcgcattctgattaaggttgctgctggtggtttgctattgacgcaggcaactaaggagaaaccttctgttggatcaatggttccacaagaaaggcttttgtcgtgttggtcaggaaaattgggtgagctatttactaagttgtggcctaggaaagatcttatgttcttactaatatgatgtacgaacgctggataagttgtgtaagttggtggtgtgctcagtaggttggtagaaaaggttgtggtgtgttggacttttaagcagagtctcaaattatgttatttgagcatgtgtcacttggtccttgaacttgcctgtgatgtaccaagtttgcatgtgaaatttaatctctaaagagatgaaactgtgcactgccggatgaaaattcatctatctcctttctgctctacatagtcatcaatccattcataaccaagcaggaagccttccctgcaaaaaatattctaactgccaagtgccaatcaaggaaagacttggttatgcatactgcatggatgcaacgactgtgggcatgcagggatgggatgaaactggcggaacggcgcggtgctgtgaaactgtgcattgaatctgagctggtgcagctttgggagtccagggagacacgccggccagtcattacac

SEQ ID NO: 217118 - DNA, 3222 bp, Zea Mays
gccagcaccagcaccagcaccagcaccgtgccgcccctgggccggccagccgccagcgcgacatcgagcgagcaatggaggtcggcggcgacctgcagtccctcctagaggcgatcaaatcctccgaggtgcttgaagatagaattgggctcatcaaccgactcgagagttcctttgagtattctgcggatgatctgagaccagtacttgacagtcttaatgtgtatgaccttaacggcaattttaggtatcttgggatgattctggatgttcaggtctgtcgcactgcatgctacacaagtcaattttgcaggttgctctaaaatgttcatatatagaaacaactggttgtctaggccaatttcttgcacttggtgcaaaggcgagctcatggtgtcgaaagcatatcgtatgttccatcgaatctgttgatgattctgaagatgtccaacaggaagaacactccaaaatactcccagagataattttgatggccttaaatatatcaatcaagattcttccttctgcggcaaaatgtgttactgtagatatggtgcataatattggtgattttatctcagagttgctaagtcttatggaaagctcaatagttgacaatgacaagaaaattcatggagctgctctggatatcactaaggctgcacctgtttttctagatgaaacaactaagctgtgccgggcatactctgaggccacaaaagtagacaactgcacaatgagtataactgatgaagatgctactgtgaaacacaacaaacaaggtcttgctagtgatgtcatcaggattacatcatccactattcagactatgtgtagattgggaacctatgcagcatccagtggtggaagccaggtgattttactgaatgtatcatggaagggtgtagtctcattactccaaagcggtaaagggatgattgaaggaaaagtaaatgtcagagaaataattgtaacccttctatctctgtccatagaatctctaagagttgctgctgaaacatggtgtgcaccgttactagaaacccttggtgctactgaagccagaagggcgttcctaccaatcaagtttttcttaataaatgctgtaaggatttgttcaacatatccatctgaagcaatgattatatacaagaacataatcaattgtgcagtagtgatcacatcctcaagcattctatttagcaagaagccacagttgaaggcagcaaatgagacccttgttgaattgttggagcctactttatttgttttactagatacacttatgaaatcatctgacttaacaccagaatccaaatgccagcttgcacatcatttttttgaaaacgaagaagataagagtccagatcttatgggacaagctaatcagagagagataaatttggcctcactggattgcattttctctatggattcagatgtggatcatagaaatagagcacttttacctgctgagttgcttgtgtttttgcactttctcaatgcttcatcatggttgacagaaatggtggtcatcacattatctaaaaagctacagactcttcttaatatattgacatcagaagacatctactcctatgtccttggcttccaaatccctgccttaaatggcgcagaccagtctcctgcagttgtttggcaacctgtgtatacttctatcatacaagcattgaaggcttttatgatttctactgttgcttcaagtgctgcttggaacgagttagaggctttcttacttgaaaatattttccatccccatttcctttgcttggaaattattacagagctgtggtgtttcttcattcgttatgctgaaactgagacttcaattaatctagttaatcaagtctcccttctactaaagactgttgcatcaccagaggatgttctttcacctctcagtgctttgcggaaagttgcacgatcattgtgcatcatcttgagctatgcatcttctgcaactgttgatcaaatatatacttgtgtgctgaatggtgaaaactcttccaagtcttcaatcttacacttagcattgctgatggaaggatttcctttggattcattgtctgatggtacaaaggaacttgctatgaagaaaatgtttacctcttttgctggctatctggagagctactccaagaaccaccgagtaatcaatgtgccaacttgtaaattgggtgttgtaggacttcctatacatgctctagcctctgcattgcagcatagtgcaaaccgtcaatggcttcctttatgtcaactctcggtcacttgaacgttaccgaagacgatgctaacgaactttgttctgcaatatgggatctgtatcatctcctgctgaaggaacggcactgggcgctcattcacctcgcaatggattcctttggctacttcgccgcccgcacatcctttacgcagctctggagatttgttcccagagatgctgccctttcgtacaatgcaagcacagggacgagcatagatgaaaacggattcatgctggagttgagggcttatcttcagaaagaggtcgccttgcacaccgataaatggtctgaagagcagattcggctcctggtttctgaggggagagcgctgaagaagctggttgaagcttgttgtgaaattccggttgttgctgagcctgagaaggcgccggttgcgaaggatgccagcacgaagaagaggaagatgccagatgggatctgtgaaggcatggcgatgctgcagaacggtctcaaggtcatgcgaggcgcctttggtgaaggggacttcgctgatctgaaggataggtttgctgcacacttgtctcgcctcgaggatgcagtttcccagtttgctagtttatccgacgaaatttgatatagtgcactgtatgtcgcgctgttacctttaactgcaaaagagcattcattctagtacagttcacgatcatagcacagctgatctctctcgtggcaagcaagctccagagtcatcgggttgacagatcgttcaacatggccagcacaacttcaaggtttgcaggtcatctccgcgccggcgcttgcgtggcgacggcccttgtggcttgttggcttgtggggcgaaaatgcaagaaaatggatgtgaattatcttttgtataataaccacacgacatcatgtactgctttaatttaacaattggtagtacaccctgcagacgaggcgaatacaatttttg

SEQ ID NO: 217119 - DNA, 3446 bp, Zea Mays
cagcaggccagcaccagcaccagcaccagcaccgtgccgcccctgggccggccagccgccagcgcgacatcgagcgagcaatggaggtcggcggcgacctgcagtccctcctagaggcgatcaaatcctccgaggtgcttgaagatagaattgggctcatcaaccgactcgagagttcctttgagtattctgcggatgatctgagaccagtacttgacagtcttaatgtgtatgaccttaacggcaattttaggtatcttgggatgattctggatgttcaggttgctctaaaatgttcatatatagaaacaactggttgtctaggccaatttcttgcacttggtgcaaaggcgagctcatggtgtcgaaagcatatcgtatgttccatcgaatctgttgatgattctgaagatgtccaacaggaagaacactccaaaatactcccagagataattttgatggccttaaatatatcaatcaagattcttccttctgcggcaaaatgtgttactgtagatatggtgcataatattggtgattttatctcagagttgctaagtcttatggaaagctcaatagttgacaatgacaagaaaattcatggagctgctctggatatcactaaggctgcacctgtttttctagatgaaacaactaagctgtgccgggcatactctgaggccacaaaagtagacaactgcacaatgagtataactgatgaagatgctactgtgaaacacaacaaacaaggtcttgctagtgatgtcatcaggattacatcatccactattcagactatgtgtagattgggaacctatgcagcatccagtggtggaagccaggtgattttactgaatgtatcatggaagggtgtagtctcattactccaaagcggtaaagggatgattgaaggaaaagtaaatgtcagagaaataattgtaacccttctatctctgtccatagaatctctaagagttgctgctgaaacatggtgtgcaccgttactagaaacccttggtgctactgaagccagaagggcgttcctaccaatcaagtttttcttaataaatgctgtaaggatttgttcaacatatccatctgaagcaatgattatatacaagaacataatcaattgtgcagtagtgatcacatcctcaagcattctatttagcaagaagccacagttgaaggcagcaaatgagacccttgttgaattgttggagcctactttatttgttttactagatacacttatgaaatcatctgacttaacaccagaatccaaatgccagcttgcacatcatttttttgaaaacgaagaagataagagtccagatcttatgggacaagctaatcagagagagataaatttggcctcactggattgcattttctctatggattcagatgtggatcatagaaatagagcacttttacctgctgagttgcttgtgtttttgcactttctcaatgcttcatcatggttgacagaaatggtggtcatcacattatctaaaaagctacagactcttcttaatatattgacatcagaagacatctactcctatgtccttggcttccaaatccctgccttaaatggcgcagaccagtctcctgcagttgtttggcaacctgtgtatacttctatcatacaagcattgaaggcttttatgatttctactgttgcttcaagtgctgcttggaacgagttagaggctttcttacttgaaaatattttccatccccatttcctttgcttggaaattattacagagctgtggtgtttcttcattcgttatgctgaaactgagacttcaattaatctagttaatcaagtctcccttctactaaagactgttgcatcaccagaggatgttctttcacctctcagtgctttgcggaaagttgcacgatcattgtgcatcatcttgagctatgcatcttctgcaactgttgatcaaatatatacttgtgtgctgaatggtgaaaactcttccaagtcttcaatcttacacttagcattgctgatggaaggatttcctttggattcattgtctgatggtacaaaggaacttgctatgaagaaaatgtttacctcttttgctggctatctggagagctactccaagaaccaccgagtaatcaatgtgccaacttgtaaattgggtgttgtaggacttcctatacatgctctagcctctgcattgcagcatagtgtaataaatgttgatagtattgtagatgagaatagcatcactgctatgtttaagttcaccatctctctcataaagatgtttagaattgcgccagatagtagtaaggataaccttgccaagcacattagttccatgttggttattatctcaaacacgaggcatctttgtgcattcagtgagatggagaagttgactctgcagttgcgcacgctgttcgtttccacttctgataaatcaaatgctgtgctgtctcagtgcaaaccgtcaatggcttcctttatgtcaactctcggtcacttgaacgttaccgaagacgatgctaacgaactttgttctgcaatatgggatctgtatcatctcctgctgaaggaacggcactgggcgctcattcacctcgcaatggattcctttggctacttcgccgcccgcacatcctttacgcagctctggagatttgttcccagagatgctgccctttcgtacaatgcaagcacagggacgagcatagatgaaaacggattcatgctggagttgagggcttatcttcagaaagaggtcgccttgcacaccgataaatggtctgaagagcagattcggctcctggtttctgaggggagagcgctgaagaagctggttgaagcttgttgtgaaattccggttgttgctgagcctgagaaggcgccggttgcgaaggatgccagcacgaagaagaggaagatgccagatgggatctgtgaaggcatggcgatgctgcagaacggtctcaaggtcatgcgaggcgcctttggtgaaggggacttcgctgatctgaaggataggtttgctgcacacttgtctcgcctcgaggatgcagtttcccagtttgctagtttatccgacgaaatttgatatagtgcactgtatgtcgcgctgttacctttaactgcaaaagagcattcattctagtacagttcacgatcatagcacagctgatctctctcgtggcaagcaagctccagagtcatcgggttgacagatcgttcaacatggccagcacaacttcaaggtttgcaggtcatctccgcgccggcgcttgcgtggcgacggcccttgtggcttgttggcttgtggggcgaaaatgcaagaaaatggatgtgaattatcttttgtataataaccacacgacatcatgtactgctttaatttaacaattggtagtacaccctgcagacgaggcgaatacaatttttg

SEQ ID NO: 217120 - DNA, 3558 bp, Zea Mays
aaacccagcaggccagcaccagcaccagcaccagcaccgtgccgcccctgggccggccagccgccagcgcgacatcgagcgagcaatggaggtcggcggcgacctgcagtccctcctagaggcgatcaaatcctccgaggtgcttgaagatagaattgggctcatcaaccgactcgagagttcctttgagtattctgcggatgatctgagaccagtacttgacagtcttaatgtatcttgggatgattctggatgttcaggtctgtcgcactgcatgctacacaagtcaattttgcaggttgctctaaaatgttcatatatagaaacaactggttgtctaggccaatttcttgcacttggtgcaaaggcgagctcatggtgtcgaaagcatatcgtatgttccatcgaatctgttgatgattctgaagatgtccaacaggaagaacactccaaaatactcccagagttctttggttctagataattttgatggccttaaatatatcaatcaagattcttccttctgcggcaaaatgtgttactgtagatatggtgcataatattggtgattttatctcagagttgctaagtcttatggaaagctcaatagttgacaatgacaagaaaattcatggagctgctctggatatcactaaggctgcacctgtttttctagatgaaacaactaagctgtgccgggcatactctgaggccacaaaagtagacaactgcacaatgagtataactgatgaagatgctactgtgaaacacaacaaacaaggtcttgctagtgatgtcatcaggattacatcatccactattcagactatgtgtagattgggaacctatgcagcatccagtggtggaagccaggtgattttactgaatgtatcatggaagggtgtagtctcattactccaaagcggtaaagggatgattgaaggaaaagtaaatgtcagagaaataattgtaacccttctatctctgtccatagaatctctaagagttgctgctgaaacatggtgtgcaccgttactagaaacccttggtgctactgaagccagaagggcgttcctaccaatcaagtttttcttaataaatgctgtaaggatttgttcaacatatccatctgaagcaatgattatatacaagaacataatcaattgtgcagtagtgatcacatcctcaagcattctatttagcaagaagccacagttgaaggcagcaaatgagacccttgttgaattgttggagcctactttatttgttttactagatacacttatgaaatcatctgacttaacaccagaatccaaatgccagcttgcacatcatttttttgaaaacgaagaagataagagtccagatcttatgggacaagctaatcagagagagataaatttggcctcactggattgcattttctctatggattcagatgtggatcatagaaatagagcacttttacctgctgagttgcttgtgtttttgcactttctcaatgcttcatcatggttgacagaaatggtggtcatcacattatctaaaaagctacagactcttcttaatatattgacatcagaagacatctactcctatgtccttggcttccaaatccctgccttaaatggcgcagaccagtctcctgcagttgtttggcaacctgtgtatacttctatcatacaagcattgaaggcttttatgatttctactgttgcttcaagtgctgcttggaacgagttagaggctttcttacttgaaaatattttccatccccatttcctttgcttggaaattattacagagctgtggtgtttcttcattcgttatgctgaaactgagacttcaattaatctagttaatcaagtctcccttctactaaagactgttgcatcaccagaggatgttctttcacctctcagtgctttgcggaaagttgcacgatcattgtgcatcatcttgagctatgcatcttctgcaactgttgatcaaatatatacttgtgtgctgaatggtgaaaactcttccaagtcttcaatcttacacttagcattgctgatggaaggatttcctttggattcattgtctgatggtacaaaggaacttgctatgaagaaaatgtttacctcttttgctggctatctggagagctactccaagaaccaccgagtaatcaatgtgccaacttgtaaattgggtgttgtaggacttcctatacatgctctagcctctgcattgcagcataggtaagtctgttctctaattaccagtattgttcactctgatgatgatgatggctgtcttatacacagtactttttttggcagtgtaataaatgttgatagtattgtagatgagaatagcatcactgctatgtttaagttcaccatctctctcataaagatgtttagaattgcgccagatagtagtaaggataaccttgccaagcacattagttccatgttggttattatctcaaacacgaggcatctttgtgcattcagtgagatggagaagttgactctgcagttgcgcacgctgttcgtttccacttctgataaatcaaatgctgtgctgtctcagtgcaaaccgtcaatggcttcctttatgtcaactctcggtcacttgaacgttaccgaagacgatgctaacgaactttgttctgcaatatgggatctgtatcatctcctgctgaaggaacggcactgggcgctcattcacctcgcaatggattcctttggctacttcgccgcccgcacatcctttacgcagctctggagatttgttcccagagatgctgccctttcgtacaatgcaagcacagggacgagcatagatgaaaacggattcatgctggagttgagggcttatcttcagaaagaggtcgccttgcacaccgataaatggtctgaagagcagattcggctcctggtttctgaggggagagcgctgaagaagctggttgaagcttgttgtgaaattccggttgttgctgagcctgagaaggcgccggttgcgaaggatgccagcacgaagaagaggaagatgccagatgggatctgtgaaggcatggcgatgctgcagaacggtctcaaggtcatgcgaggcgcctttggtgaaggggacttcgctgatctgaaggataggtttgctgcacacttgtctcgcctcgaggatgcagtttcccagtttgctagtttatccgacgaaatttgatatagtgcactgtatgtcgcgctgttacctttaactgcaaaagagcattcattctagtacagttcacgatcatagcacagctgatctctctcgtggcaagcaagctccagagtcatcgggttgacagatcgttcaacatggccagcacaacttcaaggtttgcaggtcatctccgcgccggcgcttgcgtggcgacggcccttgtggcttgttggcttgtggggcgaaaatgcaagaaaatggatgtgaattatcttttgtataataaccacacgacatcatgtactgctttaatttaacaattggtagtacaccctgcagacgaggcgaatacaatttttg

SEQ ID NO: 217121 - DNA, 3514 bp, Zea Mays
aagcggcaaaacccagcaggccagcaccagcaccagcaccagcaccgtgccgcccctgggccggccagccgccagcgcgacatcgagcgagcaatggaggtcggcggcgacctgcagtccctcctagaggcgatcaaatcctccgaggtgcttgaagatagaattgggctcatcaaccgactcgagagttcctttgagtattctgcggatgatctgagaccagtacttgacagtcttaatgtatcttgggatgattctggatgttcaggttgctctaaaatgttcatatatagaaacaactggttgtctaggccaatttcttgcacttggtgcaaaggcgagctcatggtgtcgaaagcatatcgtatgttccatcgaatctgttgatgattctgaagatgtccaacaggaagaacactccaaaatactcccagagataattttgatggccttaaatatatcaatcaagattcttccttctgcggcaaaatgtgttactgtagatatggtgcataatattggtgattttatctcagagttgctaagtcttatggaaagctcaatagttgacaatgacaagaaaattcatggagctgctctggatatcactaaggctgcacctgtttttctagatgaaacaactaagctgtgccgggcatactctgaggccacaaaagtagacaactgcacaatgagtataactgatgaagatgctactgtgaaacacaacaaacaaggtcttgctagtgatgtcatcaggattacatcatccactattcagactatgtgtagattgggaacctatgcagcatccagtggtggaagccaggtgattttactgaatgtatcatggaagggtgtagtctcattactccaaagcggtaaagggatgattgaaggaaaagtaaatgtcagagaaataattgtaacccttctatctctgtccatagaatctctaagagttgctgctgaaacatggtgtgcaccgttactagaaacccttggtgctactgaagccagaagggcgttcctaccaatcaagtttttcttaataaatgctgtaaggatttgttcaacatatccatctgaagcaatgattatatacaagaacataatcaattgtgcagtagtgatcacatcctcaagcattctatttagcaagaagccacagttgaaggcagcaaatgagacccttgttgaattgttggagcctactttatttgttttactagatacacttatgaaatcatctgacttaacaccagaatccaaatgccagcttgcacatcatttttttgaaaacgaagaagataagagtccagatcttatgggacaagctaatcagagagagataaatttggcctcactggattgcattttctctatggattcagatgtggatcatagaaatagagcacttttacctgctgagttgcttgtgtttttgcactttctcaatgcttcatcatggttgacagaaatggtggtcatcacattatctaaaaagctacagactcttcttaatatattgacatcagaagacatctactcctatgtccttggcttccaaatccctgccttaaatggcgcagaccagtctcctgcagttgtttggcaacctgtgtatacttctatcatacaagcattgaaggcttttatgatttctactgttgcttcaagtgctgcttggaacgagttagaggctttcttacttgaaaatattttccatccccatttcctttgcttggaaattattacagagctgtggtgtttcttcattcgttatgctgaaactgagacttcaattaatctagttaatcaagtctcccttctactaaagactgttgcatcaccagaggatgttctttcacctctcagtgctttgcggaaagttgcacgatcattgtgcatcatcttgagctatgcatcttctgcaactgttgatcaaatatatacttgtgtgctgaatggtgaaaactcttccaagtcttcaatcttacacttagcattgctgatggaaggatttcctttggattcattgtctgatggtacaaaggaacttgctatgaagaaaatgtttacctcttttgctggctatctggagagctactccaagaaccaccgagtaatcaatgtgccaacttgtaaattgggtgttgtaggacttcctatacatgctctagcctctgcattgcagcataggtaagtctgttctctaattaccagtattgttcactctgatgatgatgatggctgtcttatacacagtactttttttggcagtgtaataaatgttgatagtattgtagatgagaatagcatcactgctatgtttaagttcaccatctctctcataaagatgtttagaattgcgccagatagtagtaaggataaccttgccaagcacattagttccatgttggttattatctcaaacacgaggcatctttgtgcattcagtgagatggagaagttgactctgcagttgcgcacgctgttcgtttccacttctgataaatcaaatgctgtgctgtctcagtgcaaaccgtcaatggcttcctttatgtcaactctcggtcacttgaacgttaccgaagacgatgctaacgaactttgttctgcaatatgggatctgtatcatctcctgctgaaggaacggcactgggcgctcattcacctcgcaatggattcctttggctacttcgccgcccgcacatcctttacgcagctctggagatttgttcccagagatgctgccctttcgtacaatgcaagcacagggacgagcatagatgaaaacggattcatgctggagttgagggcttatcttcagaaagaggtcgccttgcacaccgataaatggtctgaagagcagattcggctcctggtttctgaggggagagcgctgaagaagctggttgaagcttgttgtgaaattccggttgttgctgagcctgagaaggcgccggttgcgaaggatgccagcacgaagaagaggaagatgccagatgggatctgtgaaggcatggcgatgctgcagaacggtctcaaggtcatgcgaggcgcctttggtgaaggggacttcgctgatctgaaggataggtttgctgcacacttgtctcgcctcgaggatgcagtttcccagtttgctagtttatccgacgaaatttgatatagtgcactgtatgtcgcgctgttacctttaactgcaaaagagcattcattctagtacagttcacgatcatagcacagctgatctctctcgtggcaagcaagctccagagtcatcgggttgacagatcgttcaacatggccagcacaacttcaaggtttgcaggtcatctccgcgccggcgcttgcgtggcgacggcccttgtggcttgttggcttgtggggcgaaaatgcaagaaaatggatgtgaattatcttttgtataataaccacacgacatcatgtactgctttaatttaacaattggtagtacaccctgcagacgaggcgaatacaatttttg

SEQ ID NO: 217122 - DNA, 3464 bp, Zea Mays
atgaaaaaactaccctcccaaggctggcggctggcctgccctgccgaagcgcgccgtgccgtgtctccgtgtgccccttcctcccagaaccagaagaagttctcgaagcttctcgaaacatcgctccgtctcctccttcagccaaaacccagatcccgaaaccccagacgagcactgctccgcatggaccatcattggcgcttccctgcggtcgccggcgccgatttctgcccggtctgttccgtgcgtcacttccccttctgcccaccgccgcctctcccgccgcatcccttcccctacgacctccagccgccgccaccccctcccccgccgaaccccttcccatacgacttccacccgccgcccccaccgccgctgatgtgggcccctccacctcctgggccgcacgacccgcgttcctacgatctccccggctgggaggggcctcacaagcggatgcgcctgggcgaggcgccaccgttcgatccgtacgactttgtgcctccaccgccgccaggaagggcttctgtggagggcgatcggctgctcggcctgatccgggaccatggccgcaatccacttcccggttgtctacctgacggcggctttggttacggaggaggtagattatatccccggcaaggatgtgattttgcggatttcgaccaaaagttgccacctcccatgctgaatgataatggcttcggacaaggttttgtgccagacgaaggccctcaccgaaagtattttgacggtgccaatcaccatttccatcagttccacccagagccattgcctggtgcgccgctgcaccctccactgcctcgctaccctgatccccatggttcacatgcttggcatgttgaggcaggtgctgtgccacggccagcagagcctccattcccctctaaccatgattaccgtgctgcaccgccacggttgactgcaaattcatcattgtttcctgtcctttctggttcgccaacaacggaaaattttccatcaaccgctggtaccttgcctccagcccatcccatgccaaacaaaaaccgtcatgacggacacatcaacgatgaggggccaggtttcatttatcgaccacaatcagagcagaacttgatagatggaaggatgaccagtgcacattattctctggaaaattccaatgtcacggtcatcaatgcttgtgatttgttcaagcagccgcttcgtggttcacgccctgaccatattgttgtcatcctcagagggcttccaggtagtggaaagagttatctggcaaaggcattgcgcgatcttgaagttgataatggtgcaaatgcgcctaggatacactccatggatgattatttcatgattgaagttgagaagaaagtggaagacactgaaggccctaaatcttctagtgcatcaaaagggaggaggcagttgactaagaaagtaattgagtattgttatgagccagaaatggaggagacttacaggtcaagcatgttgaaggcattttcaaagacccttgatgaaggaaattttacatttgtgattggtatggagttatttagagcagcttatatcaatcattactgtccaattcccatatgtaatattttcttctcatggttgtttcttcaatattgtggaggtgccttcaaaatttatgggttaacgaaacactttaccatgctttattttttctttctttcacatcatcagtgctacatatgagaagtcaacaccttcatgtaccagtgaaagattttccttttcttttcagcaatcagaaaaaatattctcttttggttgggtcttcagttatgtactgttttgtttccaaaatgacaggatggataacttgaaatttggacagtgcccacttttgttgcacttcatgacattgtgtattgtttaaaacttcaattttagtcacactttagctgacctagcaaaattcagcggttgtgcaccaagagacgccttcaattctagcggctgatgctgtgtttctggtaactgactttgtttactgctggtattcctggccgtttagtggatgaccgcaatctgcgggtagctgattttgctcaattttgggcaactgcgaagaaatcaggctatgaggtgtacttgctggaggcaccatacaaggatccaacgggctgtgctgcaaggaatgtgcatggatttacattggatgagataaaaaagatggcagcggactgggaggaggctccaccattatatctgcagctagatatacattcattattccatgatgataaccttcgtggccattctatacaagaggtagatatggacactgaggatgttgatgatgctaatgacgcaactagcatcattgctgagagctcgcagaaggctgtacaggatccaccaaacgaaggcttctcaaagccaggggaggagtggaactcagaagtagaagatggcctggatagtttaaaagaactaggacagagtaaatggtcaaaagattttgaggatgaaaccacaaagtccgagaatacagaggaaaacacacatgctctttctggcctggcccggacatatagcacaggacgcaaaaatgtcagttggggtgatcggcttgaaaagggtgggttttccatttatgcaactaaaagaaaacttacttcgtcactaatcatagggcctggatcagggtacaatttggtatccaaccccttggctgaagatagttccacaggtacaaaagggaagacgaataacgagaccaaaaaacggttcagtgaacaacttcgtgacgaaggtgaatccttcagggcagtttttgacaagacaaagcagcacattggagtttttgagaatggagatgaggaataatccttgactagaggttcttttagttgtttgcccttaagcgttttggatgctcaggatgatacttcacacttacggaggggactagtgcagacagcttggagtcactttttcccccttccgcttgtcatcctgcagcaagtcacaatattgagccattcagtgaatcgtgggatcaatattctttagtccaatcgccttcatcaagcgcaatgagcaatagttccaatgtgccgttcaatgaaagcaatgcggatttttttggttcatgggcttgttgtccttgtaaaggcaactcacacatgccacaaagatgtactgtacctatgtatcaggcacgcacactgaatagtggccatcagtttttacatgtttctgttatatatgtgttgttgttaccacgagaaactattcggctctcgtctcttactactgtgacgagtaaactgtctgaatctgaacaattgttttcttaaagagttgtacttaagtaggattggaaacaaaagtctagctgccacagcagcgatgtcgttcggcctgcagaacccactcaacgaaggaagctcaacacacaagaagctcgaaaactgggcatgtttggg

SEQ ID NO: 217123 - DNA, 2621 bp, Zea Mays
atgaaaaaactaccctcccaaggctggcggctggcctgccctgccgaagcgcgccgtgccgtgtctccgtgtgccccttcctcccagaaccagaagaagttctcgaagcttctcgaaacatcgctccgtctcctccttcagccaaaacccagatcccgaaaccccagacgagcactgctccgcatggaccatcattggcgcttccctgcggtcgccggcgccgatttctgcccggggccaggtttcatttatcgaccacaatcagagcagaacttgatagatggaaggatgaccagtgcacattattctctggaaaattccaatgtcacggtcatcaatgcttgtgatttgttcaagcagccgcttcgtggttcacgccctgaccatattgttgtcatcctcagagggcttccaggtagtggaaagagttatctggcaaaggcattgcgcgatcttgaagttgataatggtgcaaatgcgcctaggatacactccatggatgattatttcatgattgaagttgagaagaaagtggaagacactgaaggccctaaatcttctagtgcatcaaaagggaggaggcagttgactaagaaagtaattgagtattgttatgagccagaaatggaggagacttacaggtcaagcatgttgaaggcattttcaaagacccttgatgaaggaaattttacatttgtgattggtatggagttatttagagcagcttatatcaatcattactgtccaattcccatatgtaatattttcttctcatggttgtttcttcaatattgtggaggtgccttcaaaatttatgggttaacgaaacactttaccatgctttattttttctttctttcacatcatcagtgctacatatgagaagtcaacaccttcatgtaccagtgaaagattttccttttcttttcagcaatcagaaaaaatattctcttttggttgggtcttcagttatgtactgttttgtttccaaaatgacaggatggataacttgaaatttggacagtgcccacttttgttgcacttcatgacattgtgtattgtttaaaacttcaattttagtcacactttagctgacctagcaaaattcagcggttgtgcaccaagagacgccttcaattctagcggctgatgctgtgtttctggtaactgactttgtttactgctggtattcctggccgtttagtggatgaccgcaatctgcgggtagctgattttgctcaattttgggcaactgcgaagaaatcaggctatgaggtgtacttgctggaggcaccatacaaggatccaacgggctgtgctgcaaggaatgtgcatggatttacattggatgagataaaaaagatggcagcggactgggaggaggctccaccattatatctgcagctagatatacattcattattccatgatgataaccttcgtggccattctatacaagaggtagatatggacactgaggatgttgatgatgctaatgacgcaactagcatcattgctgagagctcgcagaaggctgtacaggatccaccaaacgaaggcttctcaaagccaggggaggagtggaactcagaagtagaagatggcctggatagtttaaaagaactaggacagagtaaatggtcaaaagattttgaggatgaaaccacaaagtccgagaatacagaggaaaacacacatgctctttctggcctggcccggacatatagcacaggacgcaaaaatgtcagttggggtgatcggcttgaaaagggtgggttttccatttatgcaactaaaagaaaacttacttcgtcactaatcatagggcctggatcagggtacaatttggtatccaaccccttggctgaagatagttccacaggtacaaaagggaagacgaataacgagaccaaaaaacggttcagtgaacaacttcgtgacgaaggtgaatccttcagggcagtttttgacaagacaaagcagcacattggagtttttgagaatggagatgaggaataatccttgactagaggttcttttagttgtttgcccttaagcgttttggatgctcaggatgatacttcacacttacggaggggactagtgcagacagcttggagtcactttttcccccttccgcttgtcatcctgcagcaagtcacaatattgagccattcagtgaatcgtgggatcaatattctttagtccaatcgccttcatcaagcgcaatgagcaatagttccaatgtgccgttcaatgaaagcaatgcggatttttttggttcatgggcttgttgtccttgtaaaggcaactcacacatgccacaaagatgtactgtacctatgtatcaggcacgcacactgaatagtggccatcagtttttacatgtttctgttatatatgtgttgttgttaccacgagaaactattcggctctcgtctcttactactgtgacgagtaaactgtctgaatctgaacaattgttttcttaaagagttgtacttaagtaggattggaaacaaaagtctagctgccacagcagcgatgtcgttcggcctgcagaacccactcaacgaaggaagctcaacacacaagaagctcgaaaactgggcatgtttggg

SEQ ID NO: 217124 - DNA, 2066 bp, Zea Mays
gtaaatcctcagtctctgatgtgttgactacaagattactttgcttatggattccttcttttttggggtttggcccattaaagaggtgccgcttgcttgaaaataaaaattcacctccaaggagaggatatattttcttttcctaaaaggtattgtattattattcatgcactgtggaatacttttgtctcattacaaggaaatcaacccttcaattgttccttttgttaagtgtccttatgcttgtgtaatttttatcctgttccctccatgtactcgttggttggttgatacccttactttatcattctgcatggtagctggcttgttttccattagctttttttctttcatcccgagtagcactgttttcaagtctcgattattcaagattagtcgcgattaatcgtccaagtcagtttggaccaatcgtgattaatcgcccaagtcgttcgactaatcgtgataatcaccgattaatcgcccaagtcggttagccagaacgaccaacaagtcgtcctacttgaaaacagtgccgagtagtacctgtttttgctattgagctgctgttggcttctgttcgtgttctctttgattggtgcgaccatagttctacttggcctgaatcaactattgcactgctgaagaaagcaatgattgctggtttcgtggtctgaaatgtatttgttttgcatttttagtataacttgttgagtgttatttttgtgaaagctcttcagattataatatttcagtagattaatcttgtttttgtcagacaatattgatttttcaggagctactcttgcatgctatttagaatttgatttcattttaattaatgtctcatctcatttcatagtgaaatcatcctgatagtgttctgattgctagtttctctttttcagaaatcaggctatgaggtgtacttgctggaggcaccatacaaggatccaacgggctgtgctgcaaggaatgtgcatggatttacattggatgagataaaaaagatggcagcggactgggaggaggctccaccattatatctgcagctagatatacattcattattccatgatgataaccttcgtggccattctatacaagaggtagatatggacactgaggatgttgatgatgctaatgacgcaactagcatcattgctgagagctcgcagaaggctgtacaggatccaccaaacgaagcttgaaaagggtgggttttccatttatgcaactaaaagaaaacttacttcgtcactaatcatagggcctggatcagggtacaatttggtatccaaccccttggctgaagatagttccacaggtacaaaagggaagacgaataacgagaccaaaaaacggttcagtgaacaacttcgtgacgaaggtgaatccttcagggcagtttttgacaagacaaagcagcacattggagtttttgagaatggagatgaggaataatccttgactagaggttcttttagttgtttgcccttaagcgttttggatgctcaggatgatacttcacacttacggaggggactagtgcagacagcttggagtcactttttcccccttccgcttgtcatcctgcagcaagtcacaatattgagccattcagtgaatcgtgggatcaatattctttagtccaatcgccttcatcaagcgcaatgagcaatagttccaatgtgccgttcaatgaaagcaatgcggatttttttggttcatgggcttgttgtccttgtaaaggcaactcacacatgccacaaagatgtactgtacctatgtatcaggcacgcacactgaatagtggccatcagtttttacatgtttctgttatatatgtgttgttgttaccacgagaaactattcggctctcgtctcttactactgtgacgagtaaactgtctgaatctgaacaattgttttcttaaagagttgtacttaagtaggattggaaacaaaagtctagctgccacagcagcgatgtcgttcggcctgcagaacccactcaacgaaggaagctcaacacacaagaagctcgaaaactgggcatgtttggg

SEQ ID NO: 217125 - DNA, 1299 bp, Zea Mays
ctgaacgccatccgttccatttcttatcccctcccagtcccagccatcgcctcccgatggcgtccctcgtcacgctccccgccatcgccttctctaaccccgccacagcctccggcgctgtccgcctacgcgccgcggccttccgctgctgggcgctccggcggcgcgggtgggcggtggcggctgccgtggcctcgcccaactccgtgctcagcgagcacgccttcaagcggctccagctcggaagtgacgacgaggacgaagaagggccgtacgggagcgacgccgacgaggggttccagggggacgaggaggagctcgccattgccaggctcggcctgcccgacgagctcgtcgccacgctcgagaagcgcgggattacgcacctgttccccatacagagggctgtgttgattcccgctcttgggggccgtgacctgattgctagagcaaagaccggaaccggaaagacacttgcctttggtattcccatgatcaagcaattaatggagcaagacgatggtcggagtacaaggcgaggtcgtactcctcgggttctggttctagcacctaccagagagttagccaaacaagtcgagaaggaaataaaggaatcagcacccaagcttggcacggtgtgtgtttatggcggtgtctcgtataatgtccagcagaatgcactctcgcgtggtgtcgatgttgttgttggcacacctgggcgcataattgatttgataaatggcggaagcctccagttgggagaagttcagtatttagtcctggatgaagctgaccaaatgcttgcagtggggtttgaggaagatgtggaaacaatattacaacagcttcctgcggacaggcaaagcatgctgttctctgcgacgatgcctagctgggtgaagaaactatccaggcggtacttgaacaatcctttgacgattgacttggttggtgatcaagatgaaaaacttgctgaaggaatcaaacttcatgccatcccactcacagcgacgtcaaagcgcaccattcttagtgatctaattacggtttatgcaaagggtgggaaaaccattgttttcactcgcacaaagaaagatgcagatgaggtatcattggcactgacaaccagtattgcttctgaggcacttcatggtgatatttcacagcatcagcgtgaaaggacactaaatggatttcgtcaagggaaatttactgttctagtagctacagatgttgcggcccgcggtcttgatataccaaatgttgatttggaattcagcagtgaaggttttgctcttg

SEQ ID NO: 217126 - DNA, 1882 bp, Zea Mays
tggaaattcaatgcttctggggactactcttctagttcagcctacaaagttcttctccttggagcggttgattttggcccggctgagcggatttggaagtcttgggctccgggtttatgcaaagggtgggaaaaccattgttttcactcgcacaaagaaagatgcagatgaggtatcattggcactgacaaccagtattgcttctgaggcacttcatggtgatatttcacagcatcagcgtgaaaggacactaaatggatttcgtcaagggaaatttactgttctagtagctacagatgttgcggcccgcggtcttgatataccaaatgttgatttgattatccattacgaattgccaaacgatccagaaacttttgtccatcgttctggacgcactggacgtgctgggaaagcaggaactgcaatcttgatgtttaccagcagccagaaaaggacagttatgtcacttgagcgtgatgttggttgcaagtttgagtttataagccctccgtccatagaagaagtgctggagtcatctgctgagcatgtcattgctacattgcgaggggtgcacccagagtcaactcaatactttcttggagcagctgagaaattaacagaagaactaggacctcatgcccttgcttctgcactggcacatctgagtggattttctcagccaccttcttcacgttctctgatcagttatgagcagggatgggtgacattgcaactaactagagaaccgggatatggcagaggcttcttttctcctagatctgttactggttttctatctgatgtttgttcagctgctgcagatgaagttggcaaaatatacataacagcagatgagaatgtccaaggagcagtcttcgatttacctgaggaaattgcaaaggacctgcttactatggaggtccccccgggaaacacattaaccaaaatttcgaaggaacaggcgttccaggggtggaggtgcttcaagaggccggggtggttgggacaccgacagtgaggaccgataccggcgtggtggcaggagcttgaggtctgacaacgatagttggtcagatgatgactggtcaggcggtgggagaaaatcaaaccgttcctcctcatcctttggtggccgctcatcatcctacggcagccgtggctcaccatcaccatccttcggtgtccgctcatcatccttgggcggtagggagagcagcagaagcttcagtggcgcttgtttcaactgcggcgaatccggtcaccgtgcatcggactgcccaaacaagtagatggcgcattcttccctgcccaagcaagtagacagctcgagcatcaggacgcacgcagagcgaaaacccaagcgcgcccctgatcgaccagtatactacgcctgacagccagctacagtttttgtgtggctgtctcgtcaggactgaagattttggcatgctgattccagttatttagatccagaggagtccttactctacagggatatgttgagtctcagtagaattgtgtaaccagtaaccacacacacgaacaatggcggaggactaaaatataaaatcatagctggcatattgaacacgtaacatatattgcagttggcatggctcttttcttttccttccaatttgactccagtggtcgcactgtgtcgatcgtttttacatgcactactacacatgcagcctcctttgcttgctggcagctatgcatagttgcgtgtgcgacacagcatctccaagctctggcaatcgcttgtcaaatgtctgctcctcagagttgtcctccgtatcaatcctctttctgtacttttctagtcttctctagagattttatcttatatatcttatttctcttcaacattttctaaatc

SEQ ID NO: 217127 - DNA, 5129 bp, Zea Mays
cgacgatcaccctccgcgaccagatccccaccgtcgctggccttcttcgaggcccagatccccattgtaggccccttgcttcttctcctcaaccggagcttccaaaactcccttgcagagcttgtagaggttatggaaggtatgggtgtgccttcaccaccgacagttgggactccgtcggcctcgccctgccgcattacgtcccccgttgatgataccaatgcgtcgcttggccaagaaccagagtgcgcattgacatatatcagacaggacgatcctgacacattcattatctcggcatcaaatcgattgggattcaattgaagtagaagaaaggtggaatgaggaaggaagacaggatgttactagtgaacgaggattgtatattcaactcggtttgcataatgaagatgagagggtatttaagcaaagggaagatgattcaagtgctcattgtgctggaaataatagggaagaatttcacgatgaagcttcaactgccatgccttgttctgattttgtattagatgggacaaggactatctatgatatgaacaatcctgtaatggagcctggtagcttgtacgcatcaatggagcagtttagacttgcaattagacagtacgccataaataaagaatttgagttgggcattgaggctaccaacaagactagattcagagggtactgtaaagggcctgattgtccttggagcattcatgcgaggtctgagatgaaaggatcacccactattcaagttattgtcttaaacgatgagcacacatgtacatcgagcgggagacgcaagacaacgacaccaacaggtgcttgggttgcggcaagggctcttccactacttatgaaaaaaccacatatgggtgctaaggagttacaaagtatgttgcaagatacatttggatgcactattacatatgatacaatttggcatgggaaagagaaagctctgaagcaattgtttgggagttgggaagagagtttccaacttctatggtcttggagagaagcagttatacagaagtcaccggatagtattatcgagttggatgttaaaatggatgagggccggccattttttagcagatttttttgtgcacttggtccttgcattactggtttcaaagagggatgtagaccttatcttagtgttgactcaactgctcttaatggaagatggaatggtcacctgtgttgtgccataggggttgatggacagaattggatgtaccctgttgcttatggattctttgaggcagaaacaacagaaaactggacatggttctttcagcagttgcgcaaggctgtgggagatcttcctctactagcattgtgttcagatgcttgcaaaggtctaaaaaatgccatgaacactgttttccctcaagctgaaaaaagggagtgtttcagacacctaatgcagaactacgtgaagcaatttgttggatccgagtacatgtatcctgcagctagagcatataggagggaggtgttcgaccattacttttccaatgtccaagaaattcccaaggtgtctagttggttatatgagcatcatgatagtttgtggtatcgtagtgggtttaatccagccatcaagtgcgactatgttaccaacaacatagcagaagtgttcaacaattggattaaggattggaaagatctgcctgtctgtgacttggctgacaagataaggaaggaaatcatggagttgtttcataggaggagggaaataggacagaggttgcaaggtcgaatactaccctccgtggtccatatcctccatgtaaggactagaggtttaggtcacttaacagttaagaaagctgacaattacattgcggaggtgagggataataataatgtgcactctaagcacattgtgaatgctcaattgagacaatgttcatgcaacgagtggcagcatacggggaagccatgtcaccatgcccttcgcttaataacaacacaacaatttagagatgttcggatggaagattttgtggatgactactactcagttgataagttcatgaaggcttactcgagggtagtggagccaattggtgacaaatctttctggcctacagtgccatttgcaaaagaggtgtgtgcttctattgggaagcgtggagttggccgtcaaaggaaaaacatgattaaagggtgcctagagggaggaagtggtaagaagccaaacgaaaatgaaaatgtcaaaactaagaagatgattcgtgggaagttcaagtgtccaaactgtggtgaattgggacacaggaaagccagctacaaatgtcctttgaatggaacaaaaaaacggaaaaggagagcaaggaaaaatgttactaaaggttggttcccaaaagatgttgaggcatgatgatggtgcatgcactagccacacaaccacccccatgtgatgattgtgatgccagtattgcgaaaatctctccactttcatctcccagacctatctagaggctagtgctggaccagtgtaccctaggagctgggtgccaggtgcggtggcgggcggggcctagcaaagcatgacgctgtaggagggatccagtcatccgatacgtcagcactccggcacagcagtaggcatctcggaagctggcagggccacagggcaccacgcccaaggcttagccgcgcaggcactgagcagccaagtagtcaggcagtcagtgagcagcagcagacggcagcaaggctggaagcgcgaagtacctatataggcatataagtttagttcgaccgggagtttacttctctgttatctgtgacttgcccgaccccgacttgatgtgcattgtagattatcagaaattgattaatgatttaatcacagattttaatcaactcaacacgtcgagaagaatatttttgtgctcatagttttttagttcaagcaatgttaatactagtggtacttccctgagttcatatcaatgcttagtcttgggctcctcagaaatgcaaattctttctttggcttgcaattagaaacaagtgttggactgctgataatctggagaagaggggttgcagcacccaagcagctgccctttgtgtgaccaagaaagggaaacgatacaacacatcatcactacctgtgtttttgcccggcaattctggtttcttatctttgacactcgggatgagtcacctcgctcttagggctgatgagcggtcgtttgaggactggtggaggaaggccagcaacagtacaaggataagagaaaagggatcaactgtgtcattattttgggggcttggtgcctctggctgcatagaaatagaacgttttttatgggaatcatccattcagagggtgcagcaacatttcagtgacgagttctcctgttggctcttggtgcgcgccaggagtttgggtcagcttggtctccctagttccatgagtaatatcggatctaatccttttactcctctataacctttttgcttttcttttgtttcttttttctgttttagctatggatgtaagtcatgttttctctctctctaatataaagatgtgcagctctcctgcgcgttctagaaaaaatgaatgtaaaatttgatcttcaattgtttattggcccattataaaattgtacaaagcttctccaaatatgccaattgatccattacaattgtttcataactactgtttatggattttgggactgcagaactgatggattctaacagatgtaacagacctacagtagggatgctaggccaaggagttaaaatatatccacatgttagaatatttcgtaactgtagtaacttcaacattatatagattaatcatgaacttttagttgtattaaacaaataagctctgtatgttcattgttgtagaactaagtttattgtgaatttgtgaacacatatatttgttcatgaaactgcattggatttggactaacaaagtttgtgtatgtgatatgtttttagtctggatctgcccttggtcaagattcaaatatggcttctgcagggttggctcgggtgggtgagtggtgcgactcgtcctctcatgaggctcgtcaccttgagcaacatgccgatcctgcagcagctgcacctggaggagcagctcctgcgccgcacatcggacaactggtgtgtcatcaacgatggcatggcccctgctaccattctcatgggactgcaggagagtctcggagcttgtcgacatacagccggtcctctgggaccaagtgccgattgtgaggaggttcagtggaggtggcacgtcattgttgattggggaacggtggttgtgactttcatttgcaacaagaatgccgttgccgggctgcagatttatggcaaaaaatttgacagatttggtgaatttcatctgcgtgagaatgactatgcatttagtcactcgaaagtttggcggaaatgctcaatcaataacaaaaaatcgttgggttcatcacacgtcgttcttgtgggattatgatgtaaaaaatatggattatctcaaaatcccaaagcgtgcacctgaatatcgactggcaagaaaccacagatttcttgtgccgcatgaaggagtacataccttcgcggtcagttttcaccgatgaggtcactgcggccctgggagaacacttctcagttcagcccgtggatctacaagcagttctttccggtgatgaaggatccgtgccttctacaaagctgctgtcacaacaggacctagaaagaaattgtttcgtccaaagaatcccttaacaatatagaaagttgaagcgtgaccatgcttgtcgtttttgttgtgaaatatgagcagttttgtcgagctgtgaattcattcaaacattatggtcaacccagtacgtacatacgaatgcccaccaccatctttagtaacaaatggttatgttttggattgtaggtctaccgttccaagcttgggttacacgttatttgcctatgggctctagaccgagtgctaaaactatgagagactggctccaacatactctgtaaatggttatgtactctaaattataaagaaattttttgtcttcttatttcagcagcgtcttttaaactacttatttcagcagcagcgtcttttaaac

SEQ ID NO: 217128 - DNA, 1167 bp, Zea Mays
ggcgacgatcaccctccgcgaccagtctggatctgcccttggtcaagattcaaatatggcttctgcagggttggctcgggtgggtgagtggtgcgactcgtcctctcatgaggctcgtcaccttgagcaacatgccgatcctgcagcagctgcacctggaggagcagctcctgcgccgcacatcggacaactggtgtgtcatcaacgatggcatggcccctgctaccattctcatgggactgcaggagagtctcggagcttgtcgacatacagccggtcctctgggaccaagtgccgattgtgaggaggttcagtggaggtggcacgtcattgttgattggggaacggtggttgtgactttcatttgcaacaagaatgccgttgccgggctgcagatttatggcaaaaaatttgacagatttggtgaatttcatctgcgtgagaatgactatgcatttagtcactcgaaagtttggcggaaatgctcaatcaataacaaaaaatcgttgggttcatcacacgtcgttcttgtgggattatgatgtaaaaaatatggattatctcaaaatcccaaagcgtgcacctgaatatcgactggcaagaaaccacagatttcttgtgccgcatgaaggagtacataccttcgcggtcagttttcaccgatgaggtcactgcggccctgggagaacacttctcagttcagcccgtggatctacaagcagttctttccggtgatgaaggatccgtgccttctacaaagctgctgtcacaacaggacctagaaagaaattgtttcgtccaaagaatcccttaacaatatagaaagttgaagcgtgaccatgcttgtcgtttttgttgtgaaatatgagcagttttgtcgagctgtgaattcattcaaacattatggtcaacccagtacgtacatacgaatgcccaccaccatctttagtaacaaatggttatgttttggattgtaggtctaccgttccaagcttgggttacacgttatttgcctatgggctctagaccgagtgctaaaactatgagagactggctccaacatactctgtaaatggttatgtactctaaattataaagaaattttttgtcttcttatttcagcagcgtcttttaaactacttatttcagcagcagcgtcttttaaac

SEQ ID NO: 217129 - DNA, 5197 bp, Zea Mays
caggccttcgtcgcgctggtctttctagggcccttcgccggcgacgatcaccctccgcgaccagcattgtctagatccccaccgtcgctggccttcttcgaggcccagatccccattgtaggccccttgcttcttctcctcaaccggagcttccaaaactcccttgcagagcttgtagaggttatggaaggtatgggtgtgccttcaccaccgacagttgggactccgtcggcctcgccctgccgcattacgtcccccgttgatgataccaatgcgtcgcttggccaagaaccagagtgcgcattgacatatatcagacaggacgatcctgacacattcattatctcgggaaattttcatccaaggcatcaaatcgattgggattcaattgaagtagaagaaaggtggaatgaggaaggaagacaggatgttactagtgaacgaggattgtatattcaactcggtttgcataatgaagatgagagggtatttaagcaaagggaagatgattcaagtgctcattgtgctggaaataatagggaagaatttcacgatgaagcttcaactgccatgccttgttctgattttgtattagatgggacaaggactatctatgatatgaacaatcctgtaatggagcctggtagcttgtacgcatcaatggagcagtttagacttgcaattagacagtacgccataaataaagaatttgagttgggcattgaggctaccaacaagactagattcagagggtactgtaaagggcctgattgtccttggagcattcatgcgaggtctgagatgaaaggatcacccactattcaagttattgtcttaaacgatgagcacacatgtacatcgagcgggagacgcaagacaacgacaccaacaggtgcttgggttgcggcaagggctcttccactacttatgaaaaaaccacatatgggtgctaaggagttacaaagtatgttgcaagatacatttggatgcactattacatatgatacaatttggcatgggaaagagaaagctctgaagcaattgtttgggagttgggaagagagtttccaacttctatggtcttggagagaagcagttatacagaagtcaccggatagtattatcgagttggatgttaaaatggatgagggccggccattttttagcagatttttttgtgcacttggtccttgcattactggtttcaaagagggatgtagaccttatcttagtgttgactcaactgctcttaatggaagatggaatggtcacctgtgttgtgccataggggttgatggacagaattggatgtaccctgttgcttatggattctttgaggcagaaacaacagaaaactggacatggttctttcagcagttgcgcaaggctgtgggagatcttcctctactagcattgtgttcagatgcttgcaaaggtctaaaaaatgccatgaacactgttttccctcaagctgaaaaaagggagtgtttcagacacctaatgcagaactacgtgaagcaatttgttggatccgagtacatgtatcctgcagctagagcatataggagggaggtgttcgaccattacttttccaatgtccaagaaattcccaaggtgtctagttggttatatgagcatcatgatagtttgtggtatcgtagtgggtttaatccagccatcaagtgcgactatgttaccaacaacatagcagaagtgttcaacaattggattaaggattggaaagatctgcctgtctgtgacttggctgacaagataaggaaggaaatcatggagttgtttcataggaggagggaaataggacagaggttgcaaggtcgaatactaccctccgtggtccatatcctccatgtaaggactagaggtttaggtcacttaacagttaagaaagctgacaattacattgcggaggtgagggataataataatgtgcactctaagcacattgtgaatgctcaattgagacaatgttcatgcaacgagtggcagcatacggggaagccatgtcaccatgcccttcgcttaataacaacacaacaatttagagatgttcggatggaagattttgtggatgactactactcagttgataagttcatgaaggcttactcgagggtagtggagccaattggtgacaaatctttctggcctacagtgccatttgcaaaagaggtgtgtgcttctattgggaagcgtggagttggccgtcaaaggaaaaacatgattaaagggtgcctagagggaggaagtggtaagaagccaaacgaaaatgaaaatgtcaaaactaagaagatgattcgtgggaagttcaagtgtccaaactgtggtgaattgggacacaggaaagccagctacaaatgtcctttgaatggaacaaaaaaacggaaaaggagagcaaggaaaaatgttactaaaggttggttcccaaaagatgttgaggcatgatgatggtgcatgcactagccacacaaccacccccatgtgatgattgtgatgccagtattgcgaaaatctctccactttcatctcccagacctatctagaggctagtgctggaccagtgtaccctaggagctgggtgccaggtgcggtggcgggcggggcctagcaaagcatgacgctgtaggagggatccagtcatccgatacgtcagcactccggcacagcagtaggcatctcggaagctggcagggccacagggcaccacgcccaaggcttagccgcgcaggcactgagcagccaagtagtcaggcagtcagtgagcagcagcagacggcagcaaggctggaagcgcgaagtacctatataggcatataagtttagttcgaccgggagtttacttctctgttatctgtgacttgcccgaccccgacttgatgtgcattgtagattatcagaaattgattaatgatttaatcacagattttaatcaactcaacacgtcgagaagaatatttttgtgctcatagttttttagttcaagcaatgttaatactagtggtacttccctgagttcatatcaatgcttagtcttgggctcctcagaaatgcaaattctttctttggcttgcaattagaaacaagtgttggactgctgataatctggagaagaggggttgcagcacccaagcagctgccctttgtgtgaccaagaaagggaaacgatacaacacatcatcactacctgtgtttttgcccggcaattctggtttcttatctttgacactcgggatgagtcacctcgctcttagggctgatgagcggtcgtttgaggactggtggaggaaggccagcaacagtacaaggataagagaaaagggatcaactgtgtcattattttgggggcttggtgcctctggctgcatagaaatagaacgttttttatgggaatcatccattcagagggtgcagcaacatttcagtgacgagttctcctgttggctcttggtgcgcgccaggagtttgggtcagcttggtctccctagttccatgagtaatatcggatctaatccttttactcctctataacctttttgcttttcttttgtttcttttttctgttttagctatggatgtaagtcatgttttctctctctctaatataaagatgtgcagctctcctgcgcgttctagaaaaaatgaatgtaaaatttgatcttcaattgtttattggcccattataaaattgtacaaagcttctccaaatatgccaattgatccattacaattgtttcataactactgtttatggattttgggactgcagaactgatggattctaacagatgtaacagacctacagtagggatgctaggccaaggagttaaaatatatccacatgttagaatatttcgtaactgtagtaacttcaacattatatagattaatcatgaacttttagttgtattaaacaaataagctctgtatgttcattgttgtagaactaagtttattgtgaatttgtgaacacatatatttgttcatgaaactgcattggatttggactaacaaagtttgtgtatgtgatatgtttttagtctggatctgcccttggtcaagattcaaatatggcttctgcagggttggctcgggtgggtgagtggtgcgactcgtcctctcatgaggctcgtcaccttgagcaacatgccgatcctgcagcagctgcacctggaggagcagctcctgcgccgcacatcggacaactggtgtgtcatcaacgatggcatggcccctgctaccattctcatgggactgcaggagagtctcggagcttgtcgacatacagccggtcctctgggaccaagtgccgattgtgaggaggttcagtggaggtggcacgtcattgttgattggggaacggtggttgtgactttcatttgcaacaagaatgccgttgccgggctgcagatttatggcaaaaaatttgacagatttggtgaatttcatctgcgtgagaatgactatgcatttagtcactcgaaagtttggcggaaatgctcaatcaataacaaaaaatcgttgggttcatcacacgtcgttcttgtgggattatgatgtaaaaaatatggattatctcaaaatcccaaagcgtgcacctgaatatcgactggcaagaaaccacagatttcttgtgccgcatgaaggagtacataccttcgcggtcagttttcaccgatgaggtcactgcggccctgggagaacacttctcagttcagcccgtggatctacaagcagttctttccggtgatgaaggatccgtgccttctacaaagctgctgtcacaacaggacctagaaagaaattgtttcgtccaaagaatcccttaacaatatagaaagttgaagcgtgaccatgcttgtcgtttttgttgtgaaatatgagcagttttgtcgagctgtgaattcattcaaacattatggtcaacccagtacgtacatacgaatgcccaccaccatctttagtaacaaatggttatgttttggattgtaggtctaccgttccaagcttgggttacacgttatttgcctatgggctctagaccgagtgctaaaactatgagagactggctccaacatactctgtaaatggttatgtactctaaattataaagaaattttttgtcttcttatttcagcagcgtcttttaaactacttatttcagcagcagcgtcttttaaac

SEQ ID NO: 217130 - DNA, 5129 bp, Zea Mays
ctggcgacgactggggaccgccggtaggcgcccaggccttcgtcgcgctggtctttctagggcccttcgccggcgacgatcaccctccgcgaccagagcttgtagaggttatggaaggtatgggtgtgccttcaccaccgacagttgggactccgtcggcctcgccctgccgcattacgtcccccgttgatgataccaatgcgtcgcttggccaagaaccagagtgcgcattgacatatatcagacaggacgatcctgacacattcattatctcgggaaattttcatccaaggcatcaaatcgattgggattcaattgaagtagaagaaaggtggaatgaggaaggaagacaggatgttactagtgaacgaggattgtatattcaactcggtttgcataatgaagatgagagggtatttaagcaaagggaagatgattcaagtgctcattgtgctggaaataatagggaagaatttcacgatgaagcttcaactgccatgccttgttctgattttgtattagatgggacaaggactatctatgatatgaacaatcctgtaatggagcctggtagcttgtacgcatcaatggagcagtttagacttgcaattagacagtacgccataaataaagaatttgagttgggcattgaggctaccaacaagactagattcagagggtactgtaaagggcctgattgtccttggagcattcatgcgaggtctgagatgaaaggatcacccactattcaagtaatgttattgtcttaaacgatgagcacacatgtacatcgagcgggagacgcaagacaacgacaccaacaggtgcttgggttgcggcaagggctcttccactacttatgaaaaaaccacatatgggtgctaaggagttacaaagtatgttgcaagatacatttggatgcactattacatatgatacaatttggcatgggaaagagaaagctctgaagcaattgtttgggagttgggaagagagtttccaacttctatggtcttggagagaagcagttatacagaagtcaccggatagtattatcgagttggatgttaaaatggatgagggccggccattttttagcagatttttttgtgcacttggtccttgcattactggtttcaaagagggatgtagaccttatcttagtgttgactcaactgctcttaatggaagatggaatggtcacctgtgttgtgccataggggttgatggacagaattggatgtaccctgttgcttatggattctttgaggcagaaacaacagaaaactggacatggttctttcagcagttgcgcaaggctgtgggagatcttcctctactagcattgtgttcagatgcttgcaaaggtctaaaaaatgccatgaacactgttttccctcaagctgaaaaaagggagtgtttcagacacctaatgcagaactacgtgaagcaatttgttggatccgagtacatgtatcctgcagctagagcatataggagggaggtgttcgaccattacttttccaatgtccaagaaattcccaaggtgtctagttggttatatgagcatcatgatagtttgtggtatcgtagtgggtttaatccagccatcaagtgcgactatgttaccaacaacatagcagaagtgttcaacaattggattaaggattggaaagatctgcctgtctgtgacttggctgacaagataaggaaggaaatcatggagttgtttcataggaggagggaaataggacagaggttgcaaggtcgaatactaccctccgtggtccatatcctccatgtaaggactagaggtttaggtcacttaacagttaagaaagctgacaattacattgcggaggtgagggataataataatgtgcactctaagcacattgtgaatgctcaattgagacaatgttcatgcaacgagtggcagcatacggggaagccatgtcaccatgcccttcgcttaataacaacacaacaatttagagatgttcggatggaagattttgtggatgactactactcagttgataagttcatgaaggcttactcgagggtagtggagccaattggtgacaaatctttctggcctacagtgccatttgcaaaagaggtgtgtgcttctattgggaagcgtggagttggccgtcaaaggaaaaacatgattaaagggtgcctagagggaggaagtggtaagaagccaaacgaaaatgaaaatgtcaaaactaagaagatgattcgtgggaagttcaagtgtccaaactgtggtgaattgggacacaggaaagccagctacaaatgtcctttgaatggaacaaaaaaacggaaaaggagagcaaggaaaaatgttactaaaggttggttcccaaaagatgttgaggcatgatgatggtgcatgcactagccacacaaccacccccatgtgatgattgtgatgccagtattgcgaaaatctctccactttcatctcccagacctatctagaggctagtgctggaccagtgtaccctaggagctgggtgccaggtgcggtggcgggcggggcctagcaaagcatgacgctgtaggagggatccagtcatccgatacgtcagcactccggcacagcagtaggcatctcggaagctggcagggccacagggcaccacgcccaaggcttagccgcgcaggcactgagcagccaagtagtcaggcagtcagtgagcagcagcagacggcagcaaggctggaagcgcgaagtacctatataggcatataagtttagttcgaccgggagtttacttctctgttatctgtgacttgcccgaccccgacttgatgtgcattgtagattatcagaaattgattaatgatttaatcacagattttaatcaactcaacacgtcgagaagaatatttttgtgctcatagttttttagttcaagcaatgttaatactagtggtacttccctgagttcatatcaatgcttagtcttgggctcctcagaaatgcaaattctttctttggcttgcaattagaaacaagtgttggactgctgataatctggagaagaggggttgcagcacccaagcagctgccctttgtgtgaccaagaaagggaaacgatacaacacatcatcactacctgtgtttttgcccggcaattctggtttcttatctttgacactcgggatgagtcacctcgctcttagggctgatgagcggtcgtttgaggactggtggaggaaggccagcaacagtacaaggataagagaaaagggatcaactgtgtcattattttgggggcttggtgcctctggctgcatagaaatagaacgttttttatgggaatcatccattcagagggtgcagcaacatttcagtgacgagttctcctgttggctcttggtgcgcgccaggagtttgggtcagcttggtctccctagttccatgagtaatatcggatctaatccttttactcctctataacctttttgcttttcttttgtttcttttttctgttttagctatggatgtaagtcatgttttctctctctctaatataaagatgtgcagctctcctgcgcgttctagaaaaaatgaatgtaaaatttgatcttcaattgtttattggcccattataaaattgtacaaagcttctccaaatatgccaattgatccattacaattgtttcataactactgtttatggattttgggactgcagaactgatggattctaacagatgtaacagacctacagtagggatgctaggccaaggagttaaaatatatccacatgttagaatatttcgtaactgtagtaacttcaacattatatagattaatcatgaacttttagttgtattaaacaaataagctctgtatgttcattgttgtagaactaagtttattgtgaatttgtgaacacatatatttgttcatgaaactgcattggatttggactaacaaagtttgtgtatgtgatatgtttttagtctggatctgcccttggtcaagattcaaatatggcttctgcagggttggctcgggtgggtgagtggtgcgactcgtcctctcatgaggctcgtcaccttgagcaacatgccgatcctgcagcagctgcacctggaggagcagctcctgcgccgcacatcggacaactggtgtgtcatcaacgatggcatggcccctgctaccattctcatgggactgcaggagagtctcggagcttgtcgacatacagccggtcctctgggaccaagtgccgattgtgaggaggttcagtggaggtggcacgtcattgttgattggggaacggtggttgtgactttcatttgcaacaagaatgccgttgccgggctgcagatttatggcaaaaaatttgacagatttggtgaatttcatctgcgtgagaatgactatgcatttagtcactcgaaagtttggcggaaatgctcaatcaataacaaaaaatcgttgggttcatcacacgtcgttcttgtgggattatgatgtaaaaaatatggattatctcaaaatcccaaagcgtgcacctgaatatcgactggcaagaaaccacagatttcttgtgccgcatgaaggagtacataccttcgcggtcagttttcaccgatgaggtcactgcggccctgggagaacacttctcagttcagcccgtggatctacaagcagttctttccggtgatgaaggatccgtgccttctacaaagctgctgtcacaacaggacctagaaagaaattgtttcgtccaaagaatcccttaacaatatagaaagttgaagcgtgaccatgcttgtcgtttttgttgtgaaatatgagcagttttgtcgagctgtgaattcattcaaacattatggtcaacccagtacgtacatacgaatgcccaccaccatctttagtaacaaatggttatgttttggattgtaggtctaccgttccaagcttgggttacacgttatttgcctatgggctctagaccgagtgctaaaactatgagagactggctccaacatactctgtaaatggttatgtactctaaattataaagaaattttttgtcttcttatttcagcagcgtcttttaaactacttatttcagcagcagcgtcttttaaac

SEQ ID NO: 217131 - DNA, 4617 bp, Zea Mays
ctccggtctgcctctcaaatctcaccgcctgctcttcttcggtcccggctcgggctcctccatatgagcgcgcgctaggttctctctcgtcgtctctcgtggcggctggcgacgactggggaccgccggtaggcgcccaggccttcgtcgcgctggtctttctagggcccttcgccggcgacgatcaccctccgcgaccagagcttgtagaggttatggaaggtatgggtgtgccttcaccaccgacagttgggactccgtcggcctcgccctgccgcattacgtcccccgttgatgataccaatgcgtcgcttggccaagaaccagagtgcgcattgacatatatcagacaggacgatcctgacacattcattatctcgggaaattttcatccaaggcatcaaatcgattgggattcaattgaagtagaagaaaggtggaatgaggaaggaagacaggatgttactagtgaacgaggattgtatattcaactcggtttgcataatgaagatgagagggtatttaagcaaagggaagatgattcaagtgctcattgtgctggaaataatagggaagaatttcacgatgaagcttcaactgccatgccttgttctgattttgtattagatgggacaaggactatctatgatatgaacaatcctgtaatggagcctggtagcttgtacgcatcaatggagcagtttagacttgcaattagacagtacgccataaataaagaatttgagttgggcattgaggctaccaacaagactagattcagagggtactgtaaagggcctgattgtccttggagcattcatgcgaggtctgagatgaaaggatcacccactattcaagttattgtcttaaacgatgagcacacatgtacatcgagcgggagacgcaagacaacgacaccaacaggtgcttgggttgcggcaagggctcttccactacttatgaaaaaaccacatatgggtgctaaggagttacaaagtatgttgcaagatacatttggatgcactattacatatgatacaatttggcatgggaaagagaaagctctgaagcaattgtttgggagttgggaagagagtttccaacttctatggtcttggagagaagcagttatacagaagtcaccggatagtattatcgagttggatgttaaaatggatgagggccggccattttttagcagatttttttgtgcacttggtccttgcattactggtttcaaagagggatgtagaccttatcttagtgttgactcaactgctcttaatggaagatggaatggtcacctgtgttgtgccataggggttgatggacagaattggatgtaccctgttgcttatggattctttgaggcagaaacaacagaaaactggacatggttctttcagcagttgcgcaaggctgtgggagatcttcctctactagcattgtgttcagatgcttgcaaaggtctaaaaaatgccatgaacactgttttccctcaagctgaaaaaagggagtgtttcagacacctaatgcagaactacgtgaagcaatttgttggatccgagtacatgtatcctgcagctagagcatataggagggaggtgttcgaccattacttttccaatgtccaagaaattcccaaggtgtctagttggttatatgagcatcatgatagtttgtggtatcgtagtgggtttaatccagccatcaagtgcgactatgttaccaacaacatagcagaagtgttcaacaattggattaaggattggaaagatctgcctgtctgtgacttggctgacaagataaggaaggaaatcatggagttgtttcataggaggagggaaataggacagaggttgcaaggtcgaatactaccctccgtggtccatatcctccatgtaaggactagaggtttaggtcacttaacagttaagaaagctgacaattacattgcggaggtgagggataataataatgtgcactctaagcacattgtgaatgctcaattgagacaatgttcatgcaacgagtggcagcatacggggaagccatgtcaccatgcccttcgcttaataacaacacaacaatttagagatgttcggatggaagattttgtggatgactactactcagttgataagttcatgaaggcttactcgagggtagtggagccaattggtgacaaatctttctggcctacagtgccatttgcaaaagaggtgtgtgcttctattgggaagcgtggagttggccgtcaaaggaaaaacatgattaaagggtgcctagagggaggaagtggtaagaagccaaacgaaaatgaaaatgtcaaaactaagaagatgattcgtgggaagttcaagtgtccaaactgtggtgaattgggacacaggaaagccagctacaaatgtcctttgaatggaacaaaaaaacggaaaaggagagcaaggaaaaatgttactaaaggttggttcccaaaagatgttgaggcatgatgatggtgcatgcactagccacacaaccacccccatgtgatgattgtgatgccagtattgcgaaaatctctccactttcatctcccagacctatctagaggctagtgctggaccagtgtaccctaggagctgggtgccaggtgcggtggcgggcggggcctagcaaagcatgacgctgtaggagggatccagtcatccgatacgtcagcactccggcacagcagtaggcatctcggaagctggcagggccacagggcaccacgcccaaggcttagccgcgcaggcactgagcagccaagtagtcaggcagtcagtgagcagcagcagacggcagcaaggctggaagcgcgaagtacctatataggcatataagtttagttcgaccgggagtttacttctctgttatctgtgacttgcccgaccccgacttgatgtgcattgtagattatcagaaattgattaatgatttaatcacagattttaatcaactcaacacgtcgagaagaatatttttgtgctcatagttttttagttcaagcaatgttaatactagtggtacttccctgagttcatatcaatgcttagtcttgggctcctcagaaatgcaaattctttctttggcttgcaattagaaacaagtgttggactgctgataatctggagaagaggggttgcagcacccaagcagctgccctttgtgtgaccaagaaagggaaacgatacaacacatcatcactacctgtgtttttgcccggcaattctggtttcttatctttgacactcgggatgagtcacctcgctcttagggctgatgagcggtcgtttgaggactggtggaggaaggccagcaacagtacaaggataagagaaaagggatcaactgtgtcattattttgggggcttggtgcctctggctgcatagaaatagaacgttttttatgggaatcatccattcagagggtgcagcaacatttcagtgacgagttctcctgttggctcttggtgcgcgccaggagtttggggttggctcgggtgggtgagtggtgcgactcgtcctctcatgaggctcgtcaccttgagcaacatgccgatcctgcagcagctgcacctggaggagcagctcctgcgccgcacatcggacaactggtgtgtcatcaacgatggcatggcccctgctaccattctcatgggtatgtctgggagagtctcggagcttgtcgacatacagccggtcctctgggaccaagtgccgattgtgaggaggttcagtggaggtggcacgtcattgttgattggggaacggtggttgtgactttcatttgcaacaagaatgccgttgccgggctgcagatttatggcaaaaaatttgacagatttggtgaatttcatctgcgtgagaatgactatgcatttagtcactcgaaagtttggcggaaatgctcaatcaataacaaaaaatcgttgggttcatcacacgtcgttcttgtgggattatgatgtaaaaaatatggattatctcaaaatcccaaagcgtgcacctgaatatcgactggcaagaaaccacagatttcttgtgccgcatgaaggagtacataccttcgcggtcagttttcaccgatgaggtcactgcggccctgggagaacacttctcagttcagcccgtggatctacaagcagttctttccggtgatgaaggatccgtgccttctacaaagctgctgtcacaacaggacctagaaagaaattgtttcgtccaaagaatcccttaacaatatagaaagttgaagcgtgaccatgcttgtcgtttttgttgtgaaatatgagcagttttgtcgagctgtgaattcattcaaacattatggtcaacccagtacgtacatacgaatgcccaccaccatctttagtaacaaatggttatgttttggattgtaggtctaccgttccaagcttgggttacacgttatttgcctatgggctctagaccgagtgctaaaactatgagagactggctccaacatactctgtaaatggttatgtactctaaattataaagaaattttttgtcttcttatttcagcagcgtcttttaaactacttatttcagcagcagcgtcttttaaac

SEQ ID NO: 217132 - DNA, 5079 bp, Zea Mays
ctccggtctgcctctcaaatctcaccgcctgctcttcttcggtcccggctcgggctcctccatatgagcgcgcgctaggttctctctcgtcgtctctcgtggcggctggcgacgactggggaccgccggtaggcgcccaggccttcgtcgcgctggtctttctagggcccttcgccggcgacgatcaccctccgcgaccagagcttgtagaggttatggaaggtatgggtgtgccttcaccaccgacagttgggactccgtcggcctcgccctgccgcattacgtcccccgttgatgataccaatgcgtcgcttggccaagaaccagagtgcgcattgacatatatcagacaggacgatcctgacacattcattatctcgggaaattttcatccaaggcatcaaatcgattgggattcaattgaagtagaagaaaggtggaatgaggaaggaagacaggatgttactagtgaacgaggattgtatattcaactcggtttgcataatgaagatgagagggtatttaagcaaagggaagatgattcaagtgctcattgtgctggaaataatagggaagaatttcacgatgaagcttcaactgccatgccttgttctgattttgtattagatgggacaaggactatctatgatatgaacaatcctgtaatggagcctggtagcttgtacgcatcaatggagcagtttagacttgcaattagacagtacgccataaataaagaatttgagttgggcattgaggctaccaacaagactagattcagagggtactgtaaagggcctgattgtccttggagcattcatgcgaggtctgagatgaaaggatcacccactattcaagttattgtcttaaacgatgagcacacatgtacatcgagcgggagacgcaagacaacgacaccaacaggtgcttgggttgcggcaagggctcttccactacttatgaaaaaaccacatatgggtgctaaggagttacaaagtatgttgcaagatacatttggatgcactattacatatgatacaatttggcatgggaaagagaaagctctgaagcaattgtttgggagttgggaagagagtttccaacttctatggtcttggagagaagcagttatacagaagtcaccggatagtattatcgagttggatgttaaaatggatgagggccggccattttttagcagatttttttgtgcacttggtccttgcattactggtttcaaagagggatgtagaccttatcttagtgttgactcaactgctcttaatggaagatggaatggtcacctgtgttgtgccataggggttgatggacagaattggatgtaccctgttgcttatggattctttgaggcagaaacaacagaaaactggacatggttctttcagcagttgcgcaaggctgtgggagatcttcctctactagcattgtgttcagatgcttgcaaaggtctaaaaaatgccatgaacactgttttccctcaagctgaaaaaagggagtgtttcagacacctaatgcagaactacgtgaagcaatttgttggatccgagtacatgtatcctgcagctagagcatataggagggaggtgttcgaccattacttttccaatgtccaagaaattcccaaggtgtctagttggttatatgagcatcatgatagtttgtggtatcgtagtgggtttaatccagccatcaagtgcgactatgttaccaacaacatagcagaagtgttcaacaattggattaaggattggaaagatctgcctgtctgtgacttggctgacaagataaggaaggaaatcatggagttgtttcataggaggagggaaataggacagaggttgcaaggtcgaatactaccctccgtggtccatatcctccatgtaaggactagaggtttaggtcacttaacagttaagaaagctgacaattacattgcggaggtgagggataataataatgtgcactctaagcacattgtgaatgctcaattgagacaatgttcatgcaacgagtggcagcatacggggaagccatgtcaccatgcccttcgcttaataacaacacaacaatttagagatgttcggatggaagattttgtggatgactactactcagttgataagttcatgaaggcttactcgagggtagtggagccaattggtgacaaatctttctggcctacagtgccatttgcaaaagaggtgtgtgcttctattgggaagcgtggagttggccgtcaaaggaaaaacatgattaaagggtgcctagagggaggaagtggtaagaagccaaacgaaaatgaaaatgtcaaaactaagaagatgattcgtgggaagttcaagtgtccaaactgtggtgaattgggacacaggaaagccagctacaaatgtcctttgaatggaacaaaaaaacggaaaaggagagcaaggaaaaatgttactaaaggttggttcccaaaagatgttgaggcatgatgatggtgcatgcactagccacacaaccacccccatgtgatgattgtgatgccagtattgcgaaaatctctccactttcatctcccagacctatctagaggctagtgctggaccagtgtaccctaggagctgggtgccaggtgcggtggcgggcggggcctagcaaagcatgacgctgtaggagggatccagtcatccgatacgtcagcactccggcacagcagtaggcatctcggaagctggcagggccacagggcaccacgcccaaggcttagccgcgcaggcactgagcagccaagtagtcaggcagtcagtgagcagcagcagacggcagcaaggctggaagcgcgaagtacctatataggcatataagtttagttcgaccgggagtttacttctctgttatctgtgacttgcccgaccccgacttgatgtgcattgtagattatcagaaattgattaatgatttaatcacagattttaatcaactcaacacgtcgagaagaatatttttgtgctcatagttttttagttcaagcaatgttaatactagtggtacttccctgagttcatatcaatgcttagtcttgggctcctcagaaatgcaaattctttctttggcttgcaattagaaacaagtgttggactgctgataatctggagaagaggggttgcagcacccaagcagctgccctttgtgtgaccaagaaagggaaacgatacaacacatcatcactacctgtgtttttgcccggcaattctggtttcttatctttgacactcgggatgagtcacctcgctcttagggctgatgagcggtcgtttgaggactggtggaggaaggccagcaacagtacaaggataagagaaaagggatcaactgtgtcattattttgggggcttggtgcctctggctgcatagaaatagaacgttttttatgggaatcatccattcagagggtgcagcaacatttcagtgacgagttctcctgttggctcttggtgcgcgccaggagtttgggtcagcttggtctccctagttccatgagtaatatcggatctaatccttttactcctctataacctttttgcttttcttttgtttcttttttctgttttagctatggatgtaagtcatgttttctctctctctaatataaagatgtgcagctctcctgcgcgttctagaaaaaatgaatgtaaaatttgatcttcaattgtttattggcccattataaaattgtacaaagcttctccaaatatgccaattgatccattacaattgtttcataactactgtttatggattttgggactgcagaactgatggattctaacagatgtaacagacctacagtagggatgctaggccaaggagttaaaatatatccacatgttagaatatttcgtaactgtagtaacttcaacattatatagattaatcatgaacttttagttgtattaaacaaataagctctgtatgttcattgttgtagaactaagtttattgtgaatttgtgaacacatatatttgttcatgaaactgcattggatttggactaacaaagtttgtgtatgtgatatgtttttagtctggatctgcccttggtcaagattcaaatatggcttctgcagggttggctcgggtgggtgagtggtgcgactcgtcctctcatgaggctcgtcaccttgagcaacatgccgatcctgcagcagctgcacctggaggagcagctcctgcgccgcacatcggacaactggtgtgtcatcaacgatggcatggcccctgctaccattctcatgggactgcaggagagtctcggagcttgtcgacatacagccggtcctctgggaccaagtgccgattgtgaggaggttcagtggaggtggcacgtcattgttgattggggaacggtggttgtgactttcatttgcaacaagaatgccgttgccgggctgcagatttatggcaaaaaatttgacagatttggtgaatttcatctgcgtgagaatggcaagaaaccacagatttcttgtgccgcatgaaggagtacataccttcgcggtcagttttcaccgatgaggtcactgcggccctgggagaacacttctcagttcagcccgtggatctacaagcagttctttccggtgatgaaggatccgtgccttctacaaagctgctgtcacaacaggacctagaaagaaattgtttcgtccaaagaatcccttaacaatatagaaagttgaagcgtgaccatgcttgtcgtttttgttgtgaaatatgagcagttttgtcgagctgtgaattcattcaaacattatggtcaacccagtacgtacatacgaatgcccaccaccatctttagtaacaaatggttatgttttggattgtaggtctaccgttccaagcttgggttacacgttatttgcctatgggctctagaccgagtgctaaaactatgagagactggctccaacatactctgtaaatggttatgtactctaaattataaagaaattttttgtcttcttatttcagcagcgtcttttaaactacttatttcagcagcagcgtcttttaaac

SEQ ID NO: 217133 - DNA, 2596 bp, Zea Mays
atgcaggtcttagacggtggagtcaatggcatagcagccaagcacgtggatgaaagacgcaaacctctcaatctcctagatggcctcgtggacgcgcgggaccgtgtcgcagagccagccatgcgcgacgtccgtccctcactctcttcgattctggactgctcgcgcctctcgcctccgtgttcacatcgccctacccgccgtaccacatgccagacgctggccaccggctccgccgccgcagcgactacatcgggggtgtgcagcctcccatcagactcccgccagcgccaaacccttcgactcggcgatggccacaccggagaagaagtcatacccacctgccatggtcgcggaggaggtgagggtgtgaggctgactggcgattggacccgtccccccattccacccgccgtcgccgacgtgtctgtccaaggaacacaagcacaaactactgtccagattgacgaggagccaggttctgatgaagacgacgatcttccaccacttgaagcaaacaccaacatgaatagaccatatgaactaatttctcaacggaacaactaattgaattttttgtccagtgcaaggtattagttgtgtaacaaattgttaaattctcacatgtcagatagtggtgcattccatggcttgatctgtctctttttactctaggccagcggcagacgcgctgcctgcctcccctggcttgctcctggccatctagcgtctgtcatgtgttctgcctgatgggttttctccttttttgcatatgccatatgttctgcccatctgttaattgccgccgctgttttcaggaaggtttagcgattgaggctgagtttgggcagacctcatcattgttagtttgtttgttatagagtaagctagcccaggggaaaaatagtgaacctggcagatgatggtatggagtaacctgttgttccattcaataggacaatctgagattgtagagatgtggtttctgcacttaatttttgggcgacaatttcaagggagtaacgtggtagtgatttctctccctttattatgatgaagttgtggcttgtatcaatgtcgtatctgcaatttgaaatatgtatatatgccatgtccgattagcaacacaagacattgggatctccaaatttcacggcattgattcaggatataattctctggccagtagactggcctactaacttcatttatggacaaaaatcaagggtgtacatcatccttatggcttatctggaaatggattgccatgtttctcaattctctcccagctactacaacctacccttcacgctttcctcaagcccaccgtgtgccagcccacgcatgcttgtttaaaacgcgcggcgggtgtgcgcgttagtcgttggtttcttgtgcgctgtgctgccgcgcttgcatatgctcagacttgcaggcaatctgtcgtgtgcgcggctgggctggaccttcaaatgcagatgcacagcagacggagtgtacaggtaagtgtatatgctgtgggcaggtggtgactactgacatcgtgcacagggtttcgtcgagtcggaacggacctgccgggtttcgtttcttccaagcttgggcatctcaagcatgcatggatgctgagctgtctgacgctttaaaatcgcctgcgggtaggagatgatgggaatgggagcagcaaagcaaagaacgatcaggcggcgggccattgcttaaacttggttgcttcggacgatatgatgcgcgacgagtctacatgcaagatcggttggcactgtggctcaaattaaaggctggtttaaagcatgcatcattggtgttagatacagaaaggaaaagaaaaaactggcacggcaggcgcgatacatatacactgcgcccgtctcttcggtggacactgaagaggagctggtgaatggacgggaaaaaaagaattctatgcatacggaatgcaaatctattggacagaaaaagattctatacataccaaatacaaacatattatgagttacattgcaggcccacacgaacaaaaattacatctctttagactttttgtagcttctgtccgtaagggtctgtaggttataaatgtgagaggctgcaacagaacgagtttgcatccggtatgctgtcgatcagagcccgaccaaacactcaggagtcgagaggcacgctacaccacacccgtgttcggaaccgcgcgataaccatcttgtcgaactatggaaatgttgctaagcaacaacgatctctaataccatgcagagatacaaatgcaattacatgatatgattatactttcatgaacaaattgtatgattggaagagtatatagacttggtaaagaacccataatggaaccccatagagaaaaacttctagaagattagacatggaaagaaccttgactggataatagataaacttgtaaacatagagttggactcatacacgacttggtaaccaacttggtacctgtcataaactttataacgagtcgttgttttccatgtaaacggcccctcaggatacaaaaggttataccgactgcaaataagtcgttgtagccaggttgtggtatagtgag

SEQ ID NO: 217134 - DNA, 2602 bp, Zea Mays
atgcaggtcttagacggtggagtcaatggcatagcagccaagcacgtggatgaaagacgcaaacctctcaatctcctagatggcctcgtggacgcgcgggaccgtgtcgcagagccagccatgcgcgacgtccgtccctcactctcttcgattctggactgctcgcgcctctcgcctccgtgttcacatcgccctacccgccgtaccacatgccagacgctggccaccggctccgccgccgcagcgactacatcgggggtgtgcagcctcccatcagactcccgccagcgccaaacccttcgactcggcgatggccacaccggagaagaagtcatacccacctgccatggtcgcggaggaggtgagggtgtgaggctgactggcgattggacccgtccccccattccacccgccgtcgccgacgtgtctgtccaagaggcaggaacacaagcacaaactactgtccagattgacgaggagccaggttctgatgaagacgacgatcttccaccacttgaagcaaacaccaacatgaatagaccatatgaactaatttctcaacggaacaactaattgaattttttgtccagtgcaaggtattagttgtgtaacaaattgttaaattctcacatgtcagatagtggtgcattccatggcttgatctgtctctttttactctaggccagcggcagacgcgctgcctgcctcccctggcttgctcctggccatctagcgtctgtcatgtgttctgcctgatgggttttctccttttttgcatatgccatatgttctgcccatctgttaattgccgccgctgttttcaggaaggtttagcgattgaggctgagtttgggcagacctcatcattgttagtttgtttgttatagagtaagctagcccaggggaaaaatagtgaacctggcagatgatggtatggagtaacctgttgttccattcaataggacaatctgagattgtagagatgtggtttctgcacttaatttttgggcgacaatttcaagggagtaacgtggtagtgatttctctccctttattatgatgaagttgtggcttgtatcaatgtcgtatctgcaatttgaaatatgtatatatgccatgtccgattagcaacacaagacattgggatctccaaatttcacggcattgattcaggatataattctctggccagtagactggcctactaacttcatttatggacaaaaatcaagggtgtacatcatccttatggcttatctggaaatggattgccatgtttctcaattctctcccagctactacaacctacccttcacgctttcctcaagcccaccgtgtgccagcccacgcatgcttgtttaaaacgcgcggcgggtgtgcgcgttagtcgttggtttcttgtgcgctgtgctgccgcgcttgcatatgctcagacttgcaggcaatctgtcgtgtgcgcggctgggctggaccttcaaatgcagatgcacagcagacggagtgtacaggtaagtgtatatgctgtgggcaggtggtgactactgacatcgtgcacagggtttcgtcgagtcggaacggacctgccgggtttcgtttcttccaagcttgggcatctcaagcatgcatggatgctgagctgtctgacgctttaaaatcgcctgcgggtaggagatgatgggaatgggagcagcaaagcaaagaacgatcaggcggcgggccattgcttaaacttggttgcttcggacgatatgatgcgcgacgagtctacatgcaagatcggttggcactgtggctcaaattaaaggctggtttaaagcatgcatcattggtgttagatacagaaaggaaaagaaaaaactggcacggcaggcgcgatacatatacactgcgcccgtctcttcggtggacactgaagaggagctggtgaatggacgggaaaaaaagaattctatgcatacggaatgcaaatctattggacagaaaaagattctatacataccaaatacaaacatattatgagttacattgcaggcccacacgaacaaaaattacatctctttagactttttgtagcttctgtccgtaagggtctgtaggttataaatgtgagaggctgcaacagaacgagtttgcatccggtatgctgtcgatcagagcccgaccaaacactcaggagtcgagaggcacgctacaccacacccgtgttcggaaccgcgcgataaccatcttgtcgaactatggaaatgttgctaagcaacaacgatctctaataccatgcagagatacaaatgcaattacatgatatgattatactttcatgaacaaattgtatgattggaagagtatatagacttggtaaagaacccataatggaaccccatagagaaaaacttctagaagattagacatggaaagaaccttgactggataatagataaacttgtaaacatagagttggactcatacacgacttggtaaccaacttggtacctgtcataaactttataacgagtcgttgttttccatgtaaacggcccctcaggatacaaaaggttataccgactgcaaataagtcgttgtagccaggttgtggtatagtgag

SEQ ID NO: 217135 - DNA, 1636 bp, Zea Mays
ctcctactgcttctgcagatctcccctacaactctgcaagccaatgctagcggcgggccgacatcagagcgtcgcattgtggatgccctaaatggaatcacgcaatggcgaggctgatgaattgcctcctcgagacgcaggcgatgaagcaaagaagcactaccaagaagggtgccctgggtgccggctggacgagacgaatgagagcaacaccggcatcccctacctcaacttcttctacatctggatcgtctgcctcacctcctctctgccaatccagtcgctattcccttatatatacttcatgatgagggactttaaaatcgcaaaacaagagcaagacatcggattctatgctggatttgttggggcaacctatttccttgccagaaccgtcagttctgtgccatggggcatatttgctgacaagtatggaaggaagccctgcattgtgatcagcatcatctcagtgattgtgttcagcacactctttggccttagcacaagttactggatggccattgtgactagggggctgcttgggttgctttgtggtatactgggaccaatcaaggcctatgctacggaagtctgcaggaaagagcaccaagctctagcaatgtctgttgttacatcatcaagagcaatagctcttgttgttggaccagctattggagggtttctagcacagcctgcagagaagtacccaaatattttctccaatggatccatatttgggaggtttccatacttcctcccaggccttgtcatatcgatactagcagcaggatcatgtattgcatgcatttggcttccagaaacgctgcactttcatgataatgaaaaggtagaagctattgatgaaatggaggcacaagttggtgactctaacttagaagttggaaaagctaaagaatctggttgcacgtctacaaagaacctgctaaagaactggcaactgatgtcagcagtaatcctctactgtatcttttgtctccatgacacagcttatcttgagacattttcactctgggcagtgagcagcagaaaattccggggcctgagtttgacatcccaggatgttggcattgtgctagctgtctcaggtattggtgtgctcgtataccaacttgctgtttatcctttcattgtcaagtattttggaccagttaggccgctacgtccctctgtggtcttgtctatacttgtcctcgcaatgtatcccttcatggccaaactacaagggctggagctcaagttgctcatcaacatagcttcgcttttagagaatgtgttctctgtgagttagctttttttattagtcagttctccaggaattttttattttgaacagacttatgcatatgcgaacaaaataggctacagttactactgcgtgcaatattttgcaaaacaccgcagtgacacaagaacacagaggtattgcgaatggcatctcagtgacactgatgtcattgttcaaaggtgtagctccagcggcagcaggaattttgttttcgtggactcagaagcacatgactgggctgttattaccaggctccaaaacacacccagtacagaactgaagatagcttcaccagactccagctcatagataacagacgatgatctgaag

SEQ ID NO: 217136 - DNA, 681 bp, Zea Mays
ctttgaccttgtacacattggtgaaccacaatgtggtgggatttggatttctactcaggaacgacatcagttgaaggatctaaatggtcactttttagttgaaggacccaacatagaattcacgatatatacggccaaattttgagttctggtccttggtcaagacgacatacagtaacgacaacagcgatgaggacgacgaagagcttggcgacattgacgcacctggaatgaatgtgggcagcttggatgatcacttcgaaatagattttaacagtgacgatgacattgagtataagatgaataagatgtccataacgccgcaacgcactttctaccatccactggctacaaacagtgagtccaaccgcatgcctgcgaggatcagaccttcagtgagccccccatcatagcaagggcaacgcgtggaaaaccggtttgtgattgtatacttggtagtcagcccttaggaacaggtatgtgtttgtagcaagacttacgacgtgaaatgaggattctcttggggacattaatggtataacgtgcgaatgttagaacctaattttcaattatcaatgagtcaggtgcagcctaattttcaaggacctgttcgtagcatgtaatgtaacgcatctaggcaaaacaaccctctgttgcccagttcatgctgaagtctccagc

SEQ ID NO: 217137 - DNA, 2150 bp, Zea Mays
aaacttctcaaatcatgactataggatccgtttttaattgacataagggacaaagattattatgattacatgctaggcattatagaccctaccaagaaaaggagtacagatgatgaagctatgtttgttactattttgagggcactatcacaagcagtatccaagatagacaccgtgtatcatcatgcacttctacacaatatatttaccatgtgtgtctggcacttgcacagtgacacgagggtggtgtttttggatttaataaccagattggctgctgtggcagaccaatatctcagagaatgtttgcagatgcttgtgaataatttcactccacctggacccctcattcgttacattgaggagccaaggtggcttccaaagaaggaaaaaatctactctcagttgcaagagagtttgaaaatgatttctgacactgtgcccttggcaccaaggatgttaaaggatataattgataggagtatgccaaagttgtttgatagcaaagctaagatggtatcatttgtcaagtgcatgttgggacttgatgctgttgtttgggacattattgggtcgtcattgttggagaaagttgtgtacctacttacagaattggatgttaatataacatgggaagatattcttcaagatgaacacaacaaaggtatatttgacatggagcttgaggatttggctgaggatgaagataaccttggtcaagaaggaacaaaggtccattttggaggaaatatgtgtgccgagaaacttgatggtttaatggtggttgtgtgtgagcacctcaagtcacgtgtagaagaacctgagcgcctaattaaggaatttgtcactttgaaggctatatttaaatcacatgtgctgagggtgcacaaatccaaatttgcacagtttatcatgttttatgcttgttccctgcatcctgagattggcgatggctttgctaattttcttactgatatttttattgacaaggacaaaaacgaggatgcaattactaggctagtggactggtgtgattattattgtggccatcagctggacaatggggtgacagcaaatcctataaagcaccagctattttatgctagctgccaggctgtgatgtatgtcctatgctttcggttaagatctattatggactacccaaatcttaaacaacaactttttcgaatgcgaatccgggatatcttggtccacccattgcagccattaaaggtgtgcttgccttcaatagtgaatgagttcctgagacaggctacagctgcgagcctgttccatgcacctgcgatctcaatgcacgaagatgcagttgaatccgatctatcgaaggcatttggaggacttaataggcttgacatgttcttcccatttgacccgtatctacttaaagagtctgacagatatatacggccaaattttgagttctggtccttggtcaagacgacatacagtaacgacaacagcgatgaggacgacgaagagcttggcgacattgacgcacctggaatgaatgtgggcagcttggatgatcacttcgaaatagattttaacagtgacgatgacattgagtataagatgaataagatgtccataacgccgcaacgcactttctaccatccactggctacaaacagtgagtccaaccgcatgcctgcgaggatcagaccttcagtgagccccccatcatagcaaggttctgctcagctctttacttgactgatgatgacacaaaatcagatgctaggaagttgcacgtgccaagaagggaccaggggatgacgaccaaacatacaccggagtgtattctatttattattccagttgctagtagggtcaaaactttaatgcagagtgtatatgtgtttcagggcaacgcgtggaaaaccggtttgtgattgtatacttggtagtcagcccttaggaacaggtatgtgtttgtagcaagacttacgacgtgaaatgaggattctcttggggacattaatggtataacgtgcgaatgttagaacctaattttcaattatcaatgagtcaggtgcagcctaattttcaaggacctgttcgtagcatgtaatgtaacgcatctaggcaaaacaaccctctgttgcccagttcatgctgaagtctccagc

SEQ ID NO: 217138 - DNA, 2291 bp, Zea Mays
agggtgatccaaaagcaaggaggggcaattgcaaaagctgctactgtattagctaccaaacttctcaaatcatgactataggatccgtttttaattgacataagggacaaagattattatgattacatgctaggcattatagaccctaccaagaaaaggagtacagatgatgaagctatgtttgttactattttgagggcactatcacaagcagtatccaagatagacaccgtgtatcatcatgcacttctacacaatatatttaccatgtgtgtctggcacttgcacagtgacacgagggtggtgtttttggatttaataaccagattggctgctgtggcagaccaatatctcagagaatgtttgcagatgcttgtgaataatttcactccacctggacccctcattcgttacattgaggagccaaggtggcttccaaagaaggaaaaaatctactctcagttgcaagagagtttgaaaatgatttctgacactgtgcccttggcaccaaggatgttaaaggatataattgataggagtatgccaaagttgtttgatagcaaagctaagatggtatcatttgtcaagtgcatgttgggacttgatgctgttgtttgggacattattgggtcgtcattgttggagaaagttgtgtacctacttacagaattggatgttaatataacatgggaagatattcttcaagatgaacacaacaaaggtatatttgacatggagcttgaggatttggctgaggatgaagataaccttggtcaagaaggaacaaaggtccattttggaggaaatatgtgtgccgagaaacttgatggtttaatggtggttgtgtgtgagcacctcaagtcacgtgtagaagaacctgagcgcctaattaaggaatttgtcactttgaaggctatatttaaatcacatgtgctgagggtgcacaaatccaaatttgcacagtttatcatgttttatgcttgttccctgcatcctgagattggcgatggctttgctaattttcttactgatatttttattgacaaggacaaaaacgaggatgcaattactagagtgtctgcagtttcatatgttggaagctatctgtcccgggcaaggttcatttccgtaaatatagttgtttctgtactcaaaaggctagtggactggtgtgattattattgtggccatcagctggacaatggggtgacagcaaatcctataaagcaccagctattttatgctagctgccaggctgtgatgtatgtcctatgctttcggttaagatctattatggactacccaaatcttaaacaacaactttttcgaatgcgaatccgggatatcttggtccacccattgcagccattaaaggtgtgcttgccttcaatagtgaatgagttcctgagacaggctacagctgcgagcctgttccatgcacctgcgatctcaatgcacgaagatgcagttgaatccgatctatcgaaggcatttggaggacttaataggcttgacatgttcttcccatttgacccgtatctacttaaagagtctgacagatatatacggccaaattttgagttctggtccttggtcaagacgacatacagtaacgacaacagcgatgaggacgacgaagagcttggcgacattgacgcacctggaatgaatgtgggcagcttggatgatcacttcgaaatagattttaacagtgacgatgacattgagtataagatgaataagatgtccataacgccgcaacgcactttctaccatccactggctacaaacagtgagtccaaccgcatgcctgcgaggatcagaccttcagtgagccccccatcatagcaaggttctgctcagctctttacttgactgatgatgacacaaaatcagatgctaggaagttgcacgtgccaagaagggaccaggggatgacgaccaaacatacaccggagtgtattctatttattattccagttgctagtagggtcaaaactttaatgcagagtgtatatgtgtttcagggcaacgcgtggaaaaccggtttgtgattgtatacttggtagtcagcccttaggaacaggtatgtgtttgtagcaagacttacgacgtgaaatgaggattctcttggggacattaatggtataacgtgcgaatgttagaacctaattttcaattatcaatgagtcaggtgcagcctaattttcaaggacctgttcgtagcatgtaatgtaacgcatctaggcaaaacaaccctctgttgcccagttcatgctgaagtctccagc

SEQ ID NO: 217139 - DNA, 2982 bp, Zea Mays
cgcgaggcggaacccgtctaggatacgcgagtttcgctggccgttgtattgcaggaaaatttcccgttttctatatttttctgtgaatatgattcctgtaattccagaagagccctaaacttcgcgtcctacacgcgcccccctctcgctcccacacaaaaaccctagccatccaacaggcaacaggagaccatcaatcatcaataaataaaaaatagtagtaattcctaaccctaggaggcatcctgttccacgcgactcatcccgtcgtccgccgagccgccgacgccacgccaggcctccacgccgcgcctccgagctccgtcgccccggaccgccggcgccgggcagccgtgagctccgaccggacctgcccgcgcccaggctgaggcgccgcctacccgagctccgcccaggccgcccgcccgctcggcaggacgactggacgagctcctcgccgcgggcgccgagcagaggagctcctctcgcggaagcgcggacccgccttcaggccgaggtgccgagctccgccccgccccgcgcggccgcgcccctgcccaggtccagccgccccgctcggctcctgttccccgctggggttccggcacaaagctccacggctccgcatcccattgctgagattcttcccgtgaggaggtgttgggggtagctggcgatgggggcggagcaggggtacgaagatatgcaggggaccttcagggactccgaggtgttcgagtttgtcgggaaagtcctgcagtccgtgcggatggatccgtttttaattgacataagggacaaagattattatgattacatgctaggcattatagaccctaccaagaaaaggagtacagatgatgaagctatgtttgttactattttgagggcactatcacaagcagtatccaagatagacaccgtgtatcatcatgcacttctacacaatatatttaccatgtgtgtctggcacttgcacagtgacacgagggtggtgtttttggatttaataaccagattggctgctgtggcagaccaatatctcagagaatgtttgcagatgcttgtgaataatttcactccacctggacccctcattcgttacattgaggagccaaggtggcttccaaagaaggaaaaaatctactctcagttgcaagagagtttgaaaatgatttctgacactgtgcccttggcaccaaggatgttaaaggatataattgataggagtatgccaaagttgtttgatagcaaagctaagatggtatcatttgtcaagtgcatgttgggacttgatgctgttgtttgggacattattgggtcgtcattgttggagaaagttgtgtacctacttacagaattggatgttaatataacatgggaagatattcttcaagatgaacacaacaaaggtatatttgacatggagcttgaggatttggctgaggatgaagataaccttggtcaagaaggaacaaaggtccattttggaggaaatatgtgtgccgagaaacttgatggtttaatggtggttgtgtgtgagcacctcaagtcacgtgtagaagaacctgagcgcctaattaaggaatttgtcactttgaaggctatatttaaatcacatgtgctgagggtgcacaaatccaaatttgcacagtttatcatgttttatgcttgttccctgcatcctgagattggcgatggctttgctaattttcttactgatatttttattgacaaggacaaaaacgaggatgcaattactagagtgtctgcagtttcatatgttggaagctatctgtcccgggcaaggttcatttccgtaaatatagttgtttctgtactcaaaaggctagtggactggtgtgattattattgtggccatcagctggacaatggggtgacagcaaatcctataaagcaccagctattttatgctagctgccaggctgtgatgtatgtcctatgctttcggttaagatctattatggactacccaaatcttaaacaacaactttttcgaatgcgaatccgggatatcttggtccacccattgcagccattaaaggtgtgcttgccttcaatagtgaatgagttcctgagacaggctacagctgcgagcctgttccatgcacctgcgatctcaatgcacgaagatgcagttgaatccgatctatcgaaggcatttggaggacttaataggcttgacatgttcttcccatttgacccgtatctacttaaagagtctgacagatatatacggccaaattttgagttctggtccttggtcaagacgacatacagtaacgacaacagcgatgaggacgacgaagagcttggcgacattgacgcacctggaatgaatgtgggcagcttggatgatcacttcgaaatagattttaacagtgacgatgacattgagtataagatgaataagatgtccataacgccgcaacgcactttctaccatccactggctacaaacagtgagtccaaccgcatgcctgcgaggatcagaccttcagtgagccccccatcatagcaaggttctgctcagctctttacttgactgatgatgacacaaaatcagatgctaggaagttgcacgtgccaagaagggaccaggggatgacgaccaaacatacaccggagtgtattctatttattattccagttgctagtagggtcaaaactttaatgcagagtgtatatgtgtttcagggcaacgcgtggaaaaccggtttgtgattgtatacttggtagtcagcccttaggaacaggtatgtgtttgtagcaagacttacgacgtgaaatgaggattctcttggggacattaatggtataacgtgcgaatgttagaacctaattttcaattatcaatgagtcaggtgcagcctaattttcaaggacctgttcgtagcatgtaatgtaacgcatctaggcaaaacaaccctctgttgcccagttcatgctgaagtctccagc

SEQ ID NO: 217140 - DNA, 1483 bp, Zea Mays
tttagtgtgtggtggaatcctccagactggttagcttgccaccaactttgggttcactgacttctcttcgtgaactgtgtgttgcaaagaacaggcttgataacttgcctgtagaaataggactgctgaagcacctccaggtcctcatagcaaataacaacaggataacttcattgccttcatcaataggagattgtgaatctctcactgtggttcacctgtcatcaaatctcttaactgaactgccagagacctttgcgaaccttcgtaatcttaagaatttgcttataagcaacaatggccttacgtccttgccagcagcgtttttcaaaaagtgctcgcagcttactacactggatctccatggcacagaaatcacaaatgatgttcttcgacaggtggaggggtgggaagagttcgaccagcggcggaggcagaaacatcagaagcagctcgacttccgtgttggctcatctggtgtgttcgatgaaggcgcggatgatgataataggcgaaggtgactgcctgaaaattgtgagcataatactttgctacgatatttctcccaaagaaccgtagaaatgtacaactgaaaactacttctatggagcccgagatgtacaacctttttcattcagtcacgtagatagacacgtcaggaaaacaacatccttggaaagccatggcagataatgaggtaataataacaacgccgcactcatgcgacgcccccattgaccctgataacctgcccgttcacccagcccgaggcctcgctcgccaggaacgccaccacgggcgctatgtctgtcgtctcggctatacccatggagttctttatcctctctaggaacgcctcatccttcccggcaaggaagagctccgtgcgcacagggcccggcgccaccacgttggccgtgatccccttcgccgccacctccttggccaggaccctcgtcatcgcctccacagcggcgttggacgcagcgtacgccgcgtagcccggcggcagcacggcaaccgtcgtggacgagaacgtcatgatgcgcccaccgctgttgggggggatgcgccgggcggcctcccggcacaccaggaacttgccgcgcgtgttcaccgcgaacgtggcgtcgaagtcctcgacggcagtgtcggccagcgcggggtacttggcgtccatgatgcccgcgcaggcgaccactacgtggggcggggacccgaatgcctcctcggcgcggtcgaagagcgcgcgcacggcggccgggtcggagacgtccgcgcgcacggccacggcgcggaggccgcgcgaggcgagctccgcgacgagctcctcggccttggccgggttggtggcgtagttgaccacgacacgcgcgccgagcgcggcgaggtgggacgacacctcgcggccgatgccccgggagccaccggtgacgagcgcgatgcggccttcgagcgccggcgcggtggacactgctgccat

SEQ ID NO: 217141 - DNA, 2106 bp, Zea Mays
cctgacttcgagtcttgtcttgtgggctgtgcctgtgacggactgacggcacagaggtaatggaggccgcgcctaccaccatcaccgtccaggtcaagttcgccgggcggacgatccccgtggaggtcccggcagcggcttccggcgcggagctgaagcgcctcctccagccgctgaccaatgtcctcccgcgcggccagaggctcatctgcaaaggcaaagtgctccaggatgccgcaagcctgagctcgatgcaagtagtgggcggatccaaggtgatgctcatcgcgtcgcaggggctccatcagggggatggtcctatcacaaataatagcagtagctcagcaacaactgtgagaaggccttcaaatgttaaggagaatcaaacacaaaagccagaggtagttgtcaccaaaagccgatctgagcgctggaagttaacaggtgttgttgcgctgcaagactgtgacttgaaggtaatacctgaagaagtctgggattgtggcacctcgatacgaatactagacattagctacaactgtatcaaggaaattccacacaaaatctctgctcttaaatctctaaataaattgctcctaactgaaaatgatatagttgatgatagcatctgctgggaaggtctatcatgtcttcaaaagctattgaatttatctttaagcgaaaaccgactggttagcttgccaccaactttgggttcactgacttctcttcgtgaactgtgtgttgcaaagaacaggcttgataacttgcctgtagaaataggactgctgaagcacctccaggtcctcatagcaaataacaacaggataacttcattgccttcatcaataggagattgtgaatctctcactgtggttcacctgtcatcaaatctcttaactgaactgccagagacctttgcgaaccttcgtaatcttaagcagcgtttttcaaaaagtgctcgcagcttactacactggatctccatggcacagaaatcacaaatgatgttcttcgacaggtggaggggtgggaagagttcgaccagcggcggaggcagaaacatcagaagcagctcgacttccgtgttggctcatctggtgtgttcgatgaaggcgcggatgatgataataggcgaaggtgactgcctgaaaattgtgagcataatactttgctacgatatttctcccaaagaaccgtagaaatgtacaactgaaaactacttctatggagcccgagatgtacaacctttttcattcagtcacgtagatagacacgtcaggaaaacaacatccttggaaagccatggcagataatgaggtaataataacaacgccgcactcatgcgacgcccccattgaccctgataacctgcccgttcacccagcccgaggcctcgctcgccaggaacgccaccacgggcgctatgtctgtcgtctcggctatacccatggagttctttatcctctctaggaacgcctcatccttcccggcaaggaagagctccgtgcgcacagggcccggcgccaccacgttggccgtgatccccttcgccgccacctccttggccaggaccctcgtcatcgcctccacagcggcgttggacgcagcgtacgccgcgtagcccggcggcagcacggcaaccgtcgtggacgagaacgtcatgatgcgcccaccgctgttgggggggatgcgccgggcggcctcccggcacaccaggaacttgccgcgcgtgttcaccgcgaacgtggcgtcgaagtcctcgacggcagtgtcggccagcgcggggtacttggcgtccatgatgcccgcgcaggcgaccactacgtggggcggggacccgaatgcctcctcggcgcggtcgaagagcgcgcgcacggcggccgggtcggagacgtccgcgcgcacggccacggcgcggaggccgcgcgaggcgagctccgcgacgagctcctcggccttggccgggttggtggcgtagttgaccacgacacgcgcgccgagcgcggcgaggtgggacgacacctcgcggccgatgccccgggagccaccggtgacgagcgcgatgcggccttcgagcgccggcgcggtggacactgctgccat

SEQ ID NO: 217142 - DNA, 2164 bp, Zea Mays
gtagagtcgaaacagaatcctgacttcgagtcttgtcttgtgggctgtgcctgtgacggactgacggcacagaggtaatggaggccgcgcctaccaccatcaccgtccaggtcaagttcgccgggcggacgatccccgtggaggtcccggcagcggcttccggcgcggagctgaagcgcctcctccagccgctgaccaatgtcctcccgcgcggccagaggctcatctgcaaaggcaaagtgctccaggatgccgcaagcctgagctcgatgcaagtagtgggcggatccaaggtgatgctcatcgcgtcgcaggggctccatcagggggatggtcctatcacaaataatagcagtagctcagcaacaactgtgagaaggccttcaaatgttaaggagaatcaaacacaaaagccagaggtagttgtcaccaaaagccgatctgagcgctggaagttaacaggtgttgttgcgctgcaagactgtgacttgaaggtaatacctgaagaagtctgggattgtggcacctcgatacgaatactagacattagctacaactgtatcaaggaaattccacacaaaatctctgctcttaaatctctaaataaattgctcctaactgaaaatgatatagttgatgatagcatctgctgggaaggtctatcatgtcttcaaaagctattgaatttatctttaagcgaaaaccgactggttagcttgccaccaactttgggttcactgacttctcttcgtgaactgtgtgttgcaaagaacaggcttgataacttgcctgtagaaataggactgctgaagcacctccaggtcctcatagcaaataacaacaggataacttcattgccttcatcaataggagattgtgaatctctcactgtggttcacctgtcatcaaatctcttaactgaactgccagagacctttgcgaaccttcgtaatcttaagaatttgcttataagcaacaatggccttacgtccttgccagcagcgtttttcaaaaagtgctcgcagcttactacactggatctccatggcacagaaatcacaaatgatgttcttcgacaggtggaggggtgggaagagttcgaccagcggcggaggcagaaacatcagaagcagctcgacttccgtgttggctcatctggtgtgttcgatgaaggcgcggatgatgataataggcgaaggtgactgcctgaaaattgtgagcataatactttgctacgatatttctcccaaagaaccgtagaaatgtacaactgaaaactacttctatggagcccgagatgtacaacctttttcattcagtcacgtagatagacacgtcaggaaaacaacatccttggaaagccatggcagataatgaggtaataataacaacgccgcactcatgcgacgcccccattgaccctgataacctgcccgttcacccagcccgaggcctcgctcgccaggaacgccaccacgggcgctatgtctgtcgtctcggctatacccatggagttctttatcctctctaggaacgcctcatccttcccggcaaggaagagctccgtgcgcacagggcccggcgccaccacgttggccgtgatccccttcgccgccacctccttggccaggaccctcgtcatcgcctccacagcggcgttggacgcagcgtacgccgcgtagcccggcggcagcacggcaaccgtcgtggacgagaacgtcatgatgcgcccaccgctgttgggggggatgcgccgggcggcctcccggcacaccaggaacttgccgcgcgtgttcaccgcgaacgtggcgtcgaagtcctcgacggcagtgtcggccagcgcggggtacttggcgtccatgatgcccgcgcaggcgaccactacgtggggcggggacccgaatgcctcctcggcgcggtcgaagagcgcgcgcacggcggccgggtcggagacgtccgcgcgcacggccacggcgcggaggccgcgcgaggcgagctccgcgacgagctcctcggccttggccgggttggtggcgtagttgaccacgacacgcgcgccgagcgcggcgaggtgggacgacacctcgcggccgatgccccgggagccaccggtgacgagcgcgatgcggccttcgagcgccggcgcggtggacactgctgccat

SEQ ID NO: 217143 - DNA, 423 bp, Zea Mays
gcgaactttaccactgtgggaattagaggtgttgacatcagcatgaatactcatctgaagactgtgaagctgacactaaaagggaaaaatcctgttacccttgatcaccttagtgtgaggggaaacaacatccgctattatatccttcctgacagcctaaacctggagactttgctggttgaggaaacaccaagggtcaagcctaagaagcctacttctgggaagcccttgggccgtgggcgtggccgtggtcgtgggcgcggtcggggtcggggacgttgagcatgctagctgcttttggaaattgcattgcgtgcatctgcagtgtaatctacattcctatcaattgtacgaagtatgcctttgattatgcaaccatgtatcaattgtttttttttgccagaaataaaaaacaaatcttat

SEQ ID NO: 217144 - DNA, 4243 bp, Zea Mays
aaaaaacttcacttattgaagggtaaattctaaaaggagcgaggggcaaattctgaaaaatctgggctgtccgctagtccactcttctggtcctctcgcttttgcgctcccttggtcgtcttcgtcccctgctcgtctcccgtccgttttcggatgcccactccgaccaaaaccctagctacttcgtgaaggtggaggggaggagatggcggcagcggatgggcgcagcggcgacttccgggtcaggggtggcagcgttgggggtcggatcgaccgactggtggtggagaacttcaagtcgtacaagggtgagcagacgattgggcctttcgtcgacttcacagccatcatcggccctaacggcgccggcaagtccaacctgatggacgccatcagcttcgtgctgggcgtgcgctcaacgcaccttcgaggcgcgcagctcaaggacctcatttacgccctcgacgaccgcgacaaggaggccaagggccgcaaggcttccgtccgcctcttctactgccaacccaaccaggaggagctctgcttcacccgcagcatcaccggcgccggcggcagtgagtaccgcatcgaccgcaaccaagtcacctgggacgtctacaacgccaagctcaggtccctcggcatcctcgtcaaggcccgcaacttcctcgtctttcagggtgatgtagaatccattgcctccaagaaccccaaggagctcaccgctctcctggagcagatctcaggctctgatgagcttaggagggagtatgacgagctggaggagcagaaagccagggccgaagagaagtctgctcttgtgtatcaagagaaaaggaccattgtcatggagcggaagcagaagaaggtgcaaaaagaggaggcagagaagcatctacgccttcaacaggacctgaaactgttgaagacagagcattacctttggcaactctataccatcgaaaaagacatagagaaaattgaagctgagcttgtggaggatagagaatctcttcagcaagtgcaggaagagaatcgatccagtgactatgaactgactgcaaaaaagaaggagcaaagtgcatttctcaagaaaatcacattgtctgagaaaagcataaccaagaaaaagcttgaactcgacaagaagcaacctgagcttcttaaattaaaagagcaaatatctcgtctcaaatcaaaaatcaaaagttgcaagaaagagattgacaaaaagaaggatgatcacaaaaaacatcttggagagctgagaaggctgcaaagtgatctggttgaggtcacagaagctattgaggaattgaatgagcaaggacaagatacaagtggaaaactgttattagccgacgaccaactccaggagtatcatagaattaaggaggatgcaggaatgaagacagcaaagctaagagatgagaaagaagttatagaaaaaaaattaaatgctgatgctgaagcaaaaaagaatttagtggagaacatgcagcagctggaaagccgtaaagatgagatatcatcacaagaacgtgaactgcagacaaaacttagcaagattctccattctattcccaagcttgaaaatgagctcacacacttgcatgaggaacacaacaaaattgcaaaggaacgccaatcttcaggatctgaataccaaatgctgaagcagagattggatgaaatagaaacacaactacgggagcttaaagctgacaaacatgaaagtgagcgtgatgctcggttaaaagaaaccgttggacgtctaaagcggctattccctggagtccatggccgcatgcttgaactttgcaggccctcgcagaagaaatataaccttgctgttactgttgccatgggaaagttcatggatgcagttgtagtggaagacgagaacactggaaaggaatgcattaagtatctgaaggagcagcggcatcctccgcagacatttattcccttgcaatcagtccgtgtgaagccgataattgagaagctgcgaactcttggtggatctgcacagttagtttttgatgtcattcattttgaccgagttttggagaaagcagttctgtatgctgttggaaatacacttgtctgtgataaacttgatgaagctaaagccttaagttggagtggtgaaaggtataaagttgttactgtcgatgggattctgctgactaaatctggcacaatgactggtggaacaagtggggggatggaagctagatcaaacaaatgggatgacagcacaatagaatctttgaagaagaagaaaaatctgttggaaaataaaatgtcagaacttggttcccccagggagttgcagagaaaagagcttgccatatctgagaaaataactggacttgagaaaaagttgcactactcgaatgttgaacagaataaccttagagggaaactagctaaattagcatctgagaggagtaatattgagacagagattaatcgtctgaagcctggagaggaggagctcgagacccgtattggtaaaagggaagcagaagcaagaaaacttgagaaaaaaattaatgacattgtggacaaggtgtacagagattttagcatttcagttggtgtgaagaatatccgcgagtatgaagaaaagcagctaaaagatgctcaagcactacaggagaggaagctaagcctaagtaaccaaatgtcaaaattgaaataccagcttgaatatgaacaaaagcgagatatgcatgcaccaattgtgaagttaacggagacacatgagtccttagagaaagagcttaagggcttacaggagagagagtctggtgctaaggctgaagctgaacaaattttggctcagatggaagaactgaagactgaggctgatgactggaaatccaagtcggatgaatgtgagaaggttattgatgaattgaaggagcagaatggtaatgttgcatctacattggcaaagatggatcgccaagtgaaatcaaaggagggacaacttgcacaacttatatcacgccagcgagaggttcatgagaagtgtgaacttgaacagttgaagcttcctactgtaaacgacccaatggataccggaacatcctcacaagaaccaatccttgattacagccagcttagcaaaagccatctgcaggatatacgaccttctgaacgtgacaaacatgaggcagagttcaaaaaaagaactggtgtgctactagctgatattgagcgcactgctcctaatctaaaagccctggatcagtatgatgcactccaacaaaaggaaaaggaggttactgaaaggtttgaagcagctaggaaagaagaacgagagatatctgacaaatataactcagtcaagcaaaggaggtatgagctgtttatggaggccttcgatcacatatctaaaggcatcgacaaaatctataagcagctgacaaaaagccatacacatccactcggaggaacagcatatttaaatctagaaaatgaagacgaaccgtttcttaatggaatcaagtacacagctatgccacctaccaagcggtttagagatatggaacagttatccggtggggagaagactgttgcagcactggctttgctttttgccattcacagttttaggccatcaccgttcttcatattggacgaagtagatgctgctctggacaatttaaatgtggccaaggttgccgggtttatcagatcaaaatcatgtgaacgtgttggtgatgaacaaggcagcgatggcgagagtggttttcagagcatagttatatctctgaaggacagtttctatgacaaggccgaggcacttgttggtgtttatagggactcagaacgaagttgctcgaggactctcaccttcgacctgagaaagtatagggaatcgtgaagcagcttttgttgaatgtttgtactatgtgtgtagttgcctgctccatcagcttgctagatagctgtcgtgagccttcgatgttttaactatctgtatactcctagtcctacataagtgctagctgaacaaggaccctgaaatattcatttggtaggtggataactgatgtttcgaacacgcataaacttttttacctgttgtatgaagccatttctccgaattactataatctgtttaattatttcgtggtgttcaatttatctccacggttcgctcagtagtcacttgctgaagtgtgcagtgggctaatggcgtacgcatctgtttttgccgatactaaag

SEQ ID NO: 217145 - DNA, 3378 bp, Zea Mays
gtccgctagtccactcttctggtcctctcgcttttgcgctcccttggtcgtcttcgtcccctgctcgtctcccgtccgttttcggatgcccactccgaccaaaaccctagctacttcgtgaaggtggaggggaggagatggcggcagcggatgggcgcagcggcgacttccgggtcaggggtggcagcgttgggggtcggatcgaccgactggtggtggagaacttcaagtcgtacaagggtgagcagacgattgggcctttcgtcgacttcacagccatcatcggccctaacggcgccggcaagtccaacctgatggacgccatcagcttcgtgctgggcgtgcgctcaacgcaccttcgaggcgcgcagctcaaggacctcatttacgccctcgacgaccgcgacaaggaggccaagggccgcaaggcttccgtccgcctcttctactgccaacccaaccaggaggagctctgcttcacccgcagcatcaccggcgccggcggcagtgagtaccgcatcgaccgcaaccaagtcacctgggacgtctacaacgccaagctcaggtccctcggcatcctcgtcaaggcccgcaacttcctcgtctttcagggtgatgtagaatccattgcctccaagaaccccaaggagctcaccgctctcctggagcagatctcaggctctgatgagcttaggagggagtatgacgagctggaggagcagaaagccagggccgaagagaagtctgctcttgtgtatcaagagaaaaggaccattgtcatggagcggaagcagaagaaggtgcaaaaagaggaggcagagaagcatctacgccttcaacaggacctgaaactgttgaagacagagcattacctttggcaactctataccatcgaaaaagacatagagaaaattgaagctgagcttgtggaggatagagaatctcttcagcaagtgcaggaagagaatcgatccagtgactatgaactgactgcaaaaaagaaggagcaaagtgcatttctcaagaaaatcacattgtctgagaaaagcataaccaagaaaaagcttgaactcgacaagaagcaacctgagcttcttaaattaaaagagcaaatatctcgtctcaaatcaaaaatcaaaagttgcaagaaagagattgacaaaaagaaggatgatcacaaaaaacatcttggagagctgagaaggctgcaaagtgatctggttgaggtcacagaagctattgaggaattgaatgagcaaggacaagatacaagtggaaaactgttattagccgacgaccaactccaggagtatcatagaattaaggaggatgcaggaatgaagacagcaaagctaagagatgagaaagaagttatagaaaaaaaattaaatgctgatgctgaagcaaaaaagaatttagtggagaacatgcagcagctggaaagccgtaaagatgagatatcatcacaagaacgtgaactgcagacaaaacttagcaagattctccattctattcccaagcttgaaaatgagctcacacacttgcatgaggaacacaacaaaattgcaaaggaacgccaatcttcaggatctgaataccaaatgctgaagcagagattggatgaaatagaaacacaactacgggagcttaaagctgacaaacatgaaagtgagcgtgatgctcggttaaaagaaaccgttggacgtctaaagcggctattccctggagtccatggccgcatgcttgaactttgcaggccctcgcagaagaaatataaccttgctgttactgttgccatgggaaagttcatggatgcagttgtagtggaagacgagaacactggaaaggaatgcattaagtatctgaaggagcagcggcatcctccgcagacatttattcccttgcaatcagtccgtgtgaagccgataattgagaagctgcgaactcttggtggatctgcacagttagtttttgatgtcattcattttgaccgagttttggagaaagcagttctgtatgctgttggaaatacacttgtctgtgataaacttgatgaagctaaagccttaagttggagtggtgaaaggtataaagttgttactgtcgatgggattctgctgactaaatctggcacaatgactggtggaacaagtggggggatggaagctagatcaaacaaatgggatgacagcacaatagaatctttgaagaagaagaaaaatctgttggaaaataaaatgtcagaacttggttcccccagggagttgcagagaaaagagcttgccatatctgagaaaataactggacttgagaaaaagttgcactactcgaatgttgaacagaataaccttagagggaaactagctaaattagcatctgagaggagtaatattgagacagagattaatcgtctgaagcctggagaggaggagctcgagacccgtattggtaaaagggaagcagaagcaagaaaacttgagaaaaaaattaatgacattgtggacaaggtgtacagagattttagcatttcagttggtgtgaagaatatccgcgagtatgaagaaaagcagctaaaagatgctcaagcactacaggagaggaagctaagcctaagtaaccaaatgtcaaaattgaaataccagcttgaatatgaacaaaagcgagatatgcatgcaccaattgtgaagttaacggagacacatgagtccttagagaaagagcttaagggcttacaggagagagagtctggtgctaaggctgaagctgaacaaattttggctcagatggaagaactgaagactgaggctgatgactggaaatccaagtcggatgaatgtgagaaggttattgatgaattgaaggagcagaatggtaatgttgcatctacattggcaaagatggatcgccaagtgaaatcaaaggagggacaacttgcacaacttatatcacgccagcgagaggttcatgagaagtgtgaacttgaacagttgaagcttcctactgtaaacgacccaatggataccggaacatcctcacaagaaccaatccttgattacagccagcttagcaaaagccatctgcaggatatacgaccttctgaacgtgacaaacatgaggcagagttcaaaaaaagaactggtgtgctactagctgatattgagcgcactgctcctaatctaaaagccctggatcagtatgatgcactccaacaaaaggaaaaggaggttactgaaaggtttgaagcagctaggaaagaagaacgagagatatctgacaaatataactcagtcaagcaaaggaggatgctatatcttatgtaaggacttgcaagatttcttccactgcactttggaggactgatgctatcttttttcgtta

SEQ ID NO: 217146 - DNA, 1446 bp, Zea Mays
gcttcagttgattctaattgtgatggcaacaccctttataatgagcttgaagttgtggagggtatgaaacttgacagaggttacatctctccgtacttcattaccaactcaaaagcccagaaatgtgaactggaagacccattgatcttaattcatgacaagaaagtgacaaatatgcatgctgtggttaaggttttagaaatggctctaaagaaacaaaggcctctactgattgttgcagaagatgtggaaagtgaagcattaggtactctgattattaacaagcttcgtgcaggcatcaaggtctgtgctgtcaaagctcctggttttggggaaaacaggaaggcaaacttacaggacctcgctatccttaccggaggagaggtaataactgaagagctaggaatgaaccttgagaatgttgagcctcacatgctgggttcatgcaaaaaggtgactgtctctaaggatgacactgttattcttgatggcgctggagacaaaaagtctattgaagagagggcagaccagattagatcagcagttgagaacagcacttcagattatgacaaggaaaagctccaggaacggttggcaaagctctctggaggtgttgctgttctgaagattggaggagccagcgaagcagaagttggtgagaagaaggatagagtgacagatgcactgaatgctactaaagctgctgttgaagagggcattgtaccaggtggtggtgttgctcttctctatgcatcgaaggagctcgataagttgcagacagcaaattttgatcagaagattggtgtgcaaatcattcagaatgctttgaagacacctgtacacaccattgcctccaatgctggggtggagggagcagtagttgtgggcaagcttttggagcaaggaaacactgaccttggttatgatgctgctaaagacgaatacgttgacatggtgaaggctggtatcattgatccgctaaaggtcatcagaactgcattggtggatgctgctagtgtgtcgtccctgatgaccaccacggaatccataattgtagagatccccaaggaagaggcaccggctccagcaatgggtggcatgggtggaatggattactaagtgtcaagcacacccacgatacaacaacatcaaagcagagatgacgaggtggttgtcaggaggatacaattttgaggctgcggacgtaggacctcaatatctccaagcaatagtggggggataataaacatgagcagtagttgtttgagatctgaagctgtagatcaagattggattctgacaccttgtgctgaaccaagtgtagtctgattattacacattttttggctgagtaaaatcggattgccgttctgttttgccagtgtcgcgactgtgcttgtgggcttgctttgcttttgataatcatagctttctgcattctgatgt

SEQ ID NO: 217147 - DNA, 783 bp, Zea Mays
gcgcgccatttggccagagcccaccgcccagccagcgaggaatcctgatttggagcactggacgggacgcgttgccattagctgtcgcgtcagttacgttttgcttgccctgttctcgttcggccttgacaacccggaaatcctccagccctctagtccccaacgacgcaggaagcaggatcgagccgaatcctccggaactcgccgccggggccaaccgacctcacactattgatcgaggatgtcgtacgcctacctcttcaagtacatcatcatcggcgacacaggcgtggggaagtcatgcctgctgctgcagttcaccatcggcgttgaatttggcgcccgcatgatcaccatcgacaacaagcccatcaaactccagatttgggacacggctggccaagaatcattcagatctattactaggtcatactacagaggagctgctggagcccttttggtttatgatatcactaggagggagaccttcaatcatctcgcaagttggctagaagatgccaggcaacatgcaaatgctaacatgacagtgatgctgattggaaacaaatgtgacctttctcataggcgtgctgtcagctatgaggaaggcgaacagtttgccaaggagcatggtctggtttttatggaggcatctgctaaaactgcacaaaacgtcgaggaggcattcattaagaccgctggtacaatatacaagaaaatccaagatggcatatttgatgtatcaaatgagtcaaacttgagatgctttgactttctaaaaaa

SEQ ID NO: 217148 - DNA, 471 bp, Zea Mays
tacacgttttcaagaatttaacacttgctggccaagaatcattcagatctattactaggtcatactacagaggagctgctggagcccttttggtttatgatatcactaggagggagaccttcaatcatctcgcaagttggctagaagatgccaggcaacatgcaaatgctaacatgacagtgatgctgattggaaacaaatgtgacctttctcataggcgtgctgtcagctatgaggaaggcgaacagtttgccaaggagcatggtctggtttttatggaggcatctgctaaaactgcacaaaacgtcgaggaggcattcattaagaccgctggtacaatatacaagaaaatccaagatggcatatttgatgtatcaaatgagttcgggatggagggagtgcatgtcttccgtatgaattgtccaggggcagggttgtaccgtgctatccttttttgtatttgttcatgag

SEQ ID NO: 217149 - DNA, 571 bp, Zea Mays
caaacttagcccaataaaaaaaaaactgaatgccgacctggaattagtctacgactcaatagccgtggaatccatcccggccacggtcggaggaagtgactccgccgcgggccgccatcttcgtcggtgatcttttctcctcaagtcaacaatcaaggcaacgatctaccacaaaactttgttgatctaccagatggcgatcaagacaacgatcaagaaaatgtacaaggcaataatcttagagatgcaatagcacaagaaacgtggaatgattaccaacaacataaaaattagtggtacatttgttgagctatttgttcgtagaaactgtctttgtttattgttgcttcctaatgaaaaacatgttacagatgagcttactttgaagatatggttccctgtaaccactatgcctcctaattatgtcatgttgctgtttatgtcatatatgttgcttcctaattagtggtacatttgttgtggtattgttgcttcctaattctgttgtgtgtgtattgcttactctgaagatctggttggtttgtaactacaagtaggacatagattcttt

SEQ ID NO: 217150 - DNA, 2368 bp, Zea Mays
gttatcctcggtgtcgttacccccaccatggccatcgtgctgctggcccttctcctcttcccgtccgcctatgcccaaccatggtcagtttgcggcaacacgggcaactacacggcggccagcacctaccaggacaacctcagccagctcgcggcaagccttcccaagaaagcctcttcgaacacgagtcccctcttcgccacgggtaccgcgggtgcagtgccggacctggtgtacgctcttgcactctgccgtggggacatcaacgcctccgcctgcaaggactgcgtcaccataggcttcgaggacgcgcagcagctctgcgcgttcaacaaggaagccaccgtgtactacgatagctgcctcgtcagcttctccaacgaagacttcctgtcgactaccgtcaacggcaacgagaacgaggtcaccgtcctcatggacgcccagaacttcacggagagcgcggactacatcaggctcctcttgttcactctgctgaacgacacgtccgagtccgcgatcaacagcatcaggaggttcacgaccgcgcggatggacattagctccctgccgacgatttactgcgctgtgcagtgcacgcctgacctcaccgccgacgagtgcgccgcctgtttgcaagacttcccgcaggtgacgctccagtacctcgacgggcagcgaggaggtcgacttctcggggtgcggtgtaacatgaggtacgagatctacaaattttaccaaggggaccccatgcttcgtattatctctttggcttcggcagtgccaacgatcggtaaaacccctcccggaacaccagtcacggtgtatccgcagcctccacctgcagcgccaccagcgccgcagatgataaccacgcctatcgcagcacaagaagagacaggacgcaaaggtaaactgtggattattggtatagctattccactggtagcaattctgctatgttcaacctttacctttctgtggctgaggaggccaaagaaaggagtgctgagttcgcaggacagagctggtgctaataggattgaagaaaacgccttggtttggacaattgaacagaagagttcagagtttactctttttgacctttctgagttactggaggccacaaaatcctttgcagaagaaaatagacttggacagggaggtttcggccctgtgtacaaggggcaattatcagatggtcaggaaattgcagttaaaaggcttgcttcgcattcaggacagggtttcacggagttcaggaatgaagttgaacttatagctaagctacaacacacaaatttggttaggctcttgggatgctgcattcaagccgaggaaaaaattttggtgtatgaatatttgccgaataaaagcctggacttctttatctttgatgaaagacaaagcagtttgcttaattggtataaacggcgtgccataattgaaggcgtagcgcaaggtctcctgtacctgcacaagcactctcggctgcgcgtggtacatagagaccttaaagctagtaacattctcttggaccaggatatggaccctaaaatttcagattttgggttggcaagaatctgtagctccaatgatgctgaaggaaacacaaagagggtagtcggaacatatggctacatgtctccggagtatgcctctgaaggcatctactcggtcaaatctgatgtgttcagctttggtgttctacttcttgagatccttagcgcgaaaaggaattcaggttttcaccaatatggagactttcttaaccttctcggatatctgtacagatcatggaggcttgatgagctttctgctgttctgcagacatggcacctgtgggagataggaagatggcttgatcttgtagaagcatccatttcgaaagagatgcatgaagcagaggctaggcggtacattaacatcgcactaatgtgcgtccaagaaaatgcggacgatcggcccaccatgtccgacgtagttgctgcgctaaatagtgagagtgtggttctacctgagccaaagcatccggcttacttcaacctcagagtatctaaatctgtggaatcagcagttgttgttgaggcgtgcagtctgaatgagatgaccatcacccaagatccccaaggcagataggtcttccacctgatttcgtttcgctggtcattattgtacatgataatgtggacgtgaatggctatccttgttccagctttgaaactaatcattatggtcttcatagtgtcttattttaaggtgttgctttttcaatgccttagtctaagttattttagtatcctataaaatataaatacaaacaatatcaaacacattagtctcaaacatcaaaattatttagttaaat

SEQ ID NO: 217151 - DNA, 1673 bp, Zea Mays
agtgtatcatacaatgcataaagataaacatgcatgaaaaatgtgtgtatcaactataaagatatcaaatccttctcggctctctcctctcccctttcatgccaagcacttaaacctaagagtcttgtggatggatggtagcaatcatgttaggaactaaggtatgtcgagctgttgaactggtctcaatgtctctcaatggctaatactataattgtcgcctttctagtaatagaggacggagaagacttactcatggttatctgctactatgggtctgatgacgtgatcgaggaaggtaatgtcttgatggtactagtcataggggttgtaggagttagaaatggtgaagactctcttttgacctaactcatgtggcttaagcgccctaaggagttagagcatcatagggtggggcaggacacttaatggtgagttgttgagatacacccatggcctctagtgccactccctatcttggtgaattggacgcaaaggtaaactgtggattattggtatagctattccactggtagcaattctgctatgttcaacctttacctttctgtggctgaggaggccaaagaaaggagtgctgagttcgcaggacagagctggtgctaataggattgaagaaaacgccttggtttggacaattgaacagaagagttcagagtttactctttttgacctttctgagttactggaggccacaaaatcctttgcagaagaaaatagacttggacagggaggtttcggccctgtgtacaaggggcaattatcagatggtcaggaaattgcagttaaaaggcttgcttcgcattcaggacagggtttcacggagttcaggaatgaagttgaacttatagctaagctacaacacacaaatttggatatggaccctaaaatttcagattttgggttggcaagaatctgtagctccaatgatgctgaaggaaacacaaagagggtagtcggaacatatggctacatgtctccggagtatgcctctgaaggcatctactcggtcaaatctgatgtgttcagctttggtgttctacttcttgagatccttagcgcgaaaaggaattcaggttttcaccaatatggagactttcttaaccttctcggatatacatggcacctgtgggagataggaagatggcttgatcttgtagaagcatccatttcgaaagagatgcatgaagcagaggctaggcggtacattaacatcgcactaatgtgcgtccaagaaaatgcggacgatcggcccaccatgtccgacgtagttgctgcgctaaatagtgagagtgtggttctacctgagccaaagcatccggcttacttcaacctcagagtatctaaatctgtggaatcagcagttgttgttgaggcgtgcagtctgaatgagatgaccatcacccaagatccccaaggcagataggtcttccacctgatttcgtttcgctggtcattattgtacatgataatgtggacgtgaatggctatccttgttccagctttgaaactaatcattatggtcttcatagtgtcttattttaaggtgttgctttttcaatgccttagtctaagttattttagtatcctataaaatataaatacaaacaatatcaaacacattagtctcaaacatcaaaattatttagttaaat

SEQ ID NO: 217152 - DNA, 1889 bp, Zea Mays
tgaaaaatgtgtgtatcaactataaagatatcaaatccttctcggctctctcctctcccctttcatgccaagcacttaaacctaagagtcttgtggatggatggtagcaatcatgttaggaactaaggtatgtcgagctgttgaactggtctcaatgtctctcaatggctaatactataattgtcgcctttctagtaatagaggacggagaagacttactcatggttatctgctactatgggtctgatgacgtgatcgaggaaggtaatgtcttgatggtactagtcataggggttgtaggagttagaaatggtgaagactctcttttgacctaactcatgtggcttaagcgccctaaggagttagagcatcatagggtggggcaggacacttaatggtgagttgttgagatacacccatggcctctagtgccactccctatcttggtgaattggacgcaaaggtttcgacggaacagttattctaccaaactaatgctagatttatgtacgcttacaattcaggagtgctgagttcgcaggacagagctggtgctaataggattgaagaaaacgccttggtttggacaattgaacagaagagttcagagtttactctttttgacctttctgagttactggaggccacaaaatcctttgcagaagaaaatagacttggacagggaggtttcggccctgtgtacaaggggcaattatcagatggtcaggaaattgcagttaaaaggcttgcttcgcattcaggacagggtttcacggagttcaggaatgaagttgaacttatagctaagctacaacacacaaatttggttaggctcttgggatgctgcattcaagccgaggaaaaaattttggtgtatgaatatttgccgaataaaagcctggacttctttatctttgatgaaagacaaagcagtttgcttaattggtataaacggcgtgccataattgaaggcgtagcgcaaggtctcctgtacctgcacaagcactctcggctgcgcgtggtacatagagaccttaaagctagtaacattctcttggaccaggatatggaccctaaaatttcagattttgggttggcaagaatctgtagctccaatgatgctgaaggaaacacaaagagggtagtcggaacatatggctacatgtctccggagtatgcctctgaaggcatctactcggtcaaatctgatgtgttcagctttggtgttctacttcttgagatccttagcgcgaaaaggaattcaggttttcaccaatatggagactttcttaaccttctcggatatctgtacagatcatggaggcttgatgagctttctgctgttctgcagacatggcacctgtgggagataggaagatggcttgatcttgtagaagcatccatttcgaaagagatgcatgaagcagaggctaggcggtacattaacatcgcactaatgtgcgtccaagaaaatgcggacgatcggcccaccatgtccgacgtagttgctgcgctaaatagtgagagtgtggttctacctgagccaaagcatccggcttacttcaacctcagagtatctaaatctgtggaatcagcagttgttgttgaggcgtgcagtctgaatgagatgaccatcacccaagatccccaaggcagataggtcttccacctgatttcgtttcgctggtcattattgtacatgataatgtggacgtgaatggctatccttgttccagctttgaaactaatcattatggtcttcatagtgtcttattttaaggtgttgctttttcaatgccttagtctaagttattttagtatcctataaaatataaatacaaacaatatcaaacacattagtctcaaacatcaaaattatttagttaaat

SEQ ID NO: 217153 - DNA, 1266 bp, Zea Mays
atggcctctagtgccactccctatcttggtgaattggacgcaaaggtaaactgtggattattggtatagctattccactggtagcaattctgctatgttcaacctttacctttctgtggctgaggaggccaaagaaaggagtgctgagttcgcaggacagagctggtgctaataggattgaagaaaacgccttggtttggacaattgaacagaagagttcagagtttactctttttgacctttctgagttactggaggccacaaaatcctttgcagaagaaaatagacttggacagggaggtttcggccctgtgtacaaggggcaattatcagatggtcaggaaattgcagttaaaaggcttgcttcgcattcaggacagggtttcacggagttcaggaatgaagttgaacttatagctaagctacaacacacaaatttggatatggaccctaaaatttcagattttgggttggcaagaatctgtagctccaatgatgctgaaggaaacacaaagagggtagtcggaacatatggctacatgtctccggagtatgcctctgaaggcatctactcggtcaaatctgatgtgttcagctttggtgttctacttcttgagatccttagcgcgaaaaggaattcaggttttcaccaatatggagactttcttaaccttctcggatatctgtacagatcatggaggcttgatgagctttctgctgttctgcagacatggcacctgtgggagataggaagatggcttgatcttgtagaagcatccatttcgaaagagatgcatgaagcagaggctaggcggtacattaacatcgcactaatgtgcgtccaagaaaatgcggacgatcggcccaccatgtccgacgtagttgctgcgctaaatagtgagagtgtggttctacctgagccaaagcatccggcttacttcaacctcagagtatctaaatctgtggaatcagcagttgttgttgaggcgtgcagtctgaatgagatgaccatcacccaagatccccaaggcagataggtcttccacctgatttcgtttcgctggtcattattgtacatgataatgtggacgtgaatggctatccttgttccagctttgaaactaatcattatggtcttcatagtgtcttattttaaggtgttgctttttcaatgccttagtctaagttattttagtatcctataaaatataaatacaaacaatatcaaacacattagtctcaaacatcaaaattatttagttaaat

SEQ ID NO: 217154 - DNA, 3860 bp, Zea Mays
gacacttaatgataaaggccctaaactaaagtccttcaaactatatatctagcctagtatttctaaagaggggcaaggactgcaatctagactggtggtactaaggaaagaactcatgtatgttgaaggatatgctagaaatatgtaaaattgaaggccctatctattgctagatctagtcttatcaaggtgaaatctactcaaacatgttaaacgtcctcttaatctagtgttcttagaggttggcctaatgtctctgctctaccttgacctcttcatcatagtgttcctactatactagaagcctttactgctttgccctccactaccatcttctattgacctacattcatctacactaaaaggtcagatatcctttcattagatgatggtgggacaaatggtggtatggtgctagattcaccaaccttagagttgtgtgaacatggtggcaacaaaagttaagatggtggcacaaggtagtccttgtatgagctttcatcgatcacatcgctgctacaaaagctgatctaactctacctgctcaacctgacaaatagccttatcatgtgtctgctactatctatgttgctcatctaaaatcacttgacccctctagctaagtgttatagctcatgggcacgcatccactatgttggtcaacatataatacccaaaagccttgggagagttctcatgtgttaatgccaattctagatgtgaaattagctaagagaacatataggataagtagtgggcgtggggaagctgacgatgagccttaaatccatctggcactagatcctcaatctcacataatatggagtcaccaacatcatactctatgtgagagatgagtgcatctagaagccactattttatgttgttgagagactcatcgtacacaacttttagtagtagtatcctcttcataagtgcatgaaggatcctcactacaggtggaatgttcactacagctctatatgattgctcaacaaacaactagtgagatagagaggttacatgggttgtagggggtatcacttgttgtgtagtctattgggtgggtcagcgaaaccataataaacattatgtatccttgttagtgacactataaaatcagataactctgatgtccttggcatagatcctatagtggtacccttagaatatgaaccaaaaccacttgtagtcctagtcaatccaatggtgactgagagatcccacatgatagaggaacttaatgttcttatcatcaccgcattggcaattttcttaactagtctatgcaaatcctaactacaaaagcaagataatttaacatggttgtaagttaaaatgcattcaaagggacaacacaagctcatattttagtgaaattacttagatcaagaacattgagcttgttcctcaacttaaaaatgcatgcctcatctaaaggttttgttttagatatctataattgatctgttgtcctcactcctagtaaaatgtcaccttttgctacatgatctctaaggaactgatggtggatatctttgtgcatggtgcgagagtaatgaattgggttgttggcaagttttacgatgcattattatcacccaaaaggggtaacttttcaagaattacaccacaatctagaaggttttgcttcatgtaaagaatttatgcatgacaggtacccatcatgatgtactctatctcatcggtggacatggcaacactatttttcttggggaaattccctgtatgccatcggaaaatatacttattccttgtgtgccactggccccacatgtcatacacacaaaaaaattacgtatataccactcagtggcacacaaggatgagtataagatctgatggtgtacagggattttttccatttttcttctagatgtgagatgcccttgacactagtgatttaacaagcatatgacaccctttggtagtgcttttcctattaatcttgaaacccgtgtaatccaaattgaaatagccaacaagttggaaactagctcctttaggacaccaaaggcaatgtttggtatgggtttaaggcaccaaaagaatttattaactacaactaactgaacctctttaggatttgtttggaatctagcacatatacacacactaaacattatgttaggcatagatacagtcaaatataacaagctactaattataaaatggttgagagtttgatcaattaatttatctcctcatctaggtcgagattagcattgatgtcttgattggcttacattgatccatgcatattgaacctcttggaaagatccttgttatacattttttttagagatagatatttggaatcactgctgacttttcatttattatgcgtaggacgcaaaggtaaactgtggattattggtatagctattccactggtagcaattctgctatgttcaacctttacctttctgtggctgaggaggccaaagaaagatttatgtacgcttacaattcaggagtgctgagttcgcaggacagagctggtgctaataggattgaagaaaacgccttggtttggacaattgaacagaagagttcagagtttactctttttgacctttctgagttactggaggccacaaaatcctttgcagaagaaaatagacttggacagggaggtttcggccctgtgtacaaggggcaattatcagatggtcaggaaattgcagttaaaaggcttgcttcgcattcaggacagggtttcacggagttcaggaatgaagttgaacttatagctaagctacaacacacaaatttggttaggctcttgggatgctgcattcaagccgaggaaaaaattttggtgtatgaatatttgccgaataaaagcctggacttctttatctttgatgaaagacaaagcagtttgcttaattggtataaacggcgtgccataattgaaggcgtagcgcaaggtctcctgtacctgcacaagcactctcggctgcgcgtggtacatagagaccttaaagctagtaacattctcttggaccaggatatggaccctaaaatttcagattttgggttggcaagaatctgtagctccaatgatgctgaaggaaacacaaagagggtagtcggaacatatggctacatgtctccggagtatgcctctgaaggcatctactcggtcaaatctgatgtgttcagctttggtgttctacttcttgagatccttagcgcgaaaaggaattcaggttttcaccaatatggagactttcttaaccttctcggatatctgtacagatcatggaggcttgatgagctttctgctgttctgcagacatggcacctgtgggagataggaagatggcttgatcttgtagaagcatccatttcgaaagagatgcatgaagcagaggctaggcggtacattaacatcgcactaatgtgcgtccaagaaaatgcggacgatcggcccaccatgtccgacgtagttgctgcgctaaatagtgagagtgtggttctacctgagccaaagcatccggcttacttcaacctcagagtatctaaatctgtggaatcagcagttgttgttgaggcgtgcagtctgaatgagatgaccatcacccaagatccccaaggcagataggtcttccacctgatttcgtttcgctggtcattattgtacatgataatgtggacgtgaatggctatccttgttccagctttgaaactaatcattatggtcttcatagtgtcttattttaaggtgttgctttttcaatgccttagtctaagttattttagtatcctataaaatataaatacaaacaatatcaaacacattagtctcaaacatcaaaattatttagttaaat

SEQ ID NO: 217155 - DNA, 3555 bp, Zea Mays
gacacttaatgataaaggccctaaactaaagtccttcaaactatatatctagcctagtatttctaaagaggggcaaggactgcaatctagactggtggtactaaggaaagaactcatgtatgttgaaggatatgctagaaatatgtaaaattgaaggccctatctattgctagatctagtcttatcaaggtgaaatctactcaaacatgttaaacgtcctcttaatctagtgttcttagaggttggcctaatgtctctgctctaccttgacctcttcatcatagtgttcctactatactagaagcctttactgctttgccctccactaccatcttctattgacctacattcatctacactaaaaggtcagatatcctttcattagatgatggtgggacaaatggtggtatggtgctagattcaccaaccttagagttgtgtgaacatggtggcaacaaaagttaagatggtggcacaaggtagtccttgtatgagctttcatcgatcacatcgctgctacaaaagctgatctaactctacctgctcaacctgacaaatagccttatcatgtgtctgctactatctatgttgctcatctaaaatcacttgacccctctagctaagtgttatagctcatgggcacgcatccactatgttggtcaacatataatacccaaaagccttgggagagttctcatgtgttaatgccaattctagatgtgaaattagctaagagaacatataggataagtagtgggcgtggggaagctgacgatgagccttaaatccatctggcactagatcctcaatctcacataatatggagtcaccaacatcatactctatgtgagagatgagtgcatctagaagccactattttatgttgttgagagactcatcgtacacaacttttagtagtagtatcctcttcataagtgcatgaaggatcctcactacaggtggaatgttcactacagctctatatgattgctcaacaaacaactagtgagatagagaggttacatgggttgtagggggtatcacttgttgtgtagtctattgggtgggtcagcgaaaccataataaacattatgtatccttgttagtgacactataaaatcagataactctgatgtccttggcatagatcctatagtggtacccttagaatatgaaccaaaaccacttgtagtcctagtcaatccaatggtgactgagagatcccacatgatagaggaacttaatgttcttatcatcaccgcattggcaattttcttaactagtctatgcaaatcctaactacaaaagcaagataatttaacatggttgtaagttaaaatgcattcaaagggacaacacaagctcatattttagtgaaattacttagatcaagaacattgagcttgttcctcaacttaaaaatgcatgcctcatctaaaggttttgttttagatatctataattgatctgttgtcctcactcctagtaaaatgtcaccttttgctacatgatctctaaggaactgatggtggatatctttgtgcatggtgcgagagtaatgaattgggttgttggcaagttttacgatgcattattatcacccaaaaggggtaacttttcaagaattacaccacaatctagaaggttttgcttcatgtaaagaatttatgcatgacaggtacccatcatgatgtactctatctcatcggtggacatggcaacactatttttcttggggaaattccctgtatgccatcggaaaatatacttattccttgtgtgccactggccccacatgtcatacacacaaaaaaattacgtatataccactcagtggcacacaaggatgagtataagatctgatggtgtacagggattttttccatttttcttctagatgtgagatgcccttgacactagtgatttaacaagcatatgacaccctttggtagtgcttttcctattaatcttgaaacccgtgtaatccaaattgaaatagccaacaagttggaaactagctcctttaggacaccaaaggcaatgtttggtatgggtttaaggcaccaaaagaatttattaactacaactaactgaacctctttaggatttgtttggaatctagcacatatacacacactaaacattatgttaggcatagatacagtcaaatataacaagctactaattataaaatggttgagagtttgatcaattaatttatctcctcatctaggtcgagattagcattgatgtcttgattggcttacattgatccatgcatattgaacctcttggaaagatccttgttatacattttttttagagatagatatttggaatcactgctgacttttcatttattatgcgtaggacgcaaaggtaaactgtggattattggtatagctattccactggtagcaattctgctatgttcaacctttacctttctgtggctgaggaggccaaagaaaggagtgctgagttcgcaggacagagctggtgctaataggattgaagaaaacgccttggtttggacaattgaacagaagagttcagagtttactctttttgacctttctgagttactggaggccacaaaatcctttgcagaagaaaatagacttggacagggaggtttcggccctgtgtacaaggggcaattatcagatggtcaggaaattgcagttaaaaggcttgcttcgcattcaggacagggtttcacggagttcaggaatgaagttgaacttatagctaagctacaacacacaaatttggatatggaccctaaaatttcagattttgggttggcaagaatctgtagctccaatgatgctgaaggaaacacaaagagggtagtcggaacatatggctacatgtctccggagtatgcctctgaaggcatctactcggtcaaatctgatgtgttcagctttggtgttctacttcttgagatccttagcgcgaaaaggaattcaggttttcaccaatatggagactttcttaaccttctcggatatacatggcacctgtgggagataggaagatggcttgatcttgtagaagcatccatttcgaaagagatgcatgaagcagaggctaggcggtacattaacatcgcactaatgtgcgtccaagaaaatgcggacgatcggcccaccatgtccgacgtagttgctgcgctaaatagtgagagtgtggttctacctgagccaaagcatccggcttacttcaacctcagagtatctaaatctgtggaatcagcagttgttgttgaggcgtgcagtctgaatgagatgaccatcacccaagatccccaaggcagataggtcttccacctgatttcgtttcgctggtcattattgtacatgataatgtggacgtgaatggctatccttgttccagctttgaaactaatcattatggtcttcatagtgtcttattttaaggtgttgctttttcaatgccttagtctaagttattttagtatcctataaaatataaatacaaacaatatcaaacacattagtctcaaacatcaaaattatttagttaaat

SEQ ID NO: 217156 - DNA, 3837 bp, Zea Mays
gacacttaatgataaaggccctaaactaaagtccttcaaactatatatctagcctagtatttctaaagaggggcaaggactgcaatctagactggtggtactaaggaaagaactcatgtatgttgaaggatatgctagaaatatgtaaaattgaaggccctatctattgctagatctagtcttatcaaggtgaaatctactcaaacatgttaaacgtcctcttaatctagtgttcttagaggttggcctaatgtctctgctctaccttgacctcttcatcatagtgttcctactatactagaagcctttactgctttgccctccactaccatcttctattgacctacattcatctacactaaaaggtcagatatcctttcattagatgatggtgggacaaatggtggtatggtgctagattcaccaaccttagagttgtgtgaacatggtggcaacaaaagttaagatggtggcacaaggtagtccttgtatgagctttcatcgatcacatcgctgctacaaaagctgatctaactctacctgctcaacctgacaaatagccttatcatgtgtctgctactatctatgttgctcatctaaaatcacttgacccctctagctaagtgttatagctcatgggcacgcatccactatgttggtcaacatataatacccaaaagccttgggagagttctcatgtgttaatgccaattctagatgtgaaattagctaagagaacatataggataagtagtgggcgtggggaagctgacgatgagccttaaatccatctggcactagatcctcaatctcacataatatggagtcaccaacatcatactctatgtgagagatgagtgcatctagaagccactattttatgttgttgagagactcatcgtacacaacttttagtagtagtatcctcttcataagtgcatgaaggatcctcactacaggtggaatgttcactacagctctatatgattgctcaacaaacaactagtgagatagagaggttacatgggttgtagggggtatcacttgttgtgtagtctattgggtgggtcagcgaaaccataataaacattatgtatccttgttagtgacactataaaatcagataactctgatgtccttggcatagatcctatagtggtacccttagaatatgaaccaaaaccacttgtagtcctagtcaatccaatggtgactgagagatcccacatgatagaggaacttaatgttcttatcatcaccgcattggcaattttcttaactagtctatgcaaatcctaactacaaaagcaagataatttaacatggttgtaagttaaaatgcattcaaagggacaacacaagctcatattttagtgaaattacttagatcaagaacattgagcttgttcctcaacttaaaaatgcatgcctcatctaaaggttttgttttagatatctataattgatctgttgtcctcactcctagtaaaatgtcaccttttgctacatgatctctaaggaactgatggtggatatctttgtgcatggtgcgagagtaatgaattgggttgttggcaagttttacgatgcattattatcacccaaaaggggtaacttttcaagaattacaccacaatctagaaggttttgcttcatgtaaagaatttatgcatgacaggtacccatcatgatgtactctatctcatcggtggacatggcaacactatttttcttggggaaattccctgtatgccatcggaaaatatacttattccttgtgtgccactggccccacatgtcatacacacaaaaaaattacgtatataccactcagtggcacacaaggatgagtataagatctgatggtgtacagggattttttccatttttcttctagatgtgagatgcccttgacactagtgatttaacaagcatatgacaccctttggtagtgcttttcctattaatcttgaaacccgtgtaatccaaattgaaatagccaacaagttggaaactagctcctttaggacaccaaaggcaatgtttggtatgggtttaaggcaccaaaagaatttattaactacaactaactgaacctctttaggatttgtttggaatctagcacatatacacacactaaacattatgttaggcatagatacagtcaaatataacaagctactaattataaaatggttgagagtttgatcaattaatttatctcctcatctaggtcgagattagcattgatgtcttgattggcttacattgatccatgcatattgaacctcttggaaagatccttgttatacattttttttagagatagatatttggaatcactgctgacttttcatttattatgcgtaggacgcaaaggtaaactgtggattattggtatagctattccactggtagcaattctgctatgttcaacctttacctttctgtggctgaggaggccaaagaaaggagtgctgagttcgcaggacagagctggtgctaataggattgaagaaaacgccttggtttggacaattgaacagaagagttcagagtttactctttttgacctttctgagttactggaggccacaaaatcctttgcagaagaaaatagacttggacagggaggtttcggccctgtgtacaaggggcaattatcagatggtcaggaaattgcagttaaaaggcttgcttcgcattcaggacagggtttcacggagttcaggaatgaagttgaacttatagctaagctacaacacacaaatttggttaggctcttgggatgctgcattcaagccgaggaaaaaattttggtgtatgaatatttgccgaataaaagcctggacttctttatctttgatgaaagacaaagcagtttgcttaattggtataaacggcgtgccataattgaaggcgtagcgcaaggtctcctgtacctgcacaagcactctcggctgcgcgtggtacatagagaccttaaagctagtaacattctcttggaccaggatatggaccctaaaatttcagattttgggttggcaagaatctgtagctccaatgatgctgaaggaaacacaaagagggtagtcggaacatatggctacatgtctccggagtatgcctctgaaggcatctactcggtcaaatctgatgtgttcagctttggtgttctacttcttgagatccttagcgcgaaaaggaattcaggttttcaccaatatggagactttcttaaccttctcggatatctgtacagatcatggaggcttgatgagctttctgctgttctgcagacatggcacctgtgggagataggaagatggcttgatcttgtagaagcatccatttcgaaagagatgcatgaagcagaggctaggcggtacattaacatcgcactaatgtgcgtccaagaaaatgcggacgatcggcccaccatgtccgacgtagttgctgcgctaaatagtgagagtgtggttctacctgagccaaagcatccggcttacttcaacctcagagtatctaaatctgtggaatcagcagttgttgttgaggcgtgcagtctgaatgagatgaccatcacccaagatccccaaggcagataggtcttccacctgatttcgtttcgctggtcattattgtacatgataatgtggacgtgaatggctatccttgttccagctttgaaactaatcattatggtcttcatagtgtcttattttaaggtgttgctttttcaatgccttagtctaagttattttagtatcctataaaatataaatacaaacaatatcaaacacattagtctcaaacatcaaaattatttagttaaat

SEQ ID NO: 217157 - DNA, 3991 bp, Zea Mays
ctcagcttgaagtgttggtggttactgacatactattgtatcgtgcatgttaacacgatcatcaataccttaggagattgagtccattcaatacaatgagaaggattacgaaggactgccctttgaattccatggtggcttcgttggatatcttgggtatggtcttaaagtggagtgtgatgcatcatcgaacaaggccaaatcaagtactcctgatgcatgcttcgtctttgctgataacactgtggtggttgatcacagcaatggtgatgtgtatattttgtcactgcatgatgaattttattctagtaatggagatgggatatgcaaaaattcaacgcatacttcatggttagtggagactgagaagaagcttctcaggttgggtggtatgccctcaggatcaccaattatccgaaagacacatgctagatcatccagtgtgcataagcagagttttgttgtagagaaatcaaaggaccaatatgttagagacgttcagaattgcttggattatatcagggacggagaaagctatgagttgtgcttaactactcagatgaagagaagagcagactgtataaatgcactccaactctaccttaaactgagaaaacaaaatccagcgccttatgcggcctggcttaacttctcctcagaaaacttgagcatatgttgctcttctccagaaaggtttctacgactagaccgagctggagttctagaagcgaaaccaattaaaggtactatagcacgtggcagaacaccagaggaagatgaatgcttacgtctgcagttgagatacagcgaaaaagaccaggccgagaacctgatgattgtcgacctcttaagaaacgatctcggcaaggtctgcgagccagggagcgtgcatgtcccacgcctcatggacgttgaatcatacagaagtgttcacaccatggttctgcggtgctgacatcggtgaaagatgaggaggatcaggcttgcctgtttgcttgttatctttgtgcaagtgcaatgggcggcccttggaacgcatgatgtgtacatcgtgaccatggaaggggatccggtcgttagctacagaggcggtgtccaaggatttccagcaaccgctgtggattcggacgaggaaattgatctaaccagcgaggctgtcaaatcgtatgccctccacctccgaggacaccatgacaagctgctagactcgcttttagtagaaggaacttacgagaagctttatagctaccatcatctcatcaatggcttcgcagttcacatgtcgccactgcaggctgagttcttgaagaaagccccaggagttaagcatgttgagagagacatgaaggtacagaaattgactacacacacacctcagtttcttggattgccaactggggtatggtcaacaggaggtgggcttgatagagctggtgaagatgttgtgatcggtttcgtggattctggaatttaccctgaacatccgagcttcgctgcgcacaagactgatccatatggacctgcccctcgttataaagggaaatgtgagatggatccagtaacacaaagaagtttctgtaatgggaagatagttggggctcagcattttgcaaaagctgcaatggctgctggcgcgtttaatcccgatgttgaatttgcatctccattagatggtgatggtcatggaagtcacacagctgcaattgctgctggaaacaatggggtcccagtgcgaatgcatggtcacgaatttggcaaggcaagtggtatggccccacgtgctagggtagctgtctacaaggttctttacaggctttttggtggttacatagctgatgttgtggcagctattgatcaggctgttcaggatggtgttgacattctcaacctttctgttgggcccaatagcccaccaacagctacacggactacttttttgaatccttttgacgctgcacttctttctgctgtgaaagctggggtatttgttgcccaagctgcaggaaatggtggaccatttccaaaaacactggtgtctttcagcccatggataactactgttgctgctggagttgatgaccgcagatacaagaatcatttaacactaggaaatggaaaacttctctctgggcttggagtatcacctgcaacacatgggaatatgtcgttcagcttgatttctgcagctgatgctctattgggttcatctgcaaccaagtacagtgcattagattgccagaggcctgaactattgaataagaggaaagttcaggggagaattcttttgtgtggctattcgttcaattacatttctgggacagcttcaataaagaaagtgtctcagacggccaggaatcttggagcagctggctttgttgttgctgtggagaataattacccaggaacaaaatttgaccctgtaccattcagcatccctggaattctcatcacagatgtcagcaaaacggaggatcttatagactactacaattcttccaccataagagattgggctggaagggctacagccttcaaagcaacagcaggtattgcagatggtttggcaccaacactatacaattctgccccccaggttgcactgttctcttctcgaggacccgatgttaaagattttagctttcaagatgctgatgtccttaaaccagacatacttgctcctggcaatctcatatgggctgcatgggcgcctaatggaacggatgaatcaaactatgctggtgaaggatttgcaatggtttctggaactagcatggccgcaccgcatatcgctggcattgcggcactgataaagcagaagaacccaaagtggagcccctcagcaataaaatctgccatgatgacaacggccaatacactggacaaagggagccgtcctctcagagcgcagcagtacactgcatcggaaatgatgacactttctcgggccacaccgtttgattgtggtagtggcgctgttaacccaaaagctgcccttgatcctggtcttgttctagatgcaacccacgaagagtacatcgcatttttgtgctcgatccctgacgtcaaccagagcgaagtgtcaaacatcgccggttcagcttgcaactccagctccaaggggcgtcaacgccccttcgacctcaacctcccctcgatcgccatctctcagcttcgaggcaccgtgacggtgacgcggaccgtcacaagcgtgtccgaggagaccgagacctacaccatcatgacgagaatgccgccggaggttgccctggaggtgacgcctccggcggtgacggtgctgcccggagcatcgagagagctagctgtgaccctgacggcgaggtccgtgaccggcacctacagtttcggagagatcgccatgaaaggcgaccgcggccacctcgtcagaatcccagtggtagctatgggattcaagtagatagaagacgaccgcgaccggcgctagagagagtaagtacgaggagcgagttgtgcctctgagatccgaggtcttgagctgcagaggaatgctgtaatttttccatagtttgtagagaataagagttagggtctgtttggttgggctgtggctgtgaaaaaagttgctgtgggctgtgagctgtggaaaaagctgctgtaggctgcaagctgttaaaaagctaaaaactgtttggtggaaaccactaaaagtcgttaaaaattcttcgatatatgttttcacagtttcatctaaaaagccactaaaagcaggtccaggggtgctttcagatttgcactgcgagaaagtcggcttttagaaaaagctgcttcctggatctagccttttggttgacttttggcttttaggggggcaaaagccaaagccaaaagtcaaaccaaacacacccttagaatgccctcctggttgtaaaaatatgtatttgggtgtttaaatttaagcctatgttcagccttgctcttaaggcaaagtatcatgtgcacatcagctatcagt

SEQ ID NO: 217158 - DNA, 5638 bp, Zea Mays
cacccggatcctccgcgcgcgccgccaggtccgtcgcgatggccgcactccgcctccccgcccagccggtggcgaggtggccccaccttccttccgcctacgccgccgccgccgccgcgcgtcgggtctcggcccctcgcggccatctcgcggcgcggcgggccaagggggaggagccgccggagccgccggtgaggacgctgctgatcgacaactatgacagctacacctacaacatcttccaggagctgtcggtcgtcaacggcgtgccgcccgtggtcgtgcgcaacgacgagtggacgtggggggacatctttaaccggttgtacaaggaccgcaccttcgacaacatcgtcatctcgcctggccctggatctccggcatgccccgccgacataggggtatgtctgcgcatacttttggagtgtggagatatacccatcttgggtgtctgccttggccaccaggccctgggatttgtacatggtgctgagattgttcatgctccagaagctatacacgggcgactcagtgaaattgagcacgatggatgccacctctttaatcgtgtcccctcaggtagaaattctggcttcaaggtagtgaggtatcattcccttgtaatagaatctggttctctacctgatgatcttacatcgatagcgtggactgcttctccaaatttgctttcttaccttgaaagtgatcgaaccaatgttagtaccttcttgggaacattggataacaatttaatgagaaaccctctagagtacagtaacaatggtggggaactatccaacataggacatgcttgtgagtcagatgatagccgagttatcatgggcatcaggcactctagcaggcctcattatggagtgcagtttcacccagagagcattgctactcatcacggaagacagattttccgaaactttaagaagataacaggaaattttggattgcgctcatcgtggattcaggaaagaaaggttcacagtattggtcaattctgcaagtcatcatgattctattcctaaggacttgttgcatactgaaagaatggaactttcagagtctgtacttggaaagagagggattgggaagaagtgtttacgattacaatggaagaagattgaaaattttgtctgtcccacagtaggctctgaagacatatttgcggtgctttttggccatcaaagcggtgaagacacattttggttggatagctcatcagttgaccaggtatgcagtaagcttactattaactaatcaccaaaattgaataaaaaaagaggatactattttctcttcaactcttgacctacatgaattgagctgcaacaccatctcagttgagtggtatagctggaaatttgctgaaacttacttggattacaacttcttttatttcctcatggaggtaggtgtattcgcctttatgtattacatgatcttttttgtctttgttgctatacatttctacttgcagaacagggcacgtttttcattcatgggtggtaaaggtgggtccctgtggaagcaaatgtcattccacctatctggtcaaagagccaattgtggaggaatgcttagtatccaagatgcttatggatttactgccaaaaaatttatcaaagacggcttcttggagttccttaacaaggagattgagtccattcaatacaatgagaaggattacgaaggactgccctttgaattccatggtggcttcgttggatatcttgggtatggtcttaaagtggagtgtgatgcatcatcgaacaaggccaaatcaagtactcctgatgcatgcttcgtctttgctgataacactgtggtggttgatcacagcaatggtgatgtgtatattttgtcactgcatgatgaattttattctagtaatggagatgggatatgcaaaaattcaacgcatacttcatggttagtggagactgagaagaagcttctcaggttgggtggtatgccctcaggatcaccaattatccgaaagacacatgctagatcatccagtgtgcataagcaggcaggatcaccaattaatggaaagacatatgttagatcatccagtgcgctgaagcagagttttgttgtagagaaatcaaaggaccaatatgttagagacgttcagaattgcttggattatatcagggacggagaaagctatgagttgtgcttaactactcagatgaagagaagagcagactgtataaatgcactccaactctaccttaaactgagaaaacaaaatccagcgccttatgcggcctggcttaacttctcctcagaaaacttgagcatatgttgctcttctccagaaaggtttctacgactagaccgagctggagttctagaagcgaaaccaattaaaggtactatagcacgtggcagaacaccagaggaagatgaatgcttacgtctgcagttgagatacagcgaaaaagaccaggccgagaacctgatgattgtcgacctcttaagaaacgatctcggcaaggtctgcgagccagggagcgtgcatgtcccacgcctcatggacgttgaatcatacagaagtgttcacaccatggttctgcggtgctgacatcggtgaaagatgaggaggatcaggcttgcctgtttgcttgttatctttgtgcaagtgcaatgggcggcccttggaacgcatgatgtgtacatcgtgaccatggaaggggatccggtcgttagctacagaggcggtgtccaaggatttccagcaaccgctgtggattcggacgaggaaattgatctaaccagcgaggctgtcaaatcgtatgccctccacctccgaggacaccatgacaagctgctagactcgcttttagtagaaggaacttacgagaagctttatagctaccatcatctcatcaatggcttcgcagttcacatgtcgccactgcaggctgagttcttgaagaaagccccaggagttaagcatgttgagagagacatgaaggtacagaaattgactacacacacacctcagtttcttggattgccaactggggtatggtcaacaggaggtgggcttgatagagctggtgaagatgttgtgatcggtttcgtggattctggaatttaccctgaacatccgagcttcgctgcgcacaagactgatccatatggacctgcccctcgttataaagggaaatgtgagatggatccagtaacacaaagaagtttctgtaatgggaagatagttggggctcagcattttgcaaaagctgcaatggctgctggcgcgtttaatcccgatgttgaatttgcatctccattagatggtgatggtcatggaagtcacacagctgcaattgctgctggaaacaatggggtcccagtgcgaatgcatggtcacgaatttggcaaggcaagtggtatggccccacgtgctagggtagctgtctacaaggttctttacaggctttttggtggttacatagctgatgttgtggcagctattgatcaggctgttcaggatggtgttgacattctcaacctttctgttgggcccaatagcccaccaacagctacacggactacttttttgaatccttttgacgctgcacttctttctgctgtgaaagctggggtatttgttgcccaagctgcaggaaatggtggaccatttccaaaaacactggtgtctttcagcccatggataactactgttgctgctggagttgatgaccgcagatacaagaatcatttaacactaggaaatggaaaacttctctctgggcttggagtatcacctgcaacacatgggaatatgtcgttcagcttgatttctgcagctgatgctctattgggttcatctgcaaccaagtacagtgcattagattgccagaggcctgaactattgaataagaggaaagttcaggggagaattcttttgtgtggctattcgttcaattacatttctgggacagcttcaataaagaaagtgtctcagacggccaggaatcttggagcagctggctttgttgttgctgtggagaataattacccaggaacaaaatttgaccctgtaccattcagcatccctggaattctcatcacagatgtcagcaaaacggaggatcttatagactactacaattcttccaccataagagattgggctggaagggctacagccttcaaagcaacagcaggtattgcagatggtttggcaccaacactatacaattctgccccccaggttgcactgttctcttctcgaggacccgatgttaaagattttagctttcaagatgctgatgtccttaaaccagacatacttgctcctggcaatctcatatgggctgcatgggcgcctaatggaacggatgaatcaaactatgctggtgaaggatttgcaatggtttctggaactagcatggccgcaccgcatatcgctggcattgcggcactgataaagcagaagaacccaaagtggagcccctcagcaataaaatctgccatgatgacaacggccaatacactggacaaagggagccgtcctctcagagcgcagcagtacactgcatcggaaatgatgacactttctcgggccacaccgtttgattgtggtagtggcgctgttaacccaaaagctgcccttgatcctggtcttgttctagatgcaacccacgaagagtacatcgcatttttgtgctcgatccctgacgtcaaccagagcgaagtgtcaaacatcgccggttcagcttgcaactccagctccaaggggcgtcaacgccccttcgacctcaacctcccctcgatcgccatctctcagcttcgaggcaccgtgacggtgacgcggaccgtcacaagcgtgtccgaggagaccgagacctacaccatcatgacgagaatgccgccggaggttgccctggaggtgacgcctccggcggtgacggtgctgcccggagcatcgagagagctagctgtgaccctgacggcgaggtccgtgaccggcacctacagtttcggagagatcgccatgaaaggcgaccgcggccacctcgtcagaatcccagtggtagctatgggattcaagtagatagaagacgaccgcgaccggcgctagagagagtaagtacgaggagcgagttgtgcctctgagatccgaggtcttgagctgcagaggaatgctgtaatttttccatagtttgtagagaataagagttagggtctgtttggttgggctgtggctgtgaaaaaagttgctgtgggctgtgagctgtggaaaaagctgctgtaggctgcaagctgttaaaaagctaaaaactgtttggtggaaaccactaaaagtcgttaaaaattcttcgatatatgttttcacagtttcatctaaaaagccactaaaagcaggtccaggggtgctttcagatttgcactgcgagaaagtcggcttttagaaaaagctgcttcctggatctagccttttggttgacttttggcttttaggggggcaaaagccaaagccaaaagtcaaaccaaacacacccttagaatgccctcctggttgtaaaaatatgtatttgggtgtttaaatttaagcctatgttcagccttgctcttaaggcaaagtatcatgtgcacatcagctatcagt

SEQ ID NO: 217159 - DNA, 5386 bp, Zea Mays
cacccggatcctccgcgcgcgccgccaggtccgtcgcgatggccgcactccgcctccccgcccagccggtggcgaggtggccccaccttccttccgcctacgccgccgccgccgccgcgcgtcgggtctcggcccctcgcggccatctcgcggcgcggcgggccaagggggaggagccgccggagccgccggtgaggacgctgctgatcgacaactatgacagctacacctacaacatcttccaggagctgtcggtcgtcaacggcgtgccgcccgtggtcgtgcgcaacgacgagtggacgtggggggacatctttaaccggttgtacaaggaccgcaccttcgacaacatcgtcatctcgcctggccctggatctccggcatgccccgccgacataggggtatgtctgcgcatacttttggagtgtggagatatacccatcttgggtgtctgccttggccaccaggccctgggatttgtacatggtgctgagattgttcatgctccagaagctatacacgggcgactcagtgaaattgagcacgatggatgccacctctttaatcgtgtcccctcaggtagaaattctggcttcaaggtagtgaggtatcattcccttgtaatagaatctggttctctacctgatgatcttacatcgatagcgtggactgcttctccaaatttgctttcttaccttgaaagtgatcgaaccaatgttagtaccttcttgggaacattggataacaatttaatgagaaaccctctagagtacagtaacaatggtggggaactatccaacataggacatgcttgtgagtcagatgatagccgagttatcatgggcatcaggcactctagcaggcctcattatggagtgcagtttcacccagagagcattgctactcatcacggaagacagattttccgaaactttaagaagataacaggaaattttggattgcgctcatcgtggattcaggaaagaaaggttcacagtattggtcaattctgcaagtcatcatgattctattcctaaggacttgttgcatactgaaagaatggaactttcagagtctgtacttggaaagagagggattgggaagaagtgtttacgattacaatggaagaagattgaaaattttgtctgtcccacagtaggctctgaagacatatttgcggtgctttttggccatcaaagcggtgaagacacattttggttggatagctcatcagttgaccagggcacgtttttcattcatgggtggtaaaggtgggtccctgtggaagcaaatgtcattccacctatctggtcaaagagccaattgtggaggaatgcttagtatccaagatgcttatggatttactgccaaaaaatttatcaaagacggcttcttggagttccttaacaaggagattgagtccattcaatacaatgagaaggattacgaaggactgccctttgaattccatggtggcttcgttggatatcttgggtatggtcttaaagtggagtgtgatgcatcatcgaacaaggccaaatcaagtactcctgatgcatgcttcgtctttgctgataacactgtggtggttgatcacagcaatggtgatgtgtatattttgtcactgcatgatgaattttattctagtaatggagatgggatatgcaaaaattcaacgcatacttcatggttagtggagactgagaagaagcttctcaggttgggtggtatgccctcaggatcaccaattatccgaaagacacatgctagatcatccagtgtgcataagcaggcaggatcaccaattaatggaaagacatatgttagatcatccagtgcgctgaagcagagttttgttgtagagaaatcaaaggaccaatatgttagagacgttcagaattgcttggattatatcagggacggagaaagctatgagttgtgcttaactactcagatgaagagaagagcagactgtataaatgcactccaactctaccttaaactgagaaaacaaaatccagcgccttatgcggcctggcttaacttctcctcagaaaacttgagcatatgttgctcttctccagaaaggtttctacgactagaccgagctggagttctagaagcgaaaccaattaaaggtactatagcacgtggcagaacaccagaggaagatgaatgcttacgtctgcagttgagatacagcgaaaaagaccaggccgagaacctgatgattgtcgacctcttaagaaacgatctcggcaaggtctgcgagccagggagcgtgcatgtcccacgcctcatggacgttgaatcatacagaagtgttcacaccatggttctgcggtgctgacatcggtgaaagatgaggaggatcaggcttgcctgtttgcttgttatctttgtgcaagtgcaatgggcggcccttggaacgcatgatgtgtacatcgtgaccatggaaggggatccggtcgttagctacagaggcggtgtccaaggatttccagcaaccgctgtggattcggacgaggaaattgatctaaccagcgaggctgtcaaatcgtatgccctccacctccgaggacaccatgacaagctgctagactcgcttttagtagaaggaacttacgagaagctttatagctaccatcatctcatcaatggcttcgcagttcacatgtcgccactgcaggctgagttcttgaagaaagccccaggagttaagcatgttgagagagacatgaaggtacagaaattgactacacacacacctcagtttcttggattgccaactggggtatggtcaacaggaggtgggcttgatagagctggtgaagatgttgtgatcggtttcgtggattctggaatttaccctgaacatccgagcttcgctgcgcacaagactgatccatatggacctgcccctcgttataaagggaaatgtgagatggatccagtaacacaaagaagtttctgtaatgggaagatagttggggctcagcattttgcaaaagctgcaatggctgctggcgcgtttaatcccgatgttgaatttgcatctccattagatggtgatggtcatggaagtcacacagctgcaattgctgctggaaacaatggggtcccagtgcgaatgcatggtcacgaatttggcaaggcaagtggtatggccccacgtgctagggtagctgtctacaaggttctttacaggctttttggtggttacatagctgatgttgtggcagctattgatcaggctgttcaggatggtgttgacattctcaacctttctgttgggcccaatagcccaccaacagctacacggactacttttttgaatccttttgacgctgcacttctttctgctgtgaaagctggggtatttgttgcccaagctgcaggaaatggtggaccatttccaaaaacactggtgtctttcagcccatggataactactgttgctgctggagttgatgaccgcagatacaagaatcatttaacactaggaaatggaaaacttctctctgggcttggagtatcacctgcaacacatgggaatatgtcgttcagcttgatttctgcagctgatgctctattgggttcatctgcaaccaagtacagtgcattagattgccagaggcctgaactattgaataagaggaaagttcaggggagaattcttttgtgtggctattcgttcaattacatttctgggacagcttcaataaagaaagtgtctcagacggccaggaatcttggagcagctggctttgttgttgctgtggagaataattacccaggaacaaaatttgaccctgtaccattcagcatccctggaattctcatcacagatgtcagcaaaacggaggatcttatagactactacaattcttccaccataagagattgggctggaagggctacagccttcaaagcaacagcaggtattgcagatggtttggcaccaacactatacaattctgccccccaggttgcactgttctcttctcgaggacccgatgttaaagattttagctttcaagatgctgatgtccttaaaccagacatacttgctcctggcaatctcatatgggctgcatgggcgcctaatggaacggatgaatcaaactatgctggtgaaggatttgcaatggtttctggaactagcatggccgcaccgcatatcgctggcattgcggcactgataaagcagaagaacccaaagtggagcccctcagcaataaaatctgccatgatgacaacggccaatacactggacaaagggagccgtcctctcagagcgcagcagtacactgcatcggaaatgatgacactttctcgggccacaccgtttgattgtggtagtggcgctgttaacccaaaagctgcccttgatcctggtcttgttctagatgcaacccacgaagagtacatcgcatttttgtgctcgatccctgacgtcaaccagagcgaagtgtcaaacatcgccggttcagcttgcaactccagctccaaggggcgtcaacgccccttcgacctcaacctcccctcgatcgccatctctcagcttcgaggcaccgtgacggtgacgcggaccgtcacaagcgtgtccgaggagaccgagacctacaccatcatgacgagaatgccgccggaggttgccctggaggtgacgcctccggcggtgacggtgctgcccggagcatcgagagagctagctgtgaccctgacggcgaggtccgtgaccggcacctacagtttcggagagatcgccatgaaaggcgaccgcggccacctcgtcagaatcccagtggtagctatgggattcaagtagatagaagacgaccgcgaccggcgctagagagagtaagtacgaggagcgagttgtgcctctgagatccgaggtcttgagctgcagaggaatgctgtaatttttccatagtttgtagagaataagagttagggtctgtttggttgggctgtggctgtgaaaaaagttgctgtgggctgtgagctgtggaaaaagctgctgtaggctgcaagctgttaaaaagctaaaaactgtttggtggaaaccactaaaagtcgttaaaaattcttcgatatatgttttcacagtttcatctaaaaagccactaaaagcaggtccaggggtgctttcagatttgcactgcgagaaagtcggcttttagaaaaagctgcttcctggatctagccttttggttgacttttggcttttaggggggcaaaagccaaagccaaaagtcaaaccaaacacacccttagaatgccctcctggttgtaaaaatatgtatttgggtgtttaaatttaagcctatgttcagccttgctcttaaggcaaagtatcatgtgcacatcagctatcagt

SEQ ID NO: 217160 - DNA, 5398 bp, Zea Mays
cacccggatcctccgcgcgcgccgccaggtccgtcgcgatggccgcactccgcctccccgcccagccggtggcgaggtggccccaccttccttccgcctacgccgccgccgccgccgcgcgtcgggtctcggcccctcgcggccatctcgcggcgcggcgggccaagggggaggagccgccggagccgccggtgaggacgctgctgatcgacaactatgacagctacacctacaacatcttccaggagctgtcggtcgtcaacggcgtgccgcccgtggtcgtgcgcaacgacgagtggacgtggggggacatctttaaccggttgtacaaggaccgcaccttcgacaacatcgtcatctcgcctggccctggatctccggcatgccccgccgacataggggtatgtctgcgcatacttttggagtgtggagatatacccatcttgggtgtctgccttggccaccaggccctgggatttgtacatggtgctgagattgttcatgctccagaagctatacacgggcgactcagtgaaattgagcacgatggatgccacctctttaatcgtgtcccctcaggtagaaattctggcttcaaggtagtgaggtatcattcccttgtaatagaatctggttctctacctgatgatcttacatcgatagcgtggactgcttctccaaatttgctttcttaccttgaaagtgatcgaaccaatgttagtaccttcttgggaacattggataacaatttaatgagaaaccctctagagtacagtaacaatggtggggaactatccaacataggacatgcttgtgagtcagatgatagccgagttatcatgggcatcaggcactctagcaggcctcattatggagtgcagagagcattgctactcatcacggaagacagattttccgaaactttaagaagataacaggaaattttggattgcgctcatcgtggattcaggaaagaaaggttcacagtattgagagtcctgttctgcaggtcaattctgcaagtcatcatgattctattcctaaggacttgttgcatactgaaagaatggaactttcagagtctgtacttggaaagagagggattgggaagaagtgtttacgattacaatggaagaagattgaaaattttgtctgtcccacagtaggctctgaagacatatttgcggtgctttttggccatcaaagcggtgaagacacattttggttggatagctcatcagttgaccagaacagggcacgtttttcattcatgggtggtaaaggtgggtccctgtggaagcaaatgtcattccacctatctggtcaaagagccaattgtggaggaatgcttagtatccaagatgcttatggatttactgccaaaaaatttatcaaagacggcttcttggagttccttaacaaggagattgagtccattcaatacaatgagaaggattacgaaggactgccctttgaattccatggtggcttcgttggatatcttgggtatggtcttaaagtggagtgtgatgcatcatcgaacaaggccaaatcaagtactcctgatgcatgcttcgtctttgctgataacactgtggtggttgatcacagcaatggtgatgtgtatattttgtcactgcatgatgaattttattctagtaatggagatgggatatgcaaaaattcaacgcatacttcatggttagtggagactgagaagaagcttctcaggttgggtggtatgccctcaggatcaccaattatccgaaagacacatgctagatcatccagtgtgcataagcaggcaggatcaccaattaatggaaagacatatgttagatcatccagtgcgctgaagcagagttttgttgtagagaaatcaaaggaccaatatgttagagacgttcagaattgcttggattatatcagggacggagaaagctatgagttgtgcttaactactcagatgaagagaagagcagactgtataaatgcactccaactctaccttaaactgagaaaacaaaatccagcgccttatgcggcctggcttaacttctcctcagaaaacttgagcatatgttgctcttctccagaaaggtttctacgactagaccgagctggagttctagaagcgaaaccaattaaaggtactatagcacgtggcagaacaccagaggaagatgaatgcttacgtctgcagttgagatacagcgaaaaagaccaggccgagaacctgatgattgtcgacctcttaagaaacgatctcggcaaggtctgcgagccagggagcgtgcatgtcccacgcctcatggacgttgaatcatacagaagtgttcacaccatggttctgcggtgctgacatcggtgaaagatgaggaggatcaggcttgcctgtttgcttgttatctttgtgcaagtgcaatgggcggcccttggaacgcatgatgtgtacatcgtgaccatggaaggggatccggtcgttagctacagaggcggtgtccaaggatttccagcaaccgctgtggattcggacgaggaaattgatctaaccagcgaggctgtcaaatcgtatgccctccacctccgaggacaccatgacaagctgctagactcgcttttagtagaaggaacttacgagaagctttatagctaccatcatctcatcaatggcttcgcagttcacatgtcgccactgcaggctgagttcttgaagaaagccccaggagttaagcatgttgagagagacatgaaggtacagaaattgactacacacacacctcagtttcttggattgccaactggggtatggtcaacaggaggtgggcttgatagagctggtgaagatgttgtgatcggtttcgtggattctggaatttaccctgaacatccgagcttcgctgcgcacaagactgatccatatggacctgcccctcgttataaagggaaatgtgagatggatccagtaacacaaagaagtttctgtaatgggaagatagttggggctcagcattttgcaaaagctgcaatggctgctggcgcgtttaatcccgatgttgaatttgcatctccattagatggtgatggtcatggaagtcacacagctgcaattgctgctggaaacaatggggtcccagtgcgaatgcatggtcacgaatttggcaaggcaagtggtatggccccacgtgctagggtagctgtctacaaggttctttacaggctttttggtggttacatagctgatgttgtggcagctattgatcaggctgttcaggatggtgttgacattctcaacctttctgttgggcccaatagcccaccaacagctacacggactacttttttgaatccttttgacgctgcacttctttctgctgtgaaagctggggtatttgttgcccaagctgcaggaaatggtggaccatttccaaaaacactggtgtctttcagcccatggataactactgttgctgctggagttgatgaccgcagatacaagaatcatttaacactaggaaatggaaaacttctctctgggcttggagtatcacctgcaacacatgggaatatgtcgttcagcttgatttctgcagctgatgctctattgggttcatctgcaaccaagtacagtgcattagattgccagaggcctgaactattgaataagaggaaagttcaggggagaattcttttgtgtggctattcgttcaattacatttctgggacagcttcaataaagaaagtgtctcagacggccaggaatcttggagcagctggctttgttgttgctgtggagaataattacccaggaacaaaatttgaccctgtaccattcagcatccctggaattctcatcacagatgtcagcaaaacggaggatcttatagactactacaattcttccaccataagagattgggctggaagggctacagccttcaaagcaacagcaggtattgcagatggtttggcaccaacactatacaattctgccccccaggttgcactgttctcttctcgaggacccgatgttaaagattttagctttcaagatgctgatgtccttaaaccagacatacttgctcctggcaatctcatatgggctgcatgggcgcctaatggaacggatgaatcaaactatgctggtgaaggatttgcaatggtttctggaactagcatggccgcaccgcatatcgctggcattgcggcactgataaagcagaagaacccaaagtggagcccctcagcaataaaatctgccatgatgacaacggccaatacactggacaaagggagccgtcctctcagagcgcagcagtacactgcatcggaaatgatgacactttctcgggccacaccgtttgattgtggtagtggcgctgttaacccaaaagctgcccttgatcctggtcttgttctagatgcaacccacgaagagtacatcgcatttttgtgctcgatccctgacgtcaaccagagcgaagtgtcaaacatcgccggttcagcttgcaactccagctccaaggggcgtcaacgccccttcgacctcaacctcccctcgatcgccatctctcagcttcgaggcaccgtgacggtgacgcggaccgtcacaagcgtgtccgaggagaccgagacctacaccatcatgacgagaatgccgccggaggttgccctggaggtgacgcctccggcggtgacggtgctgcccggagcatcgagagagctagctgtgaccctgacggcgaggtccgtgaccggcacctacagtttcggagagatcgccatgaaaggcgaccgcggccacctcgtcagaatcccagtggtagctatgggattcaagtagatagaagacgaccgcgaccggcgctagagagagtaagtacgaggagcgagttgtgcctctgagatccgaggtcttgagctgcagaggaatgctgtaatttttccatagtttgtagagaataagagttagggtctgtttggttgggctgtggctgtgaaaaaagttgctgtgggctgtgagctgtggaaaaagctgctgtaggctgcaagctgttaaaaagctaaaaactgtttggtggaaaccactaaaagtcgttaaaaattcttcgatatatgttttcacagtttcatctaaaaagccactaaaagcaggtccaggggtgctttcagatttgcactgcgagaaagtcggcttttagaaaaagctgcttcctggatctagccttttggttgacttttggcttttaggggggcaaaagccaaagccaaaagtcaaaccaaacacacccttagaatgccctcctggttgtaaaaatatgtatttgggtgtttaaatttaagcctatgttcagccttgctcttaaggcaaagtatcatgtgcacatcagctatcagt

SEQ ID NO: 217161 - DNA, 5401 bp, Zea Mays
cacccggatcctccgcgcgcgccgccaggtccgtcgcgatggccgcactccgcctccccgcccagccggtggcgaggtggccccaccttccttccgcctacgccgccgccgccgccgcgcgtcgggtctcggcccctcgcggccatctcgcggcgcggcgggccaagggggaggagccgccggagccgccggtgaggacgctgctgatcgacaactatgacagctacacctacaacatcttccaggagctgtcggtcgtcaacggcgtgccgcccgtggtcgtgcgcaacgacgagtggacgtggggggacatctttaaccggttgtacaaggaccgcaccttcgacaacatcgtcatctcgcctggccctggatctccggcatgccccgccgacataggggtatgtctgcgcatacttttggagtgtggagatatacccatcttgggtgtctgccttggccaccaggccctgggatttgtacatggtgctgagattgttcatgctccagaagctatacacgggcgactcagtgaaattgagcacgatggatgccacctctttaatcgtgtcccctcaggtagaaattctggcttcaaggtagtgaggtatcattcccttgtaatagaatctggttctctacctgatgatcttacatcgatagcgtggactgcttctccaaatttgctttcttaccttgaaagtgatcgaaccaatgttagtaccttcttgggaacattggataacaatttaatgagaaaccctctagagtacagtaacaatggtggggaactatccaacataggacatgcttgtgagtcagatgatagccgagttatcatgggcatcaggcactctagcaggcctcattatggagtgcagagagcattgctactcatcacggaagacagattttccgaaactttaagaagataacaggaaattttggattgcgctcatcgtggattcaggaaagaaaggttcacagtattggtaaactggaaaaatctcaagtcaattctgcaagtcatcatgattctattcctaaggacttgttgcatactgaaagaatggaactttcagagtctgtacttggaaagagagggattgggaagaagtgtttacgattacaatggaagaagattgaaaattttgtctgtcccacagtaggctctgaagacatatttgcggtgctttttggccatcaaagcggtgaagacacattttggttggatagctcatcagttgaccagaacagggcacgtttttcattcatgggtggtaaaggtgggtccctgtggaagcaaatgtcattccacctatctggtcaaagagccaattgtggaggaatgcttagtatccaagatgcttatggatttactgccaaaaaatttatcaaagacggcttcttggagttccttaacaaggagattgagtccattcaatacaatgagaaggattacgaaggactgccctttgaattccatggtggcttcgttggatatcttgggtatggtcttaaagtggagtgtgatgcatcatcgaacaaggccaaatcaagtactcctgatgcatgcttcgtctttgctgataacactgtggtggttgatcacagcaatggtgatgtgtatattttgtcactgcatgatgaattttattctagtaatggagatgggatatgcaaaaattcaacgcatacttcatggttagtggagactgagaagaagcttctcaggttgggtggtatgccctcaggatcaccaattatccgaaagacacatgctagatcatccagtgtgcataagcaggcaggatcaccaattaatggaaagacatatgttagatcatccagtgcgctgaagcagagttttgttgtagagaaatcaaaggaccaatatgttagagacgttcagaattgcttggattatatcagggacggagaaagctatgagttgtgcttaactactcagatgaagagaagagcagactgtataaatgcactccaactctaccttaaactgagaaaacaaaatccagcgccttatgcggcctggcttaacttctcctcagaaaacttgagcatatgttgctcttctccagaaaggtttctacgactagaccgagctggagttctagaagcgaaaccaattaaaggtactatagcacgtggcagaacaccagaggaagatgaatgcttacgtctgcagttgagatacagcgaaaaagaccaggccgagaacctgatgattgtcgacctcttaagaaacgatctcggcaaggtctgcgagccagggagcgtgcatgtcccacgcctcatggacgttgaatcatacagaagtgttcacaccatggttctgcggtgctgacatcggtgaaagatgaggaggatcaggcttgcctgtttgcttgttatctttgtgcaagtgcaatgggcggcccttggaacgcatgatgtgtacatcgtgaccatggaaggggatccggtcgttagctacagaggcggtgtccaaggatttccagcaaccgctgtggattcggacgaggaaattgatctaaccagcgaggctgtcaaatcgtatgccctccacctccgaggacaccatgacaagctgctagactcgcttttagtagaaggaacttacgagaagctttatagctaccatcatctcatcaatggcttcgcagttcacatgtcgccactgcaggctgagttcttgaagaaagccccaggagttaagcatgttgagagagacatgaaggtacagaaattgactacacacacacctcagtttcttggattgccaactggggtatggtcaacaggaggtgggcttgatagagctggtgaagatgttgtgatcggtttcgtggattctggaatttaccctgaacatccgagcttcgctgcgcacaagactgatccatatggacctgcccctcgttataaagggaaatgtgagatggatccagtaacacaaagaagtttctgtaatgggaagatagttggggctcagcattttgcaaaagctgcaatggctgctggcgcgtttaatcccgatgttgaatttgcatctccattagatggtgatggtcatggaagtcacacagctgcaattgctgctggaaacaatggggtcccagtgcgaatgcatggtcacgaatttggcaaggcaagtggtatggccccacgtgctagggtagctgtctacaaggttctttacaggctttttggtggttacatagctgatgttgtggcagctattgatcaggctgttcaggatggtgttgacattctcaacctttctgttgggcccaatagcccaccaacagctacacggactacttttttgaatccttttgacgctgcacttctttctgctgtgaaagctggggtatttgttgcccaagctgcaggaaatggtggaccatttccaaaaacactggtgtctttcagcccatggataactactgttgctgctggagttgatgaccgcagatacaagaatcatttaacactaggaaatggaaaacttctctctgggcttggagtatcacctgcaacacatgggaatatgtcgttcagcttgatttctgcagctgatgctctattgggttcatctgcaaccaagtacagtgcattagattgccagaggcctgaactattgaataagaggaaagttcaggggagaattcttttgtgtggctattcgttcaattacatttctgggacagcttcaataaagaaagtgtctcagacggccaggaatcttggagcagctggctttgttgttgctgtggagaataattacccaggaacaaaatttgaccctgtaccattcagcatccctggaattctcatcacagatgtcagcaaaacggaggatcttatagactactacaattcttccaccataagagattgggctggaagggctacagccttcaaagcaacagcaggtattgcagatggtttggcaccaacactatacaattctgccccccaggttgcactgttctcttctcgaggacccgatgttaaagattttagctttcaagatgctgatgtccttaaaccagacatacttgctcctggcaatctcatatgggctgcatgggcgcctaatggaacggatgaatcaaactatgctggtgaaggatttgcaatggtttctggaactagcatggccgcaccgcatatcgctggcattgcggcactgataaagcagaagaacccaaagtggagcccctcagcaataaaatctgccatgatgacaacggccaatacactggacaaagggagccgtcctctcagagcgcagcagtacactgcatcggaaatgatgacactttctcgggccacaccgtttgattgtggtagtggcgctgttaacccaaaagctgcccttgatcctggtcttgttctagatgcaacccacgaagagtacatcgcatttttgtgctcgatccctgacgtcaaccagagcgaagtgtcaaacatcgccggttcagcttgcaactccagctccaaggggcgtcaacgccccttcgacctcaacctcccctcgatcgccatctctcagcttcgaggcaccgtgacggtgacgcggaccgtcacaagcgtgtccgaggagaccgagacctacaccatcatgacgagaatgccgccggaggttgccctggaggtgacgcctccggcggtgacggtgctgcccggagcatcgagagagctagctgtgaccctgacggcgaggtccgtgaccggcacctacagtttcggagagatcgccatgaaaggcgaccgcggccacctcgtcagaatcccagtggtagctatgggattcaagtagatagaagacgaccgcgaccggcgctagagagagtaagtacgaggagcgagttgtgcctctgagatccgaggtcttgagctgcagaggaatgctgtaatttttccatagtttgtagagaataagagttagggtctgtttggttgggctgtggctgtgaaaaaagttgctgtgggctgtgagctgtggaaaaagctgctgtaggctgcaagctgttaaaaagctaaaaactgtttggtggaaaccactaaaagtcgttaaaaattcttcgatatatgttttcacagtttcatctaaaaagccactaaaagcaggtccaggggtgctttcagatttgcactgcgagaaagtcggcttttagaaaaagctgcttcctggatctagccttttggttgacttttggcttttaggggggcaaaagccaaagccaaaagtcaaaccaaacacacccttagaatgccctcctggttgtaaaaatatgtatttgggtgtttaaatttaagcctatgttcagccttgctcttaaggcaaagtatcatgtgcacatcagctatcagt

SEQ ID NO: 217162 - DNA, 3119 bp, Zea Mays
cacccggatcctccgcgcgcgccgccaggtccgtcgcgatggccgcactccgcctccccgcccagccggtggcgaggtggccccaccttccttccgcctacgccgccgccgccgccgcgcgtcgggtctcggcccctcgcggccatctcgcggcgcggcgggccaagggggaggagccgccggagccgccggtgaggacgctgctgatcgacaactatgacagctacacctacaacatcttccaggagctgtcggtcgtcaacggcgtgccgcccgtggtcgtgcgcaacgacgagtggacgtggggggacatctttaaccggttgtacaaggaccgcaccttcgacaacatcgtcatctcgcctggccctggatctccggcatgccccgccgacataggggtatgtctgcgcatacttttggagtgtggagatatacccatcttgggtgtctgccttggccaccaggccctgggatttgtacatggtgctgagattgttcatgctccagaagctatacacgggcgactcagtgaaattgagcacgatggatgccacctctttaatcgtgtcccctcaggtagaaattctggcttcaaggtagtgaggtatcattcccttgtaatagaatctggttctctacctgatgatcttacatcgatagcgtggactgcttctccaaatttgctttcttaccttgaaagtgatcgaaccaatgttagtaccttcttgggaacattggataacaatttaatgagaaaccctctagagtacagtaacaatggtggggaactatccaacataggacatgcttgtgagtcagatgatagccgagttatcatgggcatcaggcactctagcaggcctcattatggagtgcagagagcattgctactcatcacggaagacagattttccgaaactttaagaagataacaggaaattttggattgcgctcatcgtggattcaggaaagaaaggttcacagtattggtcaattctgcaagtcatcatgattctattcctaaggacttgttgcatactgaaagaatggaactttcagagtctgtacttggaaagagagggattgggaagaagtgtttacgattacaatggaagaagattgaaaattttgtctgtcccacagtaggctctgaagacatatttgcggtgctttttggccatcaaagcggtgaagacacattttggttggatagctcatcagttgaccagaacagggcacgtttttcattcatgggtggtaaaggtgggtccctgtggaagcaaatgtcattccacctatctggtcaaagagccaattgtggaggaatgcttagtatccaagatgcttatggatttactgccaaaaaatttatcaaagacggcttcttggagttccttaacaaggagattgagtccattcaatacaatgagaaggattacgaaggactgccctttgaattccatggtggcttcgttggatatcttgggtatggtcttaaagtggagtgtgatgcatcatcgaacaaggccaaatcaagtactcctgatgcatgcttcgtctttgctgataacactgtggtggttgatcacagcaatggtgatgtgtatattttgtcactgcatgatgaattttattctagtaatggagatgggatatgcaaaaattcaacgcatacttcatggttagtggagactgagaagaagcttctcaggttgggtggtatgccctcaggatcaccaattatccgaaagacacatgctagatcatccagtgtgcataagcagagttttgttgtagagaaatcaaaggaccaatatgttagagacgttcagaattgcttggattatatcagggacggagaaagctatgagttgtgcttaactactcagatgaagagaagagcagactgtataaatgcactccaactctaccttaaactgagaaaacaaaatccagcgccttatgcggcctggcttaacttctcctcagaaaacttgagcatatgttgctcttctccagaaaggtttctacgactagaccgagctggagttctagaagcgaaaccaattaaaggtactatagcacgtggcagaacaccagaggaagatgaatgcttacgtctgcagttgagatacagcgaaaaagaccaggccgagaacctgatgattgtcgacctcttaagaaacgatctcggcaaggtctgcgagccagggagcgtgcatgtcccacgcctcatggacgttgaatcatacagaagtgttcacaccatggtgagtaccgtctgcggaacaaagaagccagatctaagccccgttgattgtgtgaaagcggcctttccaggcggttcgatgaccggggctccaaaagtcagatcaatggagatccttgattcacttgagacaagcccaagaggagtgtactcaggatcgatcgggttcttctcgtacaaccacacattcgacctgaacattgtgatccgaactgttatcctgcacgacggagaagcctcggtcggggcgggtggggcgatcgtagcgctgtcgagcccagaagcagagtacgacgaaatgctgctgaaagcgaaagccccgactgaggtggttgaggatctcgttcagacgatctacagctcagaccggtcggattccatgcagacaactatcagctagatcagataggcaaaggaccattatttgtcgcgacaccaagcgcttacgatggacctcggcaaacaccatgtgtctcagaaatttggtatcagtgaccggtgcgtgctgatgaacattggcagtgggagaggggggggggggggggggtgaggtggcgtatcttctttgcgatggtcatccctttgccagaaggaaataaaggagacgcgaagaggatgtcgaggtcagtcggatccacggttagcatatagagtcaggtgacatggcctctctcaactatagtgtgtgtgtgtgtgtggcatatacggtgagcatatacaagaacaacagtgtgtgtgtggcagaagtgaaacaaactgatacggttgtgttgcactgtcgtaccagttcaatgttcctgaagtgatattattctttgacgttataaatacttcgagggtgggtggg

SEQ ID NO: 217163 - DNA, 3050 bp, Zea Mays
cacccggatcctccgcgcgcgccgccaggtccgtcgcgatggccgcactccgcctccccgcccagccggtggcgaggtggccccaccttccttccgcctacgccgccgccgccgccgcgcgtcgggtctcggcccctcgcggccatctcgcggcgcggcgggccaagggggaggagccgccggagccgccggtgaggacgctgctgatcgacaactatgacagctacacctacaacatcttccaggagctgtcggtcgtcaacggcgtgccgcccgtggtcgtgcgcaacgacgagtggacgtggggggacatctttaaccggttgtacaaggaccgcaccttcgacaacatcgtcatctcgcctggccctggatctccggcatgccccgccgacataggggtatgtctgcgcatacttttggagtgtggagatatacccatcttgggtgtctgccttggccaccaggccctgggatttgtacatggtgctgagattgttcatgctccagaagctatacacgggcgactcagtgaaattgagcacgatggatgccacctctttaatcgtgtcccctcaggtagtgaggtatcattcccttgtaatagaatctggttctctacctgatgatcttacatcgatagcgtggactgcttctccaaatttgctttcttaccttgaaagtgatcgaaccaatgttagtaccttcttgggaacattggataacaatttaatgagaaaccctctagagtacagtaacaatggtggggaactatccaacataggacatgcttgtgagtcagatgatagccgagttatcatgggcatcaggcactctagcaggcctcattatggagtgcagtttcacccagagagcattgctactcatcacggaagacagattttccgaaactttaagaagataacaggaaattttggattgcgctcatcgtggattcaggaaagaaaggtcaattctgcaagtcatcatgattctattcctaaggacttgttgcatactgaaagaatggaactttcagagtctgtacttggaaagagagggattgggaagaagtgtttacgattacaatggaagaagattgaaaattttgtctgtcccacagtaggctctgaagacatatttgcggtgctttttggccatcaaagcggtgaagacacattttggttggatagctcatcagttgaccagaacagggcacgtttttcattcatgggtggtaaaggtgggtccctgtggaagcaaatgtcattccacctatctggtcaaagagccaattgtggaggaatgcttagtatccaagatgcttatggatttactgccaaaaaatttatcaaagacggcttcttggagttccttaacaaggagattgagtccattcaatacaatgagaaggattacgaaggactgccctttgaattccatggtggcttcgttggatatcttgggtatggtcttaaagtggagtgtgatgcatcatcgaacaaggccaaatcaataatggagatgggatatgcaaaaattcaacgcatacttcatggttagtggagactgagaagaagcttctcaggttgggtggtatgccctcaggatcaccaattatccgaaagacacatgctagatcatccagtgtgcataagcaggcaggatcaccaattaatggaaagacatatgttagatcatccagtgcgctgaagcagagttttgttgtagagaaatcaaaggaccaatatgttagagacgttcagaattgcttggattatatcagggacggagaaagctatgagttgtgcttaactactcagatgaagagaagagcagactgtataaatgcactccaactctaccttaaactgagaaaacaaaatccagcgccttatgcggcctggcttaacttctcctcagaaaacttgagcatatgttgctcttctccagaaaggtttctacgactagaccgagctggagttctagaagcgaaaccaattaaaggtactatagcacgtggcagaacaccagaggaagatgaatgcttacgtctgcagttgagatacagcgaaaaagaccaggccgagaacctgatgattgtcgacctcttaagaaacgatctcggcaaggtctgcgagccagggagcgtgcatgtcccacgcctcatggacgttgaatcatacagaagtgttcacaccatggtgagtaccgtctgcggaacaaagaagccagatctaagccccgttgattgtgtgaaagcggcctttccaggcggttcgatgaccggggctccaaaagtcagatcaatggagatccttgattcacttgagacaagcccaagaggagtgtactcaggatcgatcgggttcttctcgtacaaccacacattcgacctgaacattgtgatccgaactgttatcctgcacgacggagaagcctcggtcggggcgggtggggcgatcgtagcgctgtcgagcccagaagcagagtacgacgaaatgctgctgaaagcgaaagccccgactgaggtggttgaggatctcgttcagacgatctacagctcagaccggtcggattccatgcagacaactatcagctagatcagataggcaaaggaccattatttgtcgcgacaccaagcgcttacgatggacctcggcaaacaccatgtgtctcagaaatttggtatcagtgaccggtgcgtgctgatgaacattggcagtgggagaggggggggggggggggggtgaggtggcgtatcttctttgcgatggtcatccctttgccagaaggaaataaaggagacgcgaagaggatgtcgaggtcagtcggatccacggttagcatatagagtcaggtgacatggcctctctcaactatagtgtgtgtgtgtgtgtggcatatacggtgagcatatacaagaacaacagtgtgtgtgtggcagaagtgaaacaaactgatacggttgtgttgcactgtcgtaccagttcaatgttcctgaagtgatattattctttgacgttataaatacttcgagggtgggtggg

SEQ ID NO: 217164 - DNA, 2920 bp, Zea Mays
cacccggatcctccgcgcgcgccgccaggtccgtcgcgatggccgcactccgcctccccgcccagccggtggcgaggtggccccaccttccttccgcctacgccgccgccgccgccgcgcgtcgggtctcggcccctcgcggccatctcgcggcgcggcgggccaagggggaggagccgccggagccgccggtgaggacgctgctgatcgacaactatgacagctacacctacaacatcttccaggagctgtcggtcgtcaacggcgtgccgcccgtggtcgtgcgcaacgacgagtggacgtggggggacatctttaaccggttgtacaaggaccgcaccttcgacaacatcgtcatctcgcctggccctggatctccggcatgccccgccgacataggggtatgtctgcgcatacttttggagtgtggagatatacccatcttgggtgtctgccttggccaccaggccctgggatttgtacatggtgctgagattgttcatgctccagaagctatacacgggcgactcagtgaaattgagcacgatggatgccacctctttaatcgtgtcccctcagtaacaatggtggggaactatccaacataggacatgcttgtgagtcagatgatagccgagttatcatgggcatcaggcactctagcaggcctcattatggagtgcagtttcacccagagagcattgctactcatcacggaagacagattttccgaaactttaagaagataacaggaaattttggattgcgctcatcgtggattcaggaaagaaaggtcaattctgcaagtcatcatgattctattcctaaggacttgttgcatactgaaagaatggaactttcagagtctgtacttggaaagagagggattgggaagaagtgtttacgattacaatggaagaagattgaaaattttgtctgtcccacagtaggctctgaagacatatttgcggtgctttttggccatcaaagcggtgaagacacattttggttggatagctcatcagttgaccagaacagggcacgtttttcattcatgggtggtaaaggtgggtccctgtggaagcaaatgtcattccacctatctggtcaaagagccaattgtggaggaatgcttagtatccaagatgcttatggatttactgccaaaaaatttatcaaagacggcttcttggagttccttaacaaggagattgagtccattcaatacaatgagaaggattacgaaggactgccctttgaattccatggtggcttcgttggatatcttgggtatggtcttaaagtggagtgtgatgcatcatcgaacaaggccaaatcaagtactcctgatgcatgcttcgtctttgctgataacactgtggtggttgatcacagcaatggtgatgtgtatattttgtcactgcatgatgaattttattctagtaatggagatgggatatgcaaaaattcaacgcatacttcatggttagtggagactgagaagaagcttctcaggttgggtggtatgccctcaggatcaccaattatccgaaagacacatgctagatcatccagtgtgcataagcagagttttgttgtagagaaatcaaaggaccaatatgttagagacgttcagaattgcttggattatatcagggacggagaaagctatgagttgtgcttaactactcagatgaagagaagagcagactgtataaatgcactccaactctaccttaaactgagaaaacaaaatccagcgccttatgcggcctggcttaacttctcctcagaaaacttgagcatatgttgctcttctccagaaaggtttctacgactagaccgagctggagttctagaagcgaaaccaattaaaggtactatagcacgtggcagaacaccagaggaagatgaatgcttacgtctgcagttgagatacagcgaaaaagaccaggccgagaacctgatgattgtcgacctcttaagaaacgatctcggcaaggtctgcgagccagggagcgtgcatgtcccacgcctcatggacgttgaatcatacagaagtgttcacaccatggtgagtaccgtctgcggaacaaagaagccagatctaagccccgttgattgtgtgaaagcggcctttccaggcggttcgatgaccggggctccaaaagtcagatcaatggagatccttgattcacttgagacaagcccaagaggagtgtactcaggatcgatcgggttcttctcgtacaaccacacattcgacctgaacattgtgatccgaactgttatcctgcacgacggagaagcctcggtcggggcgggtggggcgatcgtagcgctgtcgagcccagaagcagagtacgacgaaatgctgctgaaagcgaaagccccgactgaggtggttgaggatctcgttcagacgatctacagctcagaccggtcggattccatgcagacaactatcagctagatcagataggcaaaggaccattatttgtcgcgacaccaagcgcttacgatggacctcggcaaacaccatgtgtctcagaaatttggtatcagtgaccggtgcgtgctgatgaacattggcagtgggagaggggggggggggggggggtgaggtggcgtatcttctttgcgatggtcatccctttgccagaaggaaataaaggagacgcgaagaggatgtcgaggtcagtcggatccacggttagcatatagagtcaggtgacatggcctctctcaactatagtgtgtgtgtgtgtgtggcatatacggtgagcatatacaagaacaacagtgtgtgtgtggcagaagtgaaacaaactgatacggttgtgttgcactgtcgtaccagttcaatgttcctgaagtgatattattctttgacgttataaatacttcgagggtgggtggg

SEQ ID NO: 217165 - DNA, 3074 bp, Zea Mays
aaaggagtcgcgttccattttcattctcccacccacccggatcctccgcgcgcgccgccaggtccgtcgcgatggccgcactccgcctccccgcccagccggtggcgaggtggccccaccttccttccgcctacgccgccgccgccgccgcgcgtcgggtctcggcccctcgcggccatctcgcggcgcggcgggccaagggggaggagccgccggagccgccggtgaggacgctgctgatcgacaactatgacagctacacctacaacatcttccaggagctgtcggtcgtcaacggcgtgccgcccgtggtcgtgcgcaacgacgagtggacgtggggggacatctttaaccggttgtacaaggaccgcaccttcgacaacatcgtcatctcgcctggccctggatctccggcatgccccgccgacataggggtatgtctgcgcatacttttggagtgtggagatatacccatcttgggtgtctgccttggccaccaggccctgggatttgtacatggtgctgagattgttcatgctccagaagctatacacgggcgactcagtgaaattgagcacgatggatgccacctctttaatcgtgtcccctcaggtagaaattctggcttcaaggtagtgaggtatcattcccttgtaatagaatctggttctctacctgatgatcttacatcgatagcgtggactgcttctccaaatttgctttcttaccttgaaagtgatcgaaccaatgacatgcttgtgagtcagatgatagccgagttatcatgggcatcaggcactctagcaggcctcattatggagtgcagtttcacccagagagcattgctactcatcacggaagacagattttccgaaactttaagaagataacaggaaattttggattgcgctcatcgtggattcaggaaagaaaggttcacagtattggtcaattctgcaagtcatcatgattctattcctaaggacttgttgcatactgaaagaatggaactttcagagtctgtacttggaaagagagggattgggaagaagtgtttacgattacaatggaagaagattgaaaattttgtctgtcccacagtaggctctgaagacatatttgcggtgctttttggccatcaaagcggtgaagacacattttggttggatagctcatcagttgaccagaacagggcacgtttttcattcatgggtggtaaaggtgggtccctgtggaagcaaatgtcattccacctatctggtcaaagagccaattgtggaggaatgcttagtatccaagatgcttatggatttactgccaaaaaatttatcaaagacggcttcttggagttccttaacaaggagattgagtccattcaatacaatgagaaggattacgaaggactgccctttgaattccatggtggcttcgttggatatcttgggtatggtcttaaagtggagtgtgatgcatcatcgaacaaggccaaatcaagtactcctgatgcatgcttcgtctttgctgataacactgtggtggttgatcacagcaatggtgatgtgtatattttgtcactgcatgatgaattttattctagtaatggagatgggatatgcaaaaattcaacgcatacttcatggttagtggagactgagaagaagcttctcaggttgggtggtatgccctcaggatcaccaattatccgaaagacacatgctagatcatccagtgtgcataagcagagttttgttgtagagaaatcaaaggaccaatatgttagagacgttcagaattgcttggattatatcagggacggagaaagctatgagttgtgcttaactactcagatgaagagaagagcagactgtataaatgcactccaactctaccttaaactgagaaaacaaaatccagcgccttatgcggcctggcttaacttctcctcagaaaacttgagcatatgttgctcttctccagaaaggtttctacgactagaccgagctggagttctagaagcgaaaccaattaaaggtactatagcacgtggcagaacaccagaggaagatgaatgcttacgtctgcagttgagatacagcgaaaaagaccaggccgagaacctgatgattgtcgacctcttaagaaacgatctcggcaaggtctgcgagccagggagcgtgcatgtcccacgcctcatggacgttgaatcatacagaagtgttcacaccatggtgagtaccgtctgcggaacaaagaagccagatctaagccccgttgattgtgtgaaagcggcctttccaggcggttcgatgaccggggctccaaaagtcagatcaatggagatccttgattcacttgagacaagcccaagaggagtgtactcaggatcgatcgggttcttctcgtacaaccacacattcgacctgaacattgtgatccgaactgttatcctgcacgacggagaagcctcggtcggggcgggtggggcgatcgtagcgctgtcgagcccagaagcagagtacgacgaaatgctgctgaaagcgaaagccccgactgaggtggttgaggatctcgttcagacgatctacagctcagaccggtcggattccatgcagacaactatcagctagatcagataggcaaaggaccattatttgtcgcgacaccaagcgcttacgatggacctcggcaaacaccatgtgtctcagaaatttggtatcagtgaccggtgcgtgctgatgaacattggcagtgggagaggggggggggggggggggtgaggtggcgtatcttctttgcgatggtcatccctttgccagaaggaaataaaggagacgcgaagaggatgtcgaggtcagtcggatccacggttagcatatagagtcaggtgacatggcctctctcaactatagtgtgtgtgtgtgtgtggcatatacggtgagcatatacaagaacaacagtgtgtgtgtggcagaagtgaaacaaactgatacggttgtgttgcactgtcgtaccagttcaatgttcctgaagtgatattattctttgacgttataaatacttcgagggtgggtggg

SEQ ID NO: 217166 - DNA, 2113 bp, Zea Mays
gttaaattgagagcaagcaataagtatttgtttatttccttgtctctgtttttctttgtactggactccccctacttctgacaagaagaaaatgcaacgggcagtgcaggccgtcaggtcacacggcaatgttcttaaatatgctgttctacaacacatcagcgctcccaagccagcaatgcttcctgctgccttttctcgtttcatgtcagtttcatctgctcgcctagaggatcgtggatttgaaactgccactgtagcagatgtcttgaagtctaaagggaagagtgctgatggatcttggctctggtgcaccacagaggatagcgtctatgacgctgtcaaatctatgactcagcacaacgtgggagctttggtggttgtcaaacctggacagaataaatcaatcgctggcattgtcactgagagaggtgatgaacaaatttctgtactcttggcatctaacttttggcctgtgggtatgatgggaaaaatacaaaatcatgtaccactacctccattttcatttaactggcacccttgaccaaagtttttctgatcataaatacttgatttaagataaagctggtcagctagtgcttgtagcttgctatttgaaacaatgggcttttgaggtgtttcccaattttctctcatctctctatgttttcatagttcttgccttttcctgttcctttaattggaaaaatatcattagatgcaaaaccatattactttactgcccctttatggtgataagaaactccgacgcattggaaagggaagtatgttcggcgggtaggttgtgaatgtataactccgctttgtttttacttcagctgtgcatcatagtacttttggcatcaaagagtctcaactctttagagcactttatagtagatacaacagaaattgcatcaagttaaagtatacgtgtaagtaacataggatcttcttcacatggcacaatcatagctgccacttcacactgaatttcctattagagatgtataggctaactgacatcacttgttgtattcttgtatcacaagatgtactcagctacacacacgcgtcgcggtacaaacactgccgagcatggaggttgaaactgggccaacttcaggcacatcacatgatgatttctttttcactatgccttgctgcactgttcgcacgttacatcttggacttgaatgtgaccaagtagtatccatatacagacgatcactcgatcagcatacatagatggtatttttgagattagaaccaatacttgacagatcttgcattctgaaaacggaaacgtaagcgtggcaatcttttaagacatgcataagatcatagtgccatgaggctaacatctgagacttggtgttttcagattatctccggaaaatcatagtgcagggaaggtcttccaagtcaactaaggttggcgacatcatgactgaagagaacaaactgatcacagtgaatcccgacaccaaggtcctgcaggcaatgcagctcatgacagaaaaccgcgtcagacacatcccggtgatcgacggcacggggatgctggggatggtctccatcggcgacgtcgtgcgcgcggtggtggccgagcacagggaggagctgaaccggctcaatgactacatccagggaggctactaggacggcgtgtgcagcgacgaccccctccgatcccgccagtcagtgaagtccgcctttgaaatccaataactcggaacaatgatgatgacgaaataggccgtgttttcttggacaatgatgttaagttcggcaaggttttcctttctctttttttattctactgcgtggtctatgtgtatattgccaaaggcatgcgtgagccatgcgcccggtgctggggcgcagagaccatctgatggtggaaacaccggaaataagagcgtgccgctgtgtgtttcctttgaaggaataaaaatggtgttcgtgttgtgcattgcttattgttgatgttcgctttggattaaggccttgtttatgaacggtacggattcagtgcagtactgtacgtgcagaactgggaaggctttactttatgaattacatcttctgtttttagcttcatcatgaaata

SEQ ID NO: 217167 - DNA, 1885 bp, Zea Mays
atgcccagacgacctaatcatcttgctccttgcaccctctgctgtttgcttcctgcctgctgccactgcatctcacatctgcctctttctgcctggatgaccattggtgttgccgaacatggcctctggatgtgtataagggtgcatttggttaagctgcgagctatgaaaaaactgttattatataagttggattatggtggaatggaggacgcacgtcctggacatcaggaggcctgctctcatcttcccaagatctctagcaaggaaacacatccaaagatagcacaagttcttctggaacgacaaaaatatgatatggcacttcttgtgctaaagtgcacagggcatggaagcttctctgctacagaaaactttaaaaaagatgacatttcatctcttagtgaggcagtgactgtggttcgtgtcagaattgaatgtcgcctcctaacagaagcgtttatgtatcataggagctactgctctaaggtgaaagagcaacactcagcagatatgacacatgctgaggatgcattaaaaaactcttgggtttatcatgttgagatgatggtgaccgaattttgtgctatctgcattaaaaggaatttagttgataaaatgattgatctgccctgggattctgaggaggagaaacatcttcacaagtccctctttgactctgctcatgaaatgcccatgaaaccaaatggtagtctgcttgttgtctactaccttcggcgttatcggtatttggaggcatatgaggttgaccgtagtcttcaaaaatttgagcaaaagatattggaaaatacaactgaagagattgcttcaaaaatcagagcaattgctcgatggagagaaagtttagttgttaaatgccttgacatgcttccggaggtccagagagagaatgtgaaagccatcaacagtggagaacaaagtcaatttgctcgaactgctcaattatcttctccagctcatgtgggcaaatcacaaagtcctgtcatggacttgagcacaacttttacgacttctcttcaaaataagtcaagcctcctccgaaaaaacaatgcattgactgattctggtggtctgatccgaagcagccgctcagaatttggtagaaaggtcccatctgttctggataccagggcatcaccccatgggccacctacatccaatatgagatcaagtgcaggggatatgttccccacagtgggccagagagttgagagtccatttttgaggggggcgaaagatatcagttctagaaaaggagaggagggtttcaaaaaagggattaaatatggtgatcacgatccagtgcctatgtatttgaacttaagttctggtgatacacctatgaaagactaccgaacgagtttgctgaagactgcagttaacaaaaccactatttttcaaggaaaagattctgttggaaaaggagagctccactttggttcacgtgccgagaagcctttcatcttaaatggaactggtgtaggtcaaaatggcctcgctaaggtgtctggatatgctggttttcgtgaggattacaaagtaccaactaaggagaacatcttgagctctagcaagagatcttcaatcgatggagcagaagccagcaaaggtgtgtcaaggtggagatccgacgagtctagtgaagacgaagaagagagaacaaacagggagagcggagcttctcttgttactagaaggcgacctagattttcgagaagatgatatatccacgtcctcatggatctttattaattgtttgcagggcgaggattttttttgaatatctccacagttattaccctaatgtaacaaaaaaaacgtttcatcggaaaagtctaacaaacaaccgtatgcatggaatccg

SEQ ID NO: 217168 - DNA, 857 bp, Zea Mays
taaacgtccaacacacggcaccacccagcagcgacgaccgcaccaaacagataaacgttttgcagcgaccccttgttttgctctccgtcagtttgctggccagcaagcggccttgggattggattggagctctcatcagctcctatcttatcaccagagccagacagacagtcatcgtctccgatccgatccatctccgtcttcgtcctcctcgctcgacaacccaccaaggagcaagagaagaagatcgacgacgacgacggctgccctctgcgttcctcaagggctgtggaactaccggttccggccacgcttcccaccacacatgaacacaaggatctcttacgctgatgttgcaaacccagatgagcttgatgaggaattcgacacattcccaacctccaagagcccagatctcattcggatgaggtacgacaggttacggcatgttgctgggaggatacagacagttgttggggacattgccactcagggagagaggctacagtcattgctcagctggagggacccaagggcaacagctatgttcctaatattttgcttgattactgccattatactatatgtgacaccattccaagcgatcgcactctgccttgggttcttctcgatgaggcatcctcggtttcgccacaaggtgccatcagcaccagcaaacttcttcaggaggctacctgtttctgtcactcatatatcgttgtataatagccttatactttcgtttccccaaagctggtgcacgtgattattggaacgggtgaagaccagagagcggtggtcattgggaaaccgtgccgcagcgacgttctccagtgacgagggcgttgttccggcta

SEQ ID NO: 217169 - DNA, 862 bp, Zea Mays
ctaaattgtaaacgtccaacacacggcaccacccagcagcgacgaccgcaccaaacagataaacgttttgcagcgaccccttgttttgctctccgtcagtttgctggccagcaagcggccttgggattggattggagctctcatcagctcctatcttatcaccagagccagacagacagtcatcgtctccgatccgatccatctccgtcttcgtcctcctcgctcgacaacccaccaaggagcaagagaagaagatcgacgacgacgacggctgccctctgcgttcctcaagatgagcttgatgaggaattcgacacattcccaacctccaagagcccagatctcattcggatgaggtacgacaggttacggcatgttgctgggaggatacagacagttgttggggacattgccactcagggagagaggctacagtcattgctcagctggagggacccaagggcaacagctatgttcctaatattttgcttgattactgccattatactatatgtgacaccattccaagcgatcgcactctgccttgggttcttctcgatgaggcatcctcggtttcgccacaaggtgccatcagcaccagcaaacttcttcaggaggctacctgcaaagacggattctttgctgtaaagttccttggaagacagctgttaacaatgtctaatgtacctctttgttgtacctgtttctgtcactcatatatcgttgtataatagccttatactttcgtttccccaaagctggtgcacgtgattattggaacgggtgaagaccagagagcggtggtcattgggaaaccgtgccgcagcgacgttctccagtgacgagggcgttgttccggcta

SEQ ID NO: 217170 - DNA, 4032 bp, Zea Mays
ctccattcaccatcgtactaatgaaatcaagagcaaaatatgccacaagaaagcccacaattctgattgcaacaacacagtgcgtctcctattcgctaaagagaaacaaataatgaaacgcctctatcaccaatctctcaagtctcaagctgcagaagtagaacatcaggcaagaatgcagagggtgcagcctaggaaatcgggtgcagctcatcccacttggtctcgtagctagtagcacgcccgtgcaccgtgtacaacattagttgctgcgactgttgttgcgccgataaggcctgctgcaaccccgcacccacaggcaacgcctagcatccgaggccgggtgctcctccaccttggcatgtacctcgcaagtccactccgccaccgaggacatggactgcaacgccacccatctgccattggaggagccttccgccggtagccaccacctcccacatcctctggctatcacaggaagcttgcagctgcagaaccggaccaagtgacgtcgtcggctacatctcacggtccctggcaacgacgcagaggtcgttactgagctcgacgccgacgaagcctctcccaccgctgcctcccaccatgtctcgaccaaggaaatgcaccgcggcaatgccgtcatgtgcccgcatctcctccgccgtctccaccgccgccgcatcctcctcctcgccgccgccgcatcctcctcctcgctgccgccgccgcatcctcgccgccgccacggcgcgcgtgcgggaggggacgctccgccctgaggaggcacacgacctgctcgacgagttgcagcgtcgaggcacgcccgttctcgagcgcgatctgaacggcttcctcgcggcgctcgcgcgtgcgccgtcctccgccgcctgcaggagtggccctgccctcgccgtcgcgctcttcaaccgcgcggcgtctcgggctcaaggaccgcgggtgctgtcccccacatcccacacctacgccatcctcatggactgctgcacccgcgcgcaccgcccagagctagcgctggcgttcttcggccagctcctcaggacaggcttgcgcgtcaatatcatcatcgctaaccaccttctcgagggcttttgtgaagcgaagcggacagacgaggctttggacatccttctccacagaacgcctgagttgggctgtgtgcccgatgttttctcgtacagcatacttctgaagagcctctgcgaccaaggaaagagtggccaggcagatgatttgctacggatgatggctgaagggggagctgtctgctcgcccaacgtggttgcctacaatacagtaatcgacggcttttttaaggagggtgacgtaaataaagcatgtgatctattcaaagaaatggtacagcggggcattccacctgatttagtgacttataactctgtggtccatgccctgtgtaaggcaagagcaatggacaaggcagaggctttccttcgacaaatggtcaataaacgtgttctgccaaataactggacatataataacttgatatatggatactcctccacaggacagtggaaggaggcggttagggtatttaaagaaatgagaagacacagcatcttaccagatgttgttactttgagcatgttgatgggttccctttgcaagtatggaaaaatcaaggaagctagagatgtttttgacacaatggcaatgaagggccaaaatcctgatgttttctcctacaatattatgctcaacgggcatatgcaaactgtggaatgctagataaggctatgatcatcttcaatgaaatgagagaccatggagtgaaacctgatgtggtaacctataggacagtgattgctgccctctgcagaatcggtaagatggatgatgctatggaaaaatttaatcagatgattgatcaaggagtagcacctgacaaatatgcatacaattgcctgattcaaggtttttgtactcatggtagtttactgaaagccaaggaattgatttcggaaataatgaataatggcatgcatcttgacattgttttcttcagttcgataattaacaacctttgcaaactgggaagggtaatggacgcacaaaatatatttgacttaactgtaaatgttggtctgcatcctgatgctgtggtgtatagtatgctgatggatgggtactgtcttgttggcaagatggagaaagcattaagagtatttgatgctatggtgtcagctggcattgaaccaaacgttgtagtgtattgtacacttgttaatggctattgtaaaattggaaggattgatgaaggattgagtcttttcagagaaatgctgcaaaggggaataaagccttcaactattttatacagcatcataattgatgggttatttcaggccgggagaacagttcctgcaaagatgaaattccatgaaatgacagaaagtggtatcgctatggacatatgtacatacaacatagttcttcgtggactttttaaaaatagatgctttgatgaagcaatctttcttttcaaagaattacgtgcaatgaatgtaaagatcaatatcataactctcaataccatgatagatggaatgtttcaaaccaggagagttgaagaagctaaggatctgtttgcttctatctcgagaagtcggctggtgcctaatgttgtgacttacagtataatgatcacaaatcttataaaagaaggattggtggaagaggcagaagatatgttttcatccatgcagaatgctggctgtgagcccaattctcgattgctgaatcatgtagtcagggaattactaaagaaaaatgaaatagtcagggctggagcttacctgtccaagattgacgagaggaatttctcacttgaacatttaactgcaatgttgctggtcgatctcttctcaagcaaaggaacttgtagggaacaaataagatttctccctgcaaagtatcattttcttgcagaggccagtccgtgattgatatgttgattttttttggaatcagtccttgcacgcacctgtcacagttaaactagtatatgatcttaactaaaaccattggtttacttcatgttcatgtttctcggaagattttcttctcatttgacctgcttgatatgcagatgttcatttacttttgatccaatatatgcagagcgttttatgtttttcgaagcatattcgttccggtgctgatgtagctatgtgctctccgtacacaactgatgtgtgattctctcttgtagcatgttttatcatgtctgttaacacagccgatgttgcatttatgaggaatgacgttataactgctgggagaataatgtagcatgctgaatcctgttttgggccctggctgagccgcccagttcgtcatgaccagcaagtctggcctaatgctgtggcttgtaagggcaaagtggataccctgctgctgggtagtactagtatattgctgttcaaacctgcaaatgtaagttttaaacaaacctgccatttctatctactgtactatgcacgtgcacttgaaacatataactttcattcatgttcagttagcatataagtatatgcattaatgattaagttcatgcaccggccgattcacaacactgaaatactgatgccacagatctgggatcagctgatggatgaagaacaatcagtagtctctgggtaaaatagcatgcctgcgcaagcgagcggacatgagtgacaagaagcggattaggtgggattaaaatccatggtgggattgggtgtaagaatgaccggacaaggcctaatgtgtatcagcagattgacaacgcaacaagagcgaagccacaagaggtttcaggccttgtcgatgagctcctgtggatgcgggggatgacgccgccgccgctggcggcgatggtagccttgatcagggtttccagctcgtcgttcccgtggatcgccagctgaagcataagcagagaagcatatggtggccatggctatgctatttaggaacagaaggcaaaaacagagagggaaattgaac

SEQ ID NO: 217171 - DNA, 186 bp, Zea Mays
ggatgatcaggccagtccatgcattgacaactctgagggagattgtgtgcatgagtgtaactttgaggccttgtcgaaattaatggttaaggacttggtgtttcctgttaacatgcatcttggccagcacttcactaaaccaccaccacgttattctgagggtgcattggtgttctttttgttgtg

SEQ ID NO: 217172 - DNA, 645 bp, Zea Mays
gggtttaaaaatccaagacattttggctgataaatgttagggccaatctgttgtggatgtggttctgttattagcctcatgtttgcttgaaattgtctattttgcttaatagccatccatgttgtctattttgcttaatccccgccgtcatgtccctccattccctgatctatcaaaacaaatgtagaagaagagaaggggcctgctcctgccgccggatctgcttggctttggaaaagctagatgaaaataaggagagaagggagggaggaggtcgtggtctccttgagtggagatatgtattgtgtcttgaccggtcaagaaacacctgtcaatatacatcggcaccacatgggctacgactgctatcgaatccttgaagccaaagctaaagagaatgctccatcaccagcttcccccttgcaagccgacctatgtgtccagctgagttgaagataatgcaaaaatttgaaggtgactaaaaaatctgaagacagggtgtggacaggaattgcattcagaaaatttataactaaaaccgctcgcttagctgtatcgtcaaatgcagaataattacaagctaatctaattgatgatttttatcatttcgggtttgggaaaagagaaagaagaacaatatgctgc

SEQ ID NO: 217173 - DNA, 1847 bp, Zea Mays
ctggaagagctggacagcccctaagtgtaagacaaaagcacatttcatcgttttgacaaattcaatctaaaatacaatccatgtggccaaagtaggctcagagaaattttcctcaaacaagataatcttattcaaggccgttttcttgctgagttgacaaagcaagttttctctgacctttctgctagcaaatatcagatggcagaatataggatttcaatctacggaaggaaacagagtgaatgggaccaacttgcaagttggatagtgaacaatgaattgcacagtggaaatgttgtctggctggttcagattccacgcttatataatgtgtacaaggaaatgggtatcgttacatcattccaaaatcttcttgacaacattttcgttcctctttttgaggttactattgatccagcttcacacccacagctccatgtcttcctgaagcaggttgtagggttggacctggttgatgatgaaagtaaaccagaaaggcgtccaacaaagcacatgcccacacctgaacagtggaccaatgtgttcaaccctgcattttcatattatgcgtactactgctatgctaacttattcaccctaaacaagctgcgtgagtcaaagggaatgaccactatcaaattccgtccacatgctggagaggctggagatgttgatcacttggcagcgacatttcttctctgtcacaacatatcacatggaattaatctaaggaagtctcctgtgcttcagtacttgtactatcttggtcagattggtctggcgatgtccccattgagcaacaactccttatttcttgactatcatcgcaacccttttccaacgttcttccaacgaggtctgaatgtctcattatctacggatgaccctttgcaaattcacctgacaaaagaaccattggtggaagaatacagcattgctgcttcgctgtggaagctcagttcttgtgatttatgcgaaattgcgaggaactctgtttaccaatctgggttttcacatgctctcaaggcgcactggattggtaagaactacttcaaaagaggacctgctggaaatgatattcacagaaccaatgtaccgcacatcagggttcaatttagagagatgatctggagaaatgaaatgaaactagtgtactctgacaatgagatcttaataccagacgagctggacctgtaagatgtccagcctcgtgtataccagacgagttgcgttgtagctgctatgggaattatacttcatgttttgttgctggaagtcggcaaagtgatcaagagtgtcaccaagcataccaactaccaagggatgcaatactacctccattctcgaatatttgccgtccgctagtttatttttgaactaaaacatgacaaataaaaaagaacggaggaagtaatacggcaaagtgaagcaacagatgcttgtgtaggagttgtgttactatcttcaaggcttgtgcaagagttgtgttaatgtctcttactcactcttatctcttatcttaaatcttactttataagtgttttttttttgcatgctcatagctagtattccctgaacaccccccctcccctcgaattgtaaccatgtactcgaagtgcttgcactctggttggatcctatacggtgagtaaggtgctatcggttgttatgctgcccagatgaaatggaaattgaactagatgaagaggttctggtttcacatacgggatcatgggggacaattatgtgtttggcagaggaggaactggactgatgtttttttttgggtgggtgtggcgtagggacaccaaaagataagacaacaacgaatagaacgtaactggcag

SEQ ID NO: 217174 - DNA, 2744 bp, Zea Mays
caaagcaccagaagatatacagggggaggggttcctttcttctcccaccgtcgctgccgccagctgcccagctgcgcctcgtcgtcagagggttccctttcctgttcgatgtgacgcagccccccgctgcgccccgacggcggcggcctcaccggctggcgatgggcacgacaaactgagacctccctttccacccaagttctctttcctccttctctctctctctccctctctctgcggaaggtggcggtgctgcactctgttggtacaagagtctggagtgcagtgcagatccacccggccggacctggatcgatatctccgtttgttggttcaataaaaccaataaattctggggttcaactgaacccccaatccgagtataacggccactctgtgctgcaaggtttgtctaagattttcgtgcaataacggccatgtggaggctcaagcagttcatccccaaggagcagcccagccccagcggcctcgagggtcggacggtcgatgttggcaatgtcaaggtgcacgtccgagaggccattgctgagggtgggttctcatctgtctatgctgctcgagacctggtaaacccagcgaagcagtacgccctcaagcgcgtgattgtccaggacgaggagtcgctgaacctggtccagaaggagatcacggtgatgcggtcgctcaaggggcaccctaatgtggtcacactggttgcacacgccatactggacatgggacggatgagggaggcactgctgctcatggagttctgcgggaagtcactggtttctgtgttggagggcagaggagcaggttactttgatgaggagaaggtggcgctgatcttccgggatgtttgcaatgctgtctttgcgatgcattgccagacgccacctcttgctcacaggctcttgggtgtctcttgtatagaatttgctacttcaaatcagcatttgatggagaatcaaagctccaaatacttaacgggaactatcgcatcccagaattgccgaagtacagttcttctattacaacacttatcaaagacatgcttaattcttctccagatgccagaccggacatcacacaggcaagggctttgcttgattggccattcacttccatgaacttaggtgtggttccgtattaatgagttacttccattggagctgcaaaaggatttacctgatggatctccatctggatcagcatttgaatctcacactgccactgatgaagtatcaatgaggccacagcagatgagtggctcttcatcaagagagaatatcaagaatacctctcttagtgattcttccaacataatggtacaaagtcctctgaaagctatagggaacatgggttctatgggtgcattttggtcaactcaacatgctcaggagctatcttttgctgatgacaaggagccagcttttgataaagagcccattgatcaagtcagatcaaagcaatcacaggctaagaaccagaacacagcagctcgcaattcatctcggaagtctctgtctgcatcagttgatagttcccctggggatttcgaaattaggttttctgcaaatggctcggagtctaggttggaggaaaccaaaacggtaataacagagaataaaacaaagatacaaactactgccttcaactcctgtgcgtcagactttgataatatcaaaatgaactcacgaaacactactgacagtataaacataactagcaaattgaaagagcttcaattggaagcagaagtaactttactcaaggaacaattaaagatagcaaacctggagaaggaagaaatttcgttgaagtttgataagttgtctgccatttgctcctctcagaggcgagagatacaagagcttaagcaagctttggctgcagcttatgttacgccaccagctaaacagttcagagaaaattcaagtgttgaagtcaccccacccagcaaaagcctcgacactccgccgagggagaagattgaaggaacccctccagagctccggcaaggcctgtttacttcaagcccaggaacaccaagccctgacctgaaaacatggtcagctttccttgaagagccaaaatctcaagcagctgtgaagagtgtccaccccaggtcagtccgaactctgcgtgcatcaaacagcaacaaagccagctcgttgggacagtcaaatataagttctagcaccgatccatttgcgtttggtcaagatagttttaaggctgctccttctggaactgtacttcccctgttatcaaacatggggaatacttctcagctcagtaatctgaatatagaagaaaagaaagacggatcctaccaaccagatggatggactgggttttgattgtgctatagtaatttatgtgccaaaagagtcaagagttcatatggtcttggtggtgtggtatactgaaggtgcagagaggaatgcctgaactggtgtaggtatgtgtgacaatgctttttgtacaattgttctggtcctgagctagcatcgtgatgcgttcagttgtaactgtagtgcaaatgtaagttgcaacttgcaattaattgctagatattagatataggaagatgtttttttttcttatgtagacaagcttgtggtgtcatgaattttggaggcatgctatatagatatagccatctattataccatatcatgaataaagggttatcatttagtgacaattggccaatatactcactttaatactattcatgt

SEQ ID NO: 217175 - DNA, 2545 bp, Zea Mays
gggaggggttcctttcttctcccaccgtcgctgccgccagctgcccagctgcgcctcgtcgtcagagggttccctttcctgttcgatgtgacgcagccccccgctgcgccccgacggcggcggcctcaccggctggcgatgggcacgacaaactgagacctccctttccacccaagttctctttcctccttctctctctctctccctctctctgcggaaggtggcggtgctgcactctgttggtacaagagtctggagtgcagtgcagatccacccggccggacctggatcgatatctccgtttgttggttctttccatcgtgcaggttcaataaaaccaataaattctggggttcaactgaacccccaatccgagtataacggccactctgtgctgcaaggtttgtctaagattttcgtgcaataacggccatgtggaggctcaagcagttcatccccaaggagcagcccagccccagcggcctcgagggtcggacggtcgatgttggcaatgtcaaggtgcacgtccgagaggccattgctgagggacgaggagtcgctgaacctggtccagaaggagatcacggtgatgcggtcgctcaaggggcaccctaatgtggtcacactggttgcacacgccatactggacatgggacggatgagggaggcactgctgctcatggagttctgcgggaagtcactggtttctgtgttggagggcagaggagcaggttactttgatgaggagaaggtggcgctgatcttccgggatgtttgcaatgctgtctttgcgatgcattgccagacgccacctcttgctcacaggctcttgggtgtctcttgtatagaatttgctacttcaaatcagcatttgatggagaatcaaagctccaaatacttaacgggaactatcgcatcccagaattgccgaagtacagtgtggttccgtattaatgagttacttccattggagctgcaaaaggatttacctgatggatctccatctggatcagcatttgaatctcacactgccactgatgaagtatcaatgaggccacagcagatgagtggctcttcatcaagagagaatatcaagaatacctctcttagtgattcttccaacataatggtacaaagtcctctgaaagctatagggaacatgggttctatgggtgcattttggtcaactcaacatgctcaggagctatcttttgctgatgacaaggagccagcttttgataaagagcccattgatcaagtcagatcaaagcaatcacaggctaagaaccagaacacagcagctcgcaattcatctcggaagtctctgtctgcatcagttgatagttcccctggggatttcgaaattaggttttctgcaaatggctcggagtctaggttggaggaaaccaaaacggtaataacagagaataaaacaaagatacaaactactgccttcaactcctgtgcgtcagactttgataatatcaaaatgaactcacgaaacactactgacagtataaacataactagcaaattgaaagagcttcaattggaagcagaagtaactttactcaaggaacaattaaagatagcaaacctggagaaggaagaaatttcgttgaagtttgataagttgtctgccatttgctcctctcagaggcgagagatacaagagcttaagcaagctttggctgcagcttatgttacgccaccagctaaacagttcagagaaaattcaagtgttgaagtcaccccacccagcaaaagcctcgacactccgccgagggagaagattgaaggaacccctccagagctccggcaaggcctgtttacttcaagcccaggaacaccaagccctgacctgaaaacatggtcagctttccttgaagagccaaaatctcaagcagctgtgaagagtgtccaccccaggtcagtccgaactctgcgtgcatcaaacagcaacaaagccagctcgttgggacagtcaaatataagttctagcaccgatccatttgcgtttggtcaagatagttttaaggctgctccttctggaactgtacttcccctgttatcaaacatggggaatacttctcagctcagtaatctgaatatagaagaaaagaaagacggatcctaccaaccagatggatggactgggttttgattgtgctatagtaatttatgtgccaaaagagtcaagagttcatatggtcttggtggtgtggtatactgaaggtgcagagaggaatgcctgaactggtgtaggtatgtgtgacaatgctttttgtacaattgttctggtcctgagctagcatcgtgatgcgttcagttgtaactgtagtgcaaatgtaagttgcaacttgcaattaattgctagatattagatataggaagatgtttttttttcttatgtagacaagcttgtggtgtcatgaattttggaggcatgctatatagatatagccatctattataccatatcatgaataaagggttatcatttagtgacaattggccaatatactcactttaatactattcatgt

SEQ ID NO: 217176 - DNA, 2739 bp, Zea Mays
gggaggggttcctttcttctcccaccgtcgctgccgccagctgcccagctgcgcctcgtcgtcagagggttccctttcctgttcgatgtgacgcagccccccgctgcgccccgacggcggcggcctcaccggctggcgatgggcacgacaaactgagacctccctttccacccaagttctctttcctccttctctctctctctccctctctctgcggaaggtggcggtgctgcactctgttggtacaagagtctggagtgcagtgcagatccacccggccggacctggatcgatatctccgtttgttggttctttccatcgtgcaggttcaataaaaccaataaattctggggttcaactgaacccccaatccgagtataacggccactctgtgctgcaaggtttgtctaagattttcgtgcaataacggccatgtggaggctcaagcagttcatccccaaggagcagcccagccccagcggcctcgagggtcggacggtcgatgttggcaatgtcaaggtgcacgtccgagaggccattgctgagggtgggttctcatctgtctatgctgctcgagacctggtaaacccagcgaagcagtacgccctcaagcgcgtgattgtccaggacgaggagtcgctgaacctggtccagaaggagatcacggtgatgcggtcgctcaaggggcaccctaatgtggtcacactggttgcacacgccatactggacatgggacggatgagggaggcactgctgctcatggagttctgcgggaagtcactggtttctgtgttggagggcagaggagcaggttactttgatgaggagaaggtggcgctgatcttccgggatgtttgcaatgctgtctttgcgatgcattgccagacgccacctcttgctcacaggctcttgggtgtctcttgtatagaatttgctacttcaaatcagcatttgatggagaatcaaagctccaaatacttaacgggaactatcgcatcccagaattgccgaagtacagttcttctattacaacacttatcaaagacatgcttaattcttctccagatgccagaccggacatcacacaggcaagggctttgcttgattggccattcacttccatgaacttaggtgtggttccgtattaatgagttacttccattggagctgcaaaaggatttacctgatggatctccatctggatcagcatttgaatctcacactgccactgatgaagtatcaatgaggccacagcagatgagtggctcttcatcaagagagaatatcaagaatacctctcttagtgattcttccaacataatggtacaaagtcctctgaaagctatagggaacatgggttctatgggtgcattttggtcaactcaacatgctcaggagctatcttttgctgatgacaaggagccagcttttgataaagagcccattgatcaagtcagatcaaagcaatcacaggctaagaaccagaacacagcagctcgcaattcatctcggaagtctctgtctgcatcagttgatagttcccctggggatttcgaaattaggttttctgcaaatggctcggagtctaggttggaggaaaccaaaacggtaataacagagaataaaacaaagatacaaactactgccttcaactcctgtgcgtcagactttgataatatcaaaatgaactcacgaaacactactgacagtataaacataactagcaaattgaaagagcttcaattggaagcagaagtaactttactcaaggaacaattaaagatagcaaacctggagaaggaagaaatttcgttgaagtttgataagttgtctgccatttgctcctctcagaggcgagagatacaagagcttaagcaagctttggctgcagcttatgttacgccaccagctaaacagttcagagaaaattcaagtgttgaagtcaccccacccagcaaaagcctcgacactccgccgagggagaagattgaaggaacccctccagagctccggcaaggcctgtttacttcaagcccaggaacaccaagccctgacctgaaaacatggtcagctttccttgaagagccaaaatctcaagcagctgtgaagagtgtccaccccaggtcagtccgaactctgcgtgcatcaaacagcaacaaagccagctcgttgggacagtcaaatataagttctagcaccgatccatttgcgtttggtcaagatagttttaaggctgctccttctggaactgtacttcccctgttatcaaacatggggaatacttctcagctcagtaatctgaatatagaagaaaagaaagacggatcctaccaaccagatggatggactgggttttgattgtgctatagtaatttatgtgccaaaagagtcaagagttcatatggtcttggtggtgtggtatactgaaggtgcagagaggaatgcctgaactggtgtaggtatgtgtgacaatgctttttgtacaattgttctggtcctgagctagcatcgtgatgcgttcagttgtaactgtagtgcaaatgtaagttgcaacttgcaattaattgctagatattagatataggaagatgtttttttttcttatgtagacaagcttgtggtgtcatgaattttggaggcatgctatatagatatagccatctattataccatatcatgaataaagggttatcatttagtgacaattggccaatatactcactttaatactattcatgt

SEQ ID NO: 217177 - DNA, 2695 bp, Zea Mays
ggaggggttcctttcttctcccaccgtcgctgccgccagctgcccagctgcgcctcgtcgtcagagggttccctttcctgttcgatgtgacgcagccccccgctgcgccccgacggcggcggcctcaccggctggcgatgggcacgacaaactgagacctccctttccacccaagttctctttcctccttctctctctctctccctctctctgcggaaggtggcggtgctgcactctgttggtacaagagtctggagtgcagtgcagatccacccggccggacctggatcgatatctccgtttgttggttctttccatcgtgcaggttcaataaaaccaataaattctggggttcaactgaacccccaatccgagtataacggccactctgtgctgcaaggtttgtctaagattttcgtgcaataacggccatgtggaggctcaagcagttcatccccaaggagcagcccagccccagcggcctcgagggtcggacggtcgatgttggcaatgtcaaggtgcacgtccgagaggccattgctgagggtgggttctcatctgtctatgctgctcgagacctggtaaacccagcgaagcagtacgccctcaagcgcgtgattgtccaggacgaggagtcgctgaacctggtccagaaggagatcacggtgatgcggtcgctcaaggggcaccctaatgtggtcacactggttgcacacgccatactggacatgggacggatgagggaggcactgctgctcatggagttctgcgggaagtcactggtttctgtgttggagggcagaggagcaggttactttgatgaggagaaggtggcgctgatcttccgggatgtttgcaatgctgtctttgcgatgcattgccagacgccacctcttgctcacaggctcttgggtgtctcttgtatagaatttgctacttcaaatcagcatttgatggagaatcaaagctccaaatacttaacgggaactatcgcatcccagaattgccgaagtacagttcttctattacaacacttatcaaagacatgcttaattcttctccagatgccagaccggacatcacacaggtgtggttccgtattaatgagttacttccattggagctgcaaaaggatttacctgatggatctccatctggatcagcatttgaatctcacactgccactgatgaagtatcaatgaggccacagcagatgagtggctcttcatcaagagagaatatcaagaatacctctcttagtgattcttccaacataatggtacaaagtcctctgaaagctatagggaacatgggttctatgggtgcattttggtcaactcaacatgctcaggagctatcttttgctgatgacaaggagccagcttttgataaagagcccattgatcaagtcagatcaaagcaatcacaggctaagaaccagaacacagcagctcgcaattcatctcggaagtctctgtctgcatcagttgatagttcccctggggatttcgaaattaggttttctgcaaatggctcggagtctaggttggaggaaaccaaaacggtaataacagagaataaaacaaagatacaaactactgccttcaactcctgtgcgtcagactttgataatatcaaaatgaactcacgaaacactactgacagtataaacataactagcaaattgaaagagcttcaattggaagcagaagtaactttactcaaggaacaattaaagatagcaaacctggagaaggaagaaatttcgttgaagtttgataagttgtctgccatttgctcctctcagaggcgagagatacaagagcttaagcaagctttggctgcagcttatgttacgccaccagctaaacagttcagagaaaattcaagtgttgaagtcaccccacccagcaaaagcctcgacactccgccgagggagaagattgaaggaacccctccagagctccggcaaggcctgtttacttcaagcccaggaacaccaagccctgacctgaaaacatggtcagctttccttgaagagccaaaatctcaagcagctgtgaagagtgtccaccccaggtcagtccgaactctgcgtgcatcaaacagcaacaaagccagctcgttgggacagtcaaatataagttctagcaccgatccatttgcgtttggtcaagatagttttaaggctgctccttctggaactgtacttcccctgttatcaaacatggggaatacttctcagctcagtaatctgaatatagaagaaaagaaagacggatcctaccaaccagatggatggactgggttttgattgtgctatagtaatttatgtgccaaaagagtcaagagttcatatggtcttggtggtgtggtatactgaaggtgcagagaggaatgcctgaactggtgtaggtatgtgtgacaatgctttttgtacaattgttctggtcctgagctagcatcgtgatgcgttcagttgtaactgtagtgcaaatgtaagttgcaacttgcaattaattgctagatattagatataggaagatgtttttttttcttatgtagacaagcttgtggtgtcatgaattttggaggcatgctatatagatatagccatctattataccatatcatgaataaagggttatcatttagtgacaattggccaatatactcactttaatactattcatgt

SEQ ID NO: 217178 - DNA, 2924 bp, Zea Mays
gttcctttcttctcccaccgtcgctgccgccagctgcccagctgcgcctcgtcgtcagagggttccctttcctgttcgatgtgacgcagccccccgctgcgccccgacggcggcggcctcaccggctggcgatgggcacgacaaactgagacctccctttccacccaagttctctttcctccttctctctctctctccctctctctgcggaaggtggcggtgctgcactctgttggtacaagagtctggagtgcagtgcagatccacccggccggacctggatcgatatctccgtttgttggttcaataaaaccaataaattctggggttcaactgaacccccaatccgagtataacggccactctgtgctgcaaggtttgtctaagattttcgtgcaataacggccatgtggaggctcaagcagttcatccccaaggagcagcccagccccagcggcctcgagggtcggacggtcgatgttggcaatgtcaaggtgcacgtccgagaggccattgctgagggtgggttctcatctgtctatgctgctcgagacctggtaaacccagcgaagcagtacgccctcaagcgcgtgattgtccaggacgaggagtcgctgaacctggtccagaaggagatcacggtgatgcggtcgctcaaggggcaccctaatgtggtcacactggttgcacacgccatactggacatgggacggatgagggaggcactgctgctcatggagttctgcgggaagtcactggtttctgtgttggagggcagaggagcaggttactttgatgaggagaaggtggcgctgatcttccgggatgtttgcaatgctgtctttgcgatgcattgccagacgccacctcttgctcacaggctcttgggtgtctcttgtatagaatttgctacttcaaatcagcatttgatggagaatcaaagctccaaatacttaacgggaactatcgcatcccagaattgccgaagtacagttcttctattacaacacttatcaaagacatgcttaattcttctccagatgccagaccggacatcacacaggtgtggttccgtattaatgagttacttccattggagctgcaaaaggatttacctgatggatctccatctggatcagcatttgaatctcacactgccactgatgaaggtttgcttattagcatattagcttttgtggaggaaatcattctctgctgtgtacctgattactgtttatctagtagatttatctagataaatattaggaggtgtaggaatgttgttgtgtggaatctcatattgtgtaaatagaaagccgtctgttttgttaattgctcatattgtttctctacatcttaaattttccttggcctgaaaataatacttctagtttgttcaatgacctaaattatttgttgcagtatcaatgaggccacagcagatgagtggctcttcatcaagagagaatatcaagaatacctctcttagtgattcttccaacataatggtacaaagtcctctgaaagctatagggaacatgggttctatgggtgcattttggtcaactcaacatgctcaggagctatcttttgctgatgacaaggagccagcttttgataaagagcccattgatcaagtcagatcaaagcaatcacaggctaagaaccagaacacagcagctcgcaattcatctcggaagtctctgtctgcatcagttgatagttcccctggggatttcgaaattaggttttctgcaaatggctcggagtctaggttggaggaaaccaaaacggtaataacagagaataaaacaaagatacaaactactgccttcaactcctgtgcgtcagactttgataatatcaaaatgaactcacgaaacactactgacagtataaacataactagcaaattgaaagagcttcaattggaagcagaagtaactttactcaaggaacaattaaagatagcaaacctggagaaggaagaaatttcgttgaagtttgataagttgtctgccatttgctcctctcagaggcgagagatacaagagcttaagcaagctttggctgcagcttatgttacgccaccagctaaacagttcagagaaaattcaagtgttgaagtcaccccacccagcaaaagcctcgacactccgccgagggagaagattgaaggaacccctccagagctccggcaaggcctgtttacttcaagcccaggaacaccaagccctgacctgaaaacatggtcagctttccttgaagagccaaaatctcaagcagctgtgaagagtgtccaccccaggtcagtccgaactctgcgtgcatcaaacagcaacaaagccagctcgttgggacagtcaaatataagttctagcaccgatccatttgcgtttggtcaagatagttttaaggctgctccttctggaactgtacttcccctgttatcaaacatggggaatacttctcagctcagtaatctgaatatagaagaaaagaaagacggatcctaccaaccagatggatggactgggttttgattgtgctatagtaatttatgtgccaaaagagtcaagagttcatatggtcttggtggtgtggtatactgaaggtgcagagaggaatgcctgaactggtgtaggtatgtgtgacaatgctttttgtacaattgttctggtcctgagctagcatcgtgatgcgttcagttgtaactgtagtgcaaatgtaagttgcaacttgcaattaattgctagatattagatataggaagatgtttttttttcttatgtagacaagcttgtggtgtcatgaattttggaggcatgctatatagatatagccatctattataccatatcatgaataaagggttatcatttagtgacaattggccaatatactcactttaatactattcatgt

SEQ ID NO: 217179 - DNA, 2967 bp, Zea Mays
gttcctttcttctcccaccgtcgctgccgccagctgcccagctgcgcctcgtcgtcagagggttccctttcctgttcgatgtgacgcagccccccgctgcgccccgacggcggcggcctcaccggctggcgatgggcacgacaaactgagacctccctttccacccaagttctctttcctccttctctctctctctccctctctctgcggaaggtggcggtgctgcactctgttggtacaagagtctggagtgcagtgcagatccacccggccggacctggatcgatatctccgtttgttggttcaataaaaccaataaattctggggttcaactgaacccccaatccgagtataacggccactctgtgctgcaaggtttgtctaagattttcgtgcaataacggccatgtggaggctcaagcagttcatccccaaggagcagcccagccccagcggcctcgagggtcggacggtcgatgttggcaatgtcaaggtgcacgtccgagaggccattgctgagggtgggttctcatctgtctatgctgctcgagacctggtaaacccagcgaagcagtacgccctcaagcgcgtgattgtccaggacgaggagtcgctgaacctggtccagaaggagatcacggtgatgcggtcgctcaaggggcaccctaatgtggtcacactggttgcacacgccatactggacatgggacggatgagggaggcactgctgctcatggagttctgcgggaagtcactggtttctgtgttggagggcagaggagcaggttactttgatgaggagaaggtggcgctgatcttccgggatgtttgcaatgctgtctttgcgatgcattgccagacgccacctcttgctcacaggctcttgggtgtctcttgtatagaatttgctacttcaaatcagcatttgatggagaatcaaagctccaaatacttaacgggaactatcgcatcccagaattgccgaagtacagttcttctattacaacacttatcaaagacatgcttaattcttctccagatgccagaccggacatcacacaggcaagggctttgcttgattggccattcacttccatgaacttaggtgtggttccgtattaatgagttacttccattggagctgcaaaaggatttacctgatggatctccatctggatcagcatttgaatctcacactgccactgatgaaggtttgcttattagcatattagcttttgtggaggaaatcattctctgctgtgtacctgattactgtttatctagtagatttatctagataaatattaggaggtgtaggaatgttgttgtgtggaatctcatattgtgtaaatagaaagccgtctgttttgttaattgctcatattgtttctctacatcttaaattttccttggcctgaaaataatacttctagtttgttcaatgacctaaattatttgttgcagtatcaatgaggccacagcagatgagtggctcttcatcaagagagaatatcaagaatacctctcttagtgattcttccaacataatggtacaaagtcctctgaaagctatagggaacatgggttctatgggtgcattttggtcaactcaacatgctcaggagctatcttttgctgatgacaaggagccagcttttgataaagagcccattgatcaagtcagatcaaagcaatcacaggctaagaaccagaacacagcagctcgcaattcatctcggaagtctctgtctgcatcagttgatagttcccctggggatttcgaaattaggttttctgcaaatggctcggagtctaggttggaggaaaccaaaacggtaataacagagaataaaacaaagatacaaactactgccttcaactcctgtgcgtcagactttgataatatcaaaatgaactcacgaaacactactgacagtataaacataactagcaaattgaaagagcttcaattggaagcagaagtaactttactcaaggaacaattaaagatagcaaacctggagaaggaagaaatttcgttgaagtttgataagttgtctgccatttgctcctctcagaggcgagagatacaagagcttaagcaagctttggctgcagcttatgttacgccaccagctaaacagttcagagaaaattcaagtgttgaagtcaccccacccagcaaaagcctcgacactccgccgagggagaagattgaaggaacccctccagagctccggcaaggcctgtttacttcaagcccaggaacaccaagccctgacctgaaaacatggtcagctttccttgaagagccaaaatctcaagcagctgtgaagagtgtccaccccaggtcagtccgaactctgcgtgcatcaaacagcaacaaagccagctcgttgggacagtcaaatataagttctagcaccgatccatttgcgtttggtcaagatagttttaaggctgctccttctggaactgtacttcccctgttatcaaacatggggaatacttctcagctcagtaatctgaatatagaagaaaagaaagacggatcctaccaaccagatggatggactgggttttgattgtgctatagtaatttatgtgccaaaagagtcaagagttcatatggtcttggtggtgtggtatactgaaggtgcagagaggaatgcctgaactggtgtaggtatgtgtgacaatgctttttgtacaattgttctggtcctgagctagcatcgtgatgcgttcagttgtaactgtagtgcaaatgtaagttgcaacttgcaattaattgctagatattagatataggaagatgtttttttttcttatgtagacaagcttgtggtgtcatgaattttggaggcatgctatatagatatagccatctattataccatatcatgaataaagggttatcatttagtgacaattggccaatatactcactttaatactattcatgt

SEQ ID NO: 217180 - DNA, 2559 bp, Zea Mays
ttcttctcccaccgtcgctgccgccagctgcccagctgcgcctcgtcgtcagagggttccctttcctgttcgatgtgacgcagccccccgctgcgccccgacggcggcggcctcaccggctggcgatgggcacgacaaactgagacctccctttccacccaagttctctttcctccttctctctctctctccctctctctgcggaaggtggcggtgctgcactctgttggtacaagagtctggagtgcagtgcagatccacccggccggacctggatcgatatctccgtttgttggttcaataaaaccaataaattctggggttcaactgaacccccaatccgagtataacggccactctgtgctgcaaggtttgtctaagattttcgtgcaataacggccatgtggaggctcaagcagttcatccccaaggagcagcccagccccagcggcctcgagggtcggacggtcgatgttggcaatgtcaaggtgcacgtccgagaggccattgctgagggtgggttctcatctgtctatgctgctcgagacctggtaaacccagcgaagcagtacgccctcaagcgcgtgattgtccaggacgaggagtcgctgaacctggtccagaaggagatcacggtgatgcggtcgctcaaggggcaccctaatgtggtcacactggttgcacacgccatactggacatgggacggatgagggaggcactgctgctcatggagttctgcgggaagtcactggtttctgtgttggagggcagaggagcaggttactttgatgaggagaaggtggcgctgatcttccgggatgtttgcaatgctgtctttgcgatgcattgccagacgccacctcttgctcacaggctcttgggtgtctcttgtatagaatttgctacttcaaatcagcatttgatggagaatcaaagctccaaatacttaacgggaactatcgcatcccagaattgccgaagtacagttcttctattacaacacttatcaaagacatgcttaattcttctccagatgccagaccggacatcacacagtatcaatgaggccacagcagatgagtggctcttcatcaagagagaatatcaagaatacctctcttagtgattcttccaacataatggtacaaagtcctctgaaagctatagggaacatgggttctatgggtgcattttggtcaactcaacatgctcaggagctatcttttgctgatgacaaggagccagcttttgataaagagcccattgatcaagtcagatcaaagcaatcacaggctaagaaccagaacacagcagctcgcaattcatctcggaagtctctgtctgcatcagttgatagttcccctggggatttcgaaattaggttttctgcaaatggctcggagtctaggttggaggaaaccaaaacggtaataacagagaataaaacaaagatacaaactactgccttcaactcctgtgcgtcagactttgataatatcaaaatgaactcacgaaacactactgacagtataaacataactagcaaattgaaagagcttcaattggaagcagaagtaactttactcaaggaacaattaaagatagcaaacctggagaaggaagaaatttcgttgaagtttgataagttgtctgccatttgctcctctcagaggcgagagatacaagagcttaagcaagctttggctgcagcttatgttacgccaccagctaaacagttcagagaaaattcaagtgttgaagtcaccccacccagcaaaagcctcgacactccgccgagggagaagattgaaggaacccctccagagctccggcaaggcctgtttacttcaagcccaggaacaccaagccctgacctgaaaacatggtcagctttccttgaagagccaaaatctcaagcagctgtgaagagtgtccaccccaggtcagtccgaactctgcgtgcatcaaacagcaacaaagccagctcgttgggacagtcaaatataagttctagcaccgatccatttgcgtttggtcaagatagttttaaggctgctccttctggaactgtacttcccctgttatcaaacatggggaatacttctcagctcagtaatctgaatatagaagaaaagaaagacggatcctaccaaccagatggatggactgggttttgattgtgctatagtaatttatgtgccaaaagagtcaagagttcatatggtcttggtggtgtggtatactgaaggtgcagagaggaatgcctgaactggtgtaggtatgtgtgacaatgctttttgtacaattgttctggtcctgagctagcatcgtgatgcgttcagttgtaactgtagtgcaaatgtaagttgcaacttgcaattaattgctagatattagatataggaagatgtttttttttcttatgtagacaagcttgtggtgtcatgaattttggaggcatgctatatagatatagccatctattataccatatcatgaataaagggttatcatttagtgacaattggccaatatactcactttaatactattcatgt

SEQ ID NO: 217181 - DNA, 928 bp, Zea Mays
atgtggagctactcctggctggagttccagcagctcaatgacatctacaggttcaaggcggaggagtactcgcacacgtctgttaacaagttcaacgtgaacccggagtccatcccgggctgtggatccgggagcaaaaaccgtgtcaactgcgcccgtgcgggtgagggatcactagaggctggactcgcgctagagatggtcaaggcaaaagcaagggttcgctatgagcctggaccggcttttgaggaggtcaaagaagaagccatgcttgatatatcaccaacagactcgacagagttttggttaattcagtggcctaaagaccagtgctattttctcatgtttgagattcttcaattccaggcaaatagaattttaaggcaaaagattgctggggatcagtttctcgatcttgttagtgttgaaacagaagtgcgctcagtttacaaagagctctacagcatttacaaaactaccctcaaatccaagagtttaataaatgagccgaggatcatcataaaaccaaaatcctgcaatggtgtttggccattgtgcactgcacaacagatctgctatcatgttcttggccttgttcatggcatatggacacccgttcctcaagctgtggaagattacattgcaactccaaaacctaatggctaccaaagcctacacacaacagtgataccatttttaatgagaataagaacagaagatatggatttaatagcagaaagaggcattgctacacattacagtggaagaggagtggtttctggacctgttcggcttggaatatcaagtggaagaaatgccaaggggaaagtaatctgcctgaacaacacaggctttgctctgaggattggttggctcaatgcaatccgcgagtggcaagaaaagtttgttggtaatatgagttctaggg

SEQ ID NO: 217182 - DNA, 3074 bp, Zea Mays
gtcatcatcattattatcatctgaccctctttttttttcactctcactcccatgtttttattcccgggcggggccgtgtgggtgtgggttgggatggccggattggggtcccggggtggagaaatgacaaatccaggcccgcaggcggccacccaccaaatcggacgacgcagggtgcccaaatcaggaaggattttaaggttaaccggccaccggcggtgaccgacgccccaccccactctccttctcctattctatctatatatcacccgcctcttttttctccctcactccgccacaccttccctcttcttcctcagctccgtcgcccaccgccggagctccgaaaggccccgcgcccgccgcctttcctgtaaaaaacccaacctttagctagctaaccgctcctcttctccccctactccccttgcccaaatcagagaagatatttaacggaggaggggaaggagaggatatttagctgattgttgattggtggtccggggtacggtgttcttgagtcgtgaagcgaccgtacagtggctagggccgtctccgggttgcgtgcaggatggtcgtcagagatcgggagtgaggaggcagctcgtggtcgtggaggctaaatgtaccgcaagaacgactcggcactctcctgtttctacctcttcctcctctggttcttcttcttgaaatagaccagcgccagccaccaggtagctacctactagctagcagcccagttgcgactggggacgggctgctgcttgcaagttggaatcttggagcaggagcagaggagcgggagatggagctggatctgaacgtggccgaggtggcgccggagaagccatcggcggcgctggaggcgagcgactcggggtcctcgggctcgtcggtgctgaacgcggaggcggcatcggcgggcggcggggggcccgcgccgggggaggaggggtcaagctcgacgccggccgtgctcgagttcagcatcctcaggagcgacagcgacgcggccggcgcggacgccgacgacggcgacgccacgccgtcgccacctcgccaccaccagcagcagctcgtcacccgggagctcttcccggcgccgcagcattgggccgagctcggcttcttccgcgccggcccgcagcagcagccggacatcagggtcctgccgcacccgcacccgtacccgcccccgccgccgcccgcgcagccgcagcaggccaagaagagccgccgcggcccgcgctcccgcagctcgcagtaccgcggcgtcaccttctaccgccgcaccggccgctgggagtcccacatctgggattgcgggaagcaggtgtacttaggtggattcgacactgctcatgccgctgcaagggcgtacgaccgagcggcgatcaagttccgcggcgtcgacgccgacataaacttcaacctcagcgactacgacgacgatatgaagcagatgaagagcctgtccaaggaggagttcgttcacgccctgcggcggcagagcaccggcttctcccgcggcagctccaagtacaggggcgtcaccctgcacaagtgcggccgctgggaggcgcgcatggggcagttcctcggcaagaagtacatatatcttgggctattcgacagcgaagtagaggctgcaagggcgtacgacaaggccgcgatcaaatgcaacggtagagaggccgtgacgaacttcgagcccagcacgtacgacggggagctgctgctgactgctgaagctagcgcagaagttgctgacgacgttgatctgaacttgagcatctcgcaaccggcatcgtcccagagccccaaaagagacaagaactgccttggtccgcagctccaccaccaccatgggcggccgtttgacggctccgccgttctgaagaaaaccaagatcgatgctccgtctgagctgtcgtcggcgggccgccctcaccggtcgttcctccctcatctcgtggctgccgagcatctaccgcctcggtctcaccccttcttcatcacacaccatgagagtgatgcatcaagaagagatcccagctgggcagcagcagcagcatggaaggtgaccgcagctgcacctcctcctcctaccaccaccctgttgccgttgccgctgccgtcgacgtcgtccgctgcagcatcatcaggattctccaataccgccacgacagctgccgccgccccatcggccgcctcctcccgccggttcgacccgccgccaccgtcgtcgtcctcctcctcgagccatcaccaccaccaccaccgccgctgagaatcgaagaagccacactgtaaatctgccgggaagcggctggtggcatccggcccgctcctccctccgggcgccgcaacttttttcgatcggttttgcgccgcccgggacgggttgtagttgatcgattggattcttcataactgtatttgcgtactgcttacactacccaagtgaaatcgaaaatggcgccttctctcgttgaataaattgcacgtacgctactcgatccgctgcggctcttgctggagtggccgccgccgctatagatagaaggatcaagccaaggaatctgtcatgcatgggcatgtgaaggaggagcctcctgcaatgtttagtcttttttggtcgacgcccaccagagatatacgcactagatttcatatagctgagctagatcgattccgttgcatgcatgctccatggcgtcgagattcgagctagcaccgcctgttcatcatcgaccgatccattctgatcgattcccctctcgagctttcacgaactgaacctacctagtgagggtgacgcctaacgcctagtgcgcgcgcgtgggtctccgatgtcagtggccgcacgcgcgcgcgcgttctcgagatcgcatgtggtcatagcgcagcaggtttgccctcagaacctacagcaactcgaccaccggtttggatttcttcttttttcaaggatatgatcggagagagagagctacctaggcgtcgtccttgttttcttgtatcgcatgtggtgtgggtctctctcctcctttcgtacgcacgcatgattccat

SEQ ID NO: 217183 - DNA, 3028 bp, Zea Mays
ccggattggggtcccggggtggagaaatgacaaatccaggcccgcaggcggccacccaccaaatcggacgacgcagggtgcccaaatcaggaaggattttaaggttaaccggccaccggcggtgaccgacgccccaccccactctccttctcctattctatctatatatcacccgcctcttttttctccctcactccgccacaccttccctcttcttcctcagctccgtcgcccaccgccggagctccgaaaggccccgcgcccgccgcctttcctgtaaaaaacccaacctttagctagctaaccgctcctcttctccccctactccccttgcccaaatcagagaagatatttaacggaggaggggaaggagaggatatttagctgattgttgattggtggtccggggtacggtgttcttgagtcgtgaagcgaccgtacagtggctagggccgtctccgggttgcgtgcaggatggtcgtcagagatcgggagtgaggaggcagctcgtggtcgtggaggctaaatgtaccgcaagaacgactcggcactctcctgtttctacctcttcctcctctggttcttcttcttgaaatagaccagcgccagccaccaggtagctacctactagctagcagcccagttgcgactggggacgggctgctgcttgcaagttggaatcttggagcaggagcagaggagcgggagatggagctggatctgaacgtggccgaggtggcgccggagaagccatcggcggcgctggaggcgagcgactcggggtcctcgggctcgtcggtgctgaacgcggaggcggcatcggcgggcggcggggggcccgcgccgggggaggaggggtcaagctcgacgccggccgtgctcgagttcagcatcctcaggagcgacagcgacgcggccggcgcggacgccgacgacggcgacgccacgccgtcgccacctcgccaccaccagcagcagctcgtcacccgggagctcttcccggcgccgcagcattgggccgagctcggcttcttccgcgccggcccgcagcagcagccggacatcagggtcctgccgcacccgcacccgtacccgcccccgccgccgcccgcgcagccgcagcaggccaagaagagccgccgcggcccgcgctcccgcagctcgcagtaccgcggcgtcaccttctaccgccgcaccggccgctgggagtcccacatctgggattgcgggaagcaggtgtacttaggtggattcgacactgctcatgccgctgcaagggcgtacgaccgagcggcgatcaagttccgcggcgtcgacgccgacataaacttcaacctcagcgactacgacgacgatatgaagcagatgaagagcctgtccaaggaggagttcgttcacgccctgcggcggcagagcaccggcttctcccgcggcagctccaagtacaggggcgtcaccctgcacaagtgcggccgctgggaggcgcgcatggggcagttcctcggcaagaagtacatatatcttgggctattcgacagcgaagtagaggctgcaagggttgagtaccgactcgatattcgattctccctgccgtttcgtgaccccagggcgtacgacaaggccgcgatcaaatgcaacggtagagaggccgtgacgaacttcgagcccagcacgtacgacggggagctgctgctgactgctgaagctagcgcagaagttgctgacgacgttgatctgaacttgagcatctcgcaaccggcatcgtcccagagccccaaaagagacaagaactgccttggtccgcagctccaccaccaccatgggcggccgtttgacggctccgccgttctgaagaaaaccaagatcgatgctccgtctgagctgtcgtcggcgggccgccctcaccggtcgttcctccctcatctcgtggctgccgagcatctaccgcctcggtctcaccccttcttcatcacacaccatgagagtgatgcatcaagaagagatcccagctgggcagcagcagcagcatggaaggtgaccgcagctgcacctcctcctcctaccaccaccctgttgccgttgccgctgccgtcgacgtcgtccgctgcagcatcatcaggattctccaataccgccacgacagctgccgccgccccatcggccgcctcctcccgccggttcgacccgccgccaccgtcgtcgtcctcctcctcgagccatcaccaccaccaccaccgccgctgagaatcgaagaagccacactgtaaatctgccgggaagcggctggtggcatccggcccgctcctccctccgggcgccgcaacttttttcgatcggttttgcgccgcccgggacgggttgtagttgatcgattggattcttcataactgtatttgcgtactgcttacactacccaagtgaaatcgaaaatggcgccttctctcgttgaataaattgcacgtacgctactcgatccgctgcggctcttgctggagtggccgccgccgctatagatagaaggatcaagccaaggaatctgtcatgcatgggcatgtgaaggaggagcctcctgcaatgtttagtcttttttggtcgacgcccaccagagatatacgcactagatttcatatagctgagctagatcgattccgttgcatgcatgctccatggcgtcgagattcgagctagcaccgcctgttcatcatcgaccgatccattctgatcgattcccctctcgagctttcacgaactgaacctacctagtgagggtgacgcctaacgcctagtgcgcgcgcgtgggtctccgatgtcagtggccgcacgcgcgcgcgcgttctcgagatcgcatgtggtcatagcgcagcaggtttgccctcagaacctacagcaactcgaccaccggtttggatttcttcttttttcaaggatatgatcggagagagagagctacctaggcgtcgtccttgttttcttgtatcgcatgtggtgtgggtctctctcctcctttcgtacgcacgcatgattccat

SEQ ID NO: 217184 - DNA, 2793 bp, Zea Mays
cactctccttctcctattctatctatatatcacccgcctcttttttctccctcactccgccacaccttccctcttcttcctcagctccgtcgcccaccgccggagctccgaaaggccccgcgcccgccgcctttcctgtaaaaaacccaacctttagctagctaaccgctcctcttctccccctactccccttgcccaaatcagagaagatatttaacggaggaggggaaggagaggatatttagctgattgttgattggtggtccggggtacggtgttcttgagtcgtgaagcgaccgtacagtggctagggccgtctccgggttgcgtgcaggatggtcgtcagagatcgggagtgaggaggcagctcgtggtcgtggaggctaaatgtaccgcaagaacgactcggcactctcctgtttctacctcttcctcctctggttcttcttcttgaaatagaccagcgccagccaccaggtagctacctactagctagcagcccagttgcgactggggacgggctgctgcttgcaagttggaatcttggagcaggagcagaggagcgggagatggagctggatctgaacgtggccgaggtggcgccggagaagccatcggcggcgctggaggcgagcgactcggggtcctcgggctcgtcggtgctgaacgcggaggcggcatcggcgggcggcggggggcccgcgccgggggaggaggggtcaagctcgacgccggccgtgctcgagttcagcatcctcaggagcgacagcgacgcggccggcgcggacgccgacgacggcgacgccacgccgtcgccacctcgccaccaccagcagcagctcgtcacccgggagctcttcccggcgccgcagcattgggccgagctcggcttcttccgcgccggcccgcagcagcagccggacatcagggtcctgccgcacccgcacccgtacccgcccccgccgccgcccgcgcagccgcagcaggccaagaagagccgccgcggcccgcgctcccgcagctcgcagtaccgcggcgtcaccttctaccgccgcaccggccgctgggagtcccacatctgggattgcgggaagcaggtgtacttaggtggattcgacactgctcatgccgctgcaagggcgtacgaccgagcggcgatcaagttccgcggcgtcgacgccgacataaacttcaacctcagcgactacgacgacgatatgaagcagatgaagagcctgtccaaggaggagttcgttcacgccctgcggcggcagagcaccggcttctcccgcggcagctccaagtacaggggcgtcaccctgcacaagtgcggccgctgggaggcgcgcatggggcagttcctcggcaagaaggcgtacgacaaggccgcgatcaaatgcaacggtagagaggccgtgacgaacttcgagcccagcacgtacgacggggagctgctgctgactgctgaagctagcgcagaagttgctgacgacgttgatctgaacttgagcatctcgcaaccggcatcgtcccagagccccaaaagagacaagaactgccttggtccgcagctccaccaccaccatgggcggccgtttgacggctccgccgttctgaagaaaaccaagatcgatgctccgtctgagctgtcgtcggcgggccgccctcaccggtcgttcctccctcatctcgtggctgccgagcatctaccgcctcggtctcaccccttcttcatcacacaccatgagagtgatgcatcaagaagagatcccagctgggcagcagcagcagcatggaaggtgaccgcagctgcacctcctcctcctaccaccaccctgttgccgttgccgctgccgtcgacgtcgtccgctgcagcatcatcaggattctccaataccgccacgacagctgccgccgccccatcggccgcctcctcccgccggttcgacccgccgccaccgtcgtcgtcctcctcctcgagccatcaccaccaccaccaccgccgctgagaatcgaagaagccacactgtaaatctgccgggaagcggctggtggcatccggcccgctcctccctccgggcgccgcaacttttttcgatcggttttgcgccgcccgggacgggttgtagttgatcgattggattcttcataactgtatttgcgtactgcttacactacccaagtgaaatcgaaaatggcgccttctctcgttgaataaattgcacgtacgctactcgatccgctgcggctcttgctggagtggccgccgccgctatagatagaaggatcaagccaaggaatctgtcatgcatgggcatgtgaaggaggagcctcctgcaatgtttagtcttttttggtcgacgcccaccagagatatacgcactagatttcatatagctgagctagatcgattccgttgcatgcatgctccatggcgtcgagattcgagctagcaccgcctgttcatcatcgaccgatccattctgatcgattcccctctcgagctttcacgaactgaacctacctagtgagggtgacgcctaacgcctagtgcgcgcgcgtgggtctccgatgtcagtggccgcacgcgcgcgcgcgttctcgagatcgcatgtggtcatagcgcagcaggtttgccctcagaacctacagcaactcgaccaccggtttggatttcttcttttttcaaggatatgatcggagagagagagctacctaggcgtcgtccttgttttcttgtatcgcatgtggtgtgggtctctctcctcctttcgtacgcacgcatgattccat

SEQ ID NO: 217185 - DNA, 1115 bp, Zea Mays
tctcattcaagtgctgtaaacatataacccaaatatgatcatttttttgtgttctcattatttcttttctaagaagtaagacccaaccagggttttttgtccatcattaagtgattgttgctgattgaatacagaagttacagaagaagaagctgaagaaaaattgcaagacacaataagggagaggttttcgtcctttggtgaggattaccatgctgttgatattctattagcagagattgatgtgtatgaactttttgctttcaagcattgtgtgggaagaaggatacagcttgccctttgtaaaggttttctagtgctgtgaactccaccatttcaagtctgcaccctgtccaatgcacccgcgaaaggaaggtcgacgtgcagctagacttgacaacacttcctgcttttctagctgtatttttgttgctttggtttcttctacgtccaaggagaccgaagcctaagatcaactgaacaccgagccaatgagcagcataggccatagagtttttgtgaatacgcgcatggattacagatggcgctggagcatggcccgggaattccaaaggtccaaaacaccgggtggcagggaacaaggtttcagaagattgcaatcctgacacatccccaagttgtagcagagttggaatgtcatgaaaactttaattcattcagtcctgtcctcgttccgggtttagccaattcttcctcgttccgggtaaggccttgttcgtttgtgtcggattggtgggtcggaacaattcccggccggattgcttctctaatttatataaactttgattagccggaacgattccgggtgcaatccgacgcaaacgaacaagccctaactgagattaatttgtccttgctgtaatgtttagccagtcctgccccgatccggggaactgagagattgtctttatcgcaacattaacggctagcggttagtatcatcttccagtcacctggaatgttactagtacaatccaattgtctgtttcctgccgcttacatgtaaaagtccatactcaagttttacagaaagaaacatgttctgtcatttattacaaaataaagccaaatagtaaaatgttatgtgtacgtag

SEQ ID NO: 217186 - DNA, 4314 bp, Zea Mays
taggaagagagaaaagggcgagagctcatcgaagaaaagcgagactggagtttctctctcccacccaaccctcttccttccaccccatccccgcttctctctcgcctccgcttcgctcgcgcgagagggggccgacgacggaactctaggattcgcgcccgcccgcgcggccaagccaccaggatcgcgctccgcggactcgagggcgctagccaagctccagggcgcgcggatcgtgcaccgggcggggccggttaccgccgccatgtcatcgctcacccgcgacatcgtcttcctcgtcctccagttcctagacgaggagaagtttaaggagaccatgcataagtttgagcaagagtcggggttcttcttcaatatgaagtactttgaagcgaagggccatgctggggactgggatgaggtggagaaatacttgtcaggtttcaccaagatagatgacaataattattcgatgaagatcttctttgagattaggaaacagaagtatttggaagcgcttgataggcatgatggagcaaaggctttagatattcttgttaaggatcttaaagtcttttcgacattcaatgaggagtcatataaggaaataacacagcttctcacttttgagaattttagggaaaatgaacagttgtctaattatggggatactaaatcagctcgaactgttatgctggttgaactaaaaaaactcattaaagccaaccctcttctccaggaaaaacttgtcttcccgactcttaaggcatcacgcctccgaactttaattaatcaaagcttgaattggcagcatcaacattgtaagaatcctcgtccaaatccagatatcaaaactttattcactgaccatacatgtactttacccaatggagctcctgcatcacgggtatctgtaccactggcagctgttccaaagccactccaacttcctccacctagtccatctttagctcgttggctgacgaatacagccgtcccttcatctgttcagtctgctgttgtagcagcctcgtcaatacctgttccacccaatcaagttgtctccatgttgaaacgcccaactataacagactatcaaagtgcagtgcctgagcaactaatgaagcgcttgaggcctggtggacatggcattggtgagaccacatatcctactcccattcctcaacgtgcatggtcaatggatgatcttccaaggacagttgcttgttcattgtcacatggatctaatgtaactagcatggattttcatccaactcgccatacactgcttctagtgggatctgctaatggtgaatttacactttatgagatcggtctgcgtcaaacattactttcaaagccctttaaaattctggatacaaatgcatgctcaccacaatttcagaatgctgttgttaaagacccccccatgtccattaatcgagttacctggagccctcatggagaattgattggagttgcattcacaaaatatttgatccgtgtatatgcatatcaaccaccaaatgagacacgacatgttctagagattgttgctcattctggaggtgtaaatgatatagcattctcacgaccaaacaagcaactttgtgtggtcacctgtggagatgataaactgataaaggtatggaatatgcatggacagaaattatttacatttgaagggcacaaggcgcctgtgtattctatatgtgcgcatcacaaacagagtattcagtttaaatttagggattatggctatggagtttctactgcgactatggcatacaatatagtgatatgcctattcaagtggaaaaaagggaggtccgcatgtggatgacttttaagtgaacaaatgttgattttagcagtatttatgttcatcttctcaacttcccttgatggaaaaattaaggcctggctttatgacaatgtgggatctagggtggactatgaagctcctggcaagtggtgtactactttgctatatagtgctgatgggactaggttgttctcatgtggaacaagcaaagagggagactcatatttggttcagtggaatgaaaatgatggatctatcaagaggacatattctggattccgtaagaggtcagctggtgttgctggtgtagtgcagtttgatatagctcagaatcacattttggctgctggtgaagataacaagattaaattttgggatgttgataataataatatgctgatctgcaccgacgctgaaggaggcctcccagctcttcctcgcttgaggttcaataaagaaggcaatcttcttgctgttactacagtggacaatggttttaagatacttgcaaatgctgatggactcagaaatctacgcgcattaggtagcaggcctcctttcgaagcatttaggctacaatacgaagatgcttctatgaaggtctcaggtgctcctgttgttgctaccatatctcctaacataggccgaatggatcacttggataggaattctcctgcaaagccatctcctatgctgactggtggcgatacagcatcaagaagcatagatataaaggcaagaatctcagaagaaaagtctgataaagcaaaagcttcggaactaatggaggttctaaatccccaacaatgccgtgtagcaacaatgccagaaactcccgatcaggctagaaaggttgtccgacttctgtacacaaattctggtgttgggttgctagcactagggtcaaacgccattcaaaggctatggaaatggagtcgaaacgagcaaaatcctagtggaaaagccacagccagtgttgtgccacaccattggcagccaaatagcggtcttgtcatgacaaatgatacatcggataccaatccagaggaggcaatcccatgcattgcactctccaagaatgattcctatgtgatgtctgcttgtggtgggaaggtttctttgtttaccatgatgacatttaaggtgctgacaacattcatgccgccaccaccagcatcaacatttttagcatttcaccctcaagataataacatcatagcaataggaatggaagattcaaccattcacatatacgatgtcagggtagataaggtaaaaactgaactcaaaggacatcaaaagaggataactgggttggcattctccaccaaccttggcgtacttgtttcttcaggcgccgatgcacagctctgtgtgtggaccaatgacacctgggaaaaaaagagaacagtctcgatacaaatgctagctgggaaggctccttcaggaaatacacgggtccagtttagttctgaccaaaatcacttgctagtagtacaagagactcaactagccatatatgatgcatcaaaaatggagaggatctatcagtggataccgcaggacacattgtcagcttccatatcccatgcatcatactcatgtaacagccagctagttttttctgccttcattgatggtaacataggtgtttttgacgcggagaacttgagattaagatgccgaattgcgcaatcggtgataaacagcaatccacatgttcaccctcttgttgtcgccgcacatccgcacgagccaaaccaatttgcggtggggctgtcagatgggttcgttaaagtgctggagccattggagtccgaaggaaaatggggaacacctgctccggtgaccaatggcacccccaacggcaagacaccagcttcgtcgactacgagtaaccctgctacggaccaaatccaaagatagattgtatttcctaagcattcttctgtaagggctagtttggcatccctatttttctaaaaaaaattattttattaaggaaattagttcatttttctttgggaaaataaaaattccttagaaaaatgctgttgccaaactagccctaaactttctaattacaccgacttatctgtatgtgcatgctgttaggatgtcattgccatttgttgaaaaaaaaagatagaataggttcaagttcaggtgtggttagttttcagatagagatctcttccagatactaccctagtttttttaaggaaaggctgtagggaaaatccctacaacatgattttgttaaataatgaaaggaaggggacaaattagatcaagaaaagaaaaatgattcaaccggctatcgagaatttagccacaaagacaccctaagcctctgaccgctattaaacctaagcatttgcaacttcagcatgtcattgaagctgtccttccaagagaggaaagaagtggcaatgttcctgaagatgaagtcgttcctttgcttccaaatgcaccaaactatcactgct

SEQ ID NO: 217187 - DNA, 3793 bp, Zea Mays
aagaaaagcgagactggagtttctctctcccacccaaccctcttccttccaccccatccccgcttctctctcgcctccgcttcgctcgcgcgagagggggccgacgacggaactctaggattcgcgcccgcccgcgcggccaagccaccaggatcgcgctccgcggactcgagggcgctagccaagctccagggcgcgcggatcgtgcaccgggcggggccggttaccgccgccatgtcatcgctcacccgcgacatcgtcttcctcgtcctccagttcctagacgaggagaagtttaaggagaccatgcataagtttgagcaagagtcggggttcttcttcaatatgaagtactttgaagcgaagggccatgctggggactgggatgaggtggagaaatacttgtcaggtttcaccaagatagatgacaataattattcgatgaagatcttctttgagattaggaaacagaagtatttggaagcgcttgataggcatgatggagcaaaggctttagatattcttgttaaggatcttaaagtcttttcgacattcaatgaggagtcatataaggaaataacacagcttctcacttttgagaattttagccactccaacttcctccacctagtccatctttagctcgttggctgacgaatacagccgtcccttcatctgttcagtctgctgttgtagcagcctcgtcaatacctgttccacccaatcaagtgcctgagcaactaatgaagcgcttgaggcctggtggacatggcattggtgagaccacatatcctactcccattcctcaacgtgcatggtcaatggatgatcttccaaggacagttgcttgttcattgtcacatggatctaatgtaactagcatggattttcatccaactcgccatacactgcttctagtgggatctgctaatggtgaatttacactttatgagatcggtctgcgtcaaacattactttcaaagccctttaaaattctggatacaaatgcatgctcaccacaatttcagaatgctgttgttaaagacccccccatgtccattaatcgagttacctggagccctcatggagaattgattggagttgcattcacaaaatatttgatccgtgtatatgcatatcaaccaccaaatgagacacgacatgttctagagattgttgctcattctggaggtgtaaatgatatagcattctcacgaccaaacaagcaactttgtgtggtcacctgtggagatgataaactgataaaggtatggaatatgcatggacagaaattatttacatttgaagggcacaaggcgcctgtgtattctatatgtgcgcatcacaaacagagtattcagttcatcttctcaacttcccttgatggaaaaattaaggcctggctttatgacaatgtgggatctagggtggactatgaagctcctggcaagtggtgtactactttgctatatagtgctgatgggactaggttgttctcatgtggaacaagcaaagagggagactcatatttggttcagtggaatgaaaatgatggatctatcaagaggacatattctggattccgtaagaggtcagctggtgttgctggtgtagtgcagtttgatatagctcagaatcacattttggctgctggtgaagataacaagattaaattttgggatgttgataataataatatgctgatctgcaccgacgctgaaggaggcctcccagctcttcctcgcttgaggttcaataaagaaggcaatcttcttgctgttactacagtggacaatggttttaagatacttgcaaatgctgatggactcagaaatctacgcgcattaggtagcaggcctcctttcgaagcatttaggctacaatacgaagatgcttctatgaaggtctcaggtgctcctgttgttgctaccatatctcctaacataggccgaatggatcacttggataggaattctcctgcaaagccatctcctatgctgactggtggcgatacagcatcaagaagcatagatataaaggcaagaatctcagaagaaaagtctgataaagcaaaagcttcggaactaatggaggttctaaatccccaacaatgccgtgtagcaacaatgccagaaactcccgatcaggctagaaaggttgtccgacttctgtacacaaattctggtgttgggttgctagcactagggtcaaacgccattcaaaggctatggaaatggagtcgaaacgagcaaaatcctagtggaaaagccacagccagtgttgtgccacaccattggcagccaaatagcggtcttgtcatgacaaatgatacatcggataccaatccagaggaggcaatcccatgcattgcactctccaagaatgattcctatgtgatgtctgcttgtggtgggaaggtttctttgtttaccatgatgacatttaaggtgctgacaacattcatgccgccaccaccagcatcaacatttttagcatttcaccctcaagataataacatcatagcaataggaatggaagattcaaccattcacatatacgatgtcagggtagataaggtaaaaactgaactcaaaggacatcaaaagaggataactgggttggcattctccaccaaccttggcgtacttgtttcttcaggcgccgatgcacagctctgtgtgtggaccaatgacacctgggaaaaaaagagaacagtctcgatacaaatgctagctgggaaggctccttcaggaaatacacgggtccagtttagttctgaccaaaatcacttgctagtagtacaagagactcaactagccatatatgatgcatcaaaaatggagaggatctatcagtggataccgcaggacacattgtcagcttccatatcccatgcatcatactcatgtaacagccagctagttttttctgccttcattgatggtaacataggtgtttttgacgcggagaacttgagattaagatgccgaattgcgcaatcggtgataaacagcaatccacatgttcaccctcttgttgtcgccgcacatccgcacgagccaaaccaatttgcggtggggctgtcagatgggttcgttaaagtgctggagccattggagtccgaaggaaaatggggaacacctgctccggtgaccaatggcacccccaacggcaagacaccagcttcgtcgactacgagtaaccctgctacggaccaaatccaaagatagattgtatttcctaagcattcttctgtaagggctagtttggcatccctatttttctaaaaaaaattattttattaaggaaattagttcatttttctttgggaaaataaaaattccttagaaaaatgctgttgccaaactagccctaaactttctaattacaccgacttatctgtatgtgcatgctgttaggatgtcattgccatttgttgaaaaaaaaagatagaataggttcaagttcaggtgtggttagttttcagatagagatctcttccagatactaccctagtttttttaaggaaaggctgtagggaaaatccctacaacatgattttgttaaataatgaaaggaaggggacaaattagatcaagaaaagaaaaatgattcaaccggctatcgagaatttagccacaaagacaccctaagcctctgaccgctattaaacctaagcatttgcaacttcagcatgtcattgaagctgtccttccaagagaggaaagaagtggcaatgttcctgaagatgaagtcgttcctttgcttccaaatgcaccaaactatcactgct

SEQ ID NO: 217188 - DNA, 4138 bp, Zea Mays
agaaaagcgagactggagtttctctctcccacccaaccctcttccttccaccccatccccgcttctctctcgcctccgcttcgctcgcgcgagagggggccgacgacggaactctaggattcgcgcccgcccgcgcggccaagccaccaggatcgcgctccgcggactcgagggcgctagccaagctccagggcgcgcggatcgtgcaccgggcggggccggttaccgccgccatgtcatcgctcacccgcgacatcgtcttcctcgtcctccagttcctagacgaggagaagtttaaggagaccatgcataagtttgagcaagagtcggggttcttcttcaatatgaagtactttgaagcgaagggccatgctggggactgggatgaggtggagaaatacttgtcaggtttcaccaagatagatgacaataattattcgatgaagatcttctttgagattaggaaacagaagtatttggaagcgcttgataggcatgatggagcaaaggctttagatattcttgttaaggatcttaaagtcttttcgacattcaatgaggagtcatataaggaaataacacagcttctcacttttgagaattttagggaaaatgaacagttgtctaattatggggatactaaatcagctcgaactgttatgctggttgaactaaaaaaactcattaaagccaaccctcttctccaggaaaaacttgtcttcccgactcttaaggcatcacgcctccgaactttaattaatcaaagcttgaattggcagcatcaacattgtaagaatcctcgtccaaatccagatatcaaaactttattcactgaccatacatgtactttacccaatggagctcctgcatcacgggtatctgtaccactggcagctgttccaaagccactccaacttcctccacctagtccatctttagctcgttggctgacgaatacagccgtcccttcatctgttcagtctgctgttgtagcagcctcgtcaatacctgttccacccaatcaagttgtctccatgttgaaacgcccaactataacagactatcaaagtgcagtgcctgagcaactaatgaagcgcttgaggcctggtggacatggcattggtgagaccacatatcctactcccattcctcaacgtgcatggtcaatggatgatcttccaaggacagttgcttgttcattgtcacatggatctaatgtaactagcatggattttcatccaactcgccatacactgcttctagtgggatctgctaatggtgaatttacactttatgagatcggtctgcgtcaaacattactttcaaagccctttaaaattctggatacaaatgcatgctcaccacaatttcagaatgctgttgttaaagacccccccatgtccattaatcgagttacctggagccctcatggagaattgattggagttgcattcacaaaatatttgatccgtgtatatgcatatcaaccaccaaatgagacacgacatgttctagagattgttgctcattctggaggtgtaaatgatatagcattctcacgaccaaacaagcaactttgtgtggtcacctgtggagatgataaactgataaaggtatggaatatgcatggacagaaattatttacatttgaagggcacaaggcgcctgtgtattctatatgtgcgcatcacaaacagagtattcagttcatcttctcaacttcccttgatggaaaaattaaggcctggctttatgacaatgtgggatctagggtggactatgaagctcctggcaagtggtgtactactttgctatatagtgctgatgggactaggttgttctcatgtggaacaagcaaagagggagactcatatttggttcagtggaatgaaaatgatggatctatcaagaggacatattctggattccgtaagaggtcagctggtgttgctggtgtagtgcagtttgatatagctcagaatcacattttggctgctggtgaagataacaagattaaattttgggatgttgataataataatatgctgatctgcaccgacgctgaaggaggcctcccagctcttcctcgcttgaggttcaataaagaaggcaatcttcttgctgttactacagtggacaatggttttaagatacttgcaaatgctgatggactcagaaatctacgcgcattaggtagcaggcctcctttcgaagcatttaggctacaatacgaagatgcttctatgaaggtctcaggtgctcctgttgttgctaccatatctcctaacataggccgaatggatcacttggataggaattctcctgcaaagccatctcctatgctgactggtggcgatacagcatcaagaagcatagatataaaggcaagaatctcagaagaaaagtctgataaagcaaaagcttcggaactaatggaggttctaaatccccaacaatgccgtgtagcaacaatgccagaaactcccgatcaggctagaaaggttgtccgacttctgtacacaaattctggtgttgggttgctagcactagggtcaaacgccattcaaaggctatggaaatggagtcgaaacgagcaaaatcctagtggaaaagccacagccagtgttgtgccacaccattggcagccaaatagcggtcttgtcatgacaaatgatacatcggataccaatccagaggaggcaatcccatgcattgcactctccaagaatgattcctatgtgatgtctgcttgtggtgggaaggtttctttgtttaccatgatgacatttaaggtgctgacaacattcatgccgccaccaccagcatcaacatttttagcatttcaccctcaagataataacatcatagcaataggaatggaagattcaaccattcacatatacgatgtcagggtagataaggtaaaaactgaactcaaaggacatcaaaagaggataactgggttggcattctccaccaaccttggcgtacttgtttcttcaggcgccgatgcacagctctgtgtgtggaccaatgacacctgggaaaaaaagagaacagtctcgatacaaatgctagctgggaaggctccttcaggaaatacacgggtccagtttagttctgaccaaaatcacttgctagtagtacaagagactcaactagccatatatgatgcatcaaaaatggagaggatctatcagtggataccgcaggacacattgtcagcttccatatcccatgcatcatactcatgtaacagccagctagttttttctgccttcattgatggtaacataggtgtttttgacgcggagaacttgagattaagatgccgaattgcgcaatcggtgataaacagcaatccacatgttcaccctcttgttgtcgccgcacatccgcacgagccaaaccaatttgcggtggggctgtcagatgggttcgttaaagtgctggagccattggagtccgaaggaaaatggggaacacctgctccggtgaccaatggcacccccaacggcaagacaccagcttcgtcgactacgagtaaccctgctacggaccaaatccaaagatagattgtatttcctaagcattcttctgtaagggctagtttggcatccctatttttctaaaaaaaattattttattaaggaaattagttcatttttctttgggaaaataaaaattccttagaaaaatgctgttgccaaactagccctaaactttctaattacaccgacttatctgtatgtgcatgctgttaggatgtcattgccatttgttgaaaaaaaaagatagaataggttcaagttcaggtgtggttagttttcagatagagatctcttccagatactaccctagtttttttaaggaaaggctgtagggaaaatccctacaacatgattttgttaaataatgaaaggaaggggacaaattagatcaagaaaagaaaaatgattcaaccggctatcgagaatttagccacaaagacaccctaagcctctgaccgctattaaacctaagcatttgcaacttcagcatgtcattgaagctgtccttccaagagaggaaagaagtggcaatgttcctgaagatgaagtcgttcctttgcttccaaatgcaccaaactatcactgct

SEQ ID NO: 217189 - DNA, 4333 bp, Zea Mays
tctctctcccacccaaccctcttccttccaccccatccccgcttctctctcgcctccgcttcgctcgcgcgagagggggccgacgacggaactctaggattcgcgcccgcccgcgcggccaagccaccaggatcgcgctccgcggactcgagggcgctagccaagctccagggcgcgcggatcgtgcaccgggcggggccggttaccgccgccatgtcatcgctcacccgcgacatcgtcttcctcgtcctccagttcctagacgaggagaagtttaaggagaccatgcataagtttgagcaagagtcggggttcttcttcaatatgaagtactttgaagcgaagggccatgctggggactgggatgaggtggagaaatacttgtcaggtttcaccaagatagatgacaataattattcgatgaagatcttctttgagattaggaaacagaagtatttggaagcgcttgataggcatgatggagcaaaggctttagatattcttgttaaggatcttaaagtcttttcgacattcaatgaggagtcatataaggaaataacacagcttctcacttttgagaattttagggaaaatgaacagttgtctaattatggggatactaaatcagctcgaactgttatgctggttgaactaaaaaaactcattaaagccaaccctcttctccaggaaaaacttgtcttcccgactcttaaggcatcacgcctccgaactttaattaatcaaagcttgaattggcagcatcaacattgtaagaatcctcgtccaaatccagatatcaaaactttattcactgaccatacatgtactttacccaatggagctcctgcatcacgggtatctgtaccactggcagctgttccaaaggctggtgccgcatatccacccctgacagctcatactgtatctttgcttgatcattttctgcttgtgcatggcttttatgatgtttttttgtttttacattatgcatttatttatgcagccactccaacttcctccacctagtccatctttagctcgttggctgacgaatacagccgtcccttcatctgttcagtctgctgttgtagcagcctcgtcaatacctgttccacccaatcaagtgcctgagcaactaatgaagcgcttgaggcctggtggacatggcattggtgagaccacatatcctactcccattcctcaacgtgcatggtcaatggatgatcttccaaggacagttgcttgttcattgtcacatggatctaatgtaactagcatggattttcatccaactcgccatacactgcttctagtgggatctgctaatggtgaatttacactttatgagatcggtctgcgtcaaacattactttcaaagccctttaaaattctggatacaaatgcatgctcaccacaatttcagaatgctgttgttaaagacccccccatgtccattaatcgagttacctggagccctcatggagaattgattggagttgcattcacaaaatatttgatccgtgtatatgcatatcaaccaccaaatgagacacgacatgttctagagattgttgctcattctggaggtgtaaatgatatagcattctcacgaccaaacaagcaactttgtgtggtcacctgtggagatgataaactgataaagggtatggaatatgcatggacagaaattatttacatttgaagggcacaaggcgcctgtgtattctatatgtgcgcatcacaaacagagtattcagtttaaatttagggattatggctatggagtttctactgcgactatggcatacaatatagtgatatgcctattcaagtggaaaaaagggaggtccgcatgtggatgacttttaagtgaacaaatgttgattttagcagtatttatgttcatcttctcaacttcccttgatggaaaaattaaggcctggctttatgacaatgtgggatctagggtggactatgaagctcctggcaagtggtgtactactttgctatatagtgctgatgggactaggttgttctcatgtggaacaagcaaagagggagactcatatttggttcagtggaatgaaaatgatggatctatcaagaggacatattctggattccgtaagaggtcagctggtgttgctggtgtagtgcagtttgatatagctcagaatcacattttggctgctggtgaagataacaagattaaattttgggatgttgataataataatatgctgatctgcaccgacgctgaaggaggcctcccagctcttcctcgcttgaggttcaataaagaaggcaatcttcttgctgttactacagtggacaatggttttaagatacttgcaaatgctgatggactcagaaatctacgcgcattaggtagcaggcctcctttcgaagcatttaggctacaatacgaagatgcttctatgaaggtctcaggtgctcctgttgttgctaccatatctcctaacataggccgaatggatcacttggataggaattctcctgcaaagccatctcctatgctgactggtggcgatacagcatcaagaagcatagatataaaggcaagaatctcagaagaaaagtctgataaagcaaaagcttcggaactaatggaggttctaaatccccaacaatgccgtgtagcaacaatgccagaaactcccgatcaggctagaaaggttgtccgacttctgtacacaaattctggtgttgggttgctagcactagggtcaaacgccattcaaaggctatggaaatggagtcgaaacgagcaaaatcctagtggaaaagccacagccagtgttgtgccacaccattggcagccaaatagcggtcttgtcatgacaaatgatacatcggataccaatccagaggaggcaatcccatgcattgcactctccaagaatgattcctatgtgatgtctgcttgtggtgggaaggtttctttgtttaccatgatgacatttaaggtgctgacaacattcatgccgccaccaccagcatcaacatttttagcatttcaccctcaagataataacatcatagcaataggaatggaagattcaaccattcacatatacgatgtcagggtagataaggtaaaaactgaactcaaaggacatcaaaagaggataactgggttggcattctccaccaaccttggcgtacttgtttcttcaggcgccgatgcacagctctgtgtgtggaccaatgacacctgggaaaaaaagagaacagtctcgatacaaatgctagctgggaaggctccttcaggaaatacacgggtccagtttagttctgaccaaaatcacttgctagtagtacaagagactcaactagccatatatgatgcatcaaaaatggagaggatctatcagtggataccgcaggacacattgtcagcttccatatcccatgcatcatactcatgtaacagccagctagttttttctgccttcattgatggtaacataggtgtttttgacgcggagaacttgagattaagatgccgaattgcgcaatcggtgataaacagcaatccacatgttcaccctcttgttgtcgccgcacatccgcacgagccaaaccaatttgcggtggggctgtcagatgggttcgttaaagtgctggagccattggagtccgaaggaaaatggggaacacctgctccggtgaccaatggcacccccaacggcaagacaccagcttcgtcgactacgagtaaccctgctacggaccaaatccaaagatagattgtatttcctaagcattcttctgtaagggctagtttggcatccctatttttctaaaaaaaattattttattaaggaaattagttcatttttctttgggaaaataaaaattccttagaaaaatgctgttgccaaactagccctaaactttctaattacaccgacttatctgtatgtgcatgctgttaggatgtcattgccatttgttgaaaaaaaaagatagaataggttcaagttcaggtgtggttagttttcagatagagatctcttccagatactaccctagtttttttaaggaaaggctgtagggaaaatccctacaacatgattttgttaaataatgaaaggaaggggacaaattagatcaagaaaagaaaaatgattcaaccggctatcgagaatttagccacaaagacaccctaagcctctgaccgctattaaacctaagcatttgcaacttcagcatgtcattgaagctgtccttccaagagaggaaagaagtggcaatgttcctgaagatgaagtcgttcctttgcttccaaatgcaccaaactatcactgct

SEQ ID NO: 217190 - DNA, 4230 bp, Zea Mays
tctctctcccacccaaccctcttccttccaccccatccccgcttctctctcgcctccgcttcgctcgcgcgagagggggccgacgacggaactctaggattcgcgcccgcccgcgcggccaagccaccaggatcgcgctccgcggactcgagggcgctagccaagctccagggcgcgcggatcgtgcaccgggcggggccggttaccgccgccatgtcatcgctcacccgcgacatcgtcttcctcgtcctccagttcctagacgaggagaagtttaaggagaccatgcataagtttgagcaagagtcggggttcttcttcaatatgaagtactttgaagcgaagggccatgctggggactgggatgaggtggagaaatacttgtcaggtttcaccaagatagatgacaataattattcgatgaagatcttctttgagattaggaaacagaagtatttggaagcgcttgataggcatgatggagcaaaggctttagatattcttgttaaggatcttaaagtcttttcgacattcaatgaggagtcatataaggaaataacacagcttctcacttttgagaattttagggaaaatgaacagttgtctaattatggggatactaaatcagctcgaactgttatgctggttgaactaaaaaaactcattaaagccaaccctcttctccaggaaaaacttgtcttcccgactcttaaggcatcacgcctccgaactttaattaatcaaagcttgaattggcagcatcaacattgtaagaatcctcgtccaaatccagatatcaaaactttattcactgaccatacatgtactttacccaatggagctcctgcatcacgggtatctgtaccactggcagctgttccaaagccactccaacttcctccacctagtccatctttagctcgttggctgacgaatacagccgtcccttcatctgttcagtctgctgttgtagcagcctcgtcaatacctgttccacccaatcaagttgtctccatgttgaaacgcccaactataacagactatcaaagtgcagtgcctgagcaactaatgaagcgcttgaggcctggtggacatggcattggtgagaccacatatcctactcccattcctcaacgtgcatggtcaatggatgatcttccaaggacagttgcttgttcattgtcacatggatctaatgtaactagcatggattttcatccaactcgccatacactgcttctagtgggatctgctaatggtgaatttacactttatgagatcggtctgcgtcaaacattactttcaaagccctttaaaattctggatacaaatgcatgctcaccacaatttcagaatgctgttgttaaagacccccccatgtccattaatcgagttacctggagccctcatggagaattgattggagttgcattcacaaaatatttgatccgtgtatatgcatatcaaccaccaaatgagacacgacatgttctagagattgttgctcattctggaggtgtaaatgatatagcattctcacgaccaaacaagcaactttgtgtggtcacctgtggagatgataaactgataaaggtatggaatatgcatggacagaaattatttacatttgaagggcacaaggcgcctgtgtattctatatgtgcgcatcacaaacagagtattcagtttaaatttagggattatggctatggagtttctactgcgactatggcatacaatatagtgatatgcctattcaagtggaaaaaagggaggtccgcatgtggatgacttttaattcatcttctcaacttcccttgatggaaaaattaaggcctggctttatgacaatgtgggatctagggtggactatgaagctcctggcaagtggtgtactactttgctatatagtgctgatgggactaggttgttctcatgtggaacaagcaaagagggagactcatatttggttcagtggaatgaaaatgatggatctatcaagaggacatattctggattccgtaagaggtcagctggtgttgctggtgtagtgcagtttgatatagctcagaatcacattttggctgctggtgaagataacaagattaaattttgggatgttgataataataatatgctgatctgcaccgacgctgaaggaggcctcccagctcttcctcgcttgaggttcaataaagaaggcaatcttcttgctgttactacagtggacaatggttttaagatacttgcaaatgctgatggactcagaaatctacgcgcattaggtagcaggcctcctttcgaagcatttaggctacaatacgaagatgcttctatgaaggtctcaggtgctcctgttgttgctaccatatctcctaacataggccgaatggatcacttggataggaattctcctgcaaagccatctcctatgctgactggtggcgatacagcatcaagaagcatagatataaaggcaagaatctcagaagaaaagtctgataaagcaaaagcttcggaactaatggaggttctaaatccccaacaatgccgtgtagcaacaatgccagaaactcccgatcaggctagaaaggttgtccgacttctgtacacaaattctggtgttgggttgctagcactagggtcaaacgccattcaaaggctatggaaatggagtcgaaacgagcaaaatcctagtggaaaagccacagccagtgttgtgccacaccattggcagccaaatagcggtcttgtcatgacaaatgatacatcggataccaatccagaggaggcaatcccatgcattgcactctccaagaatgattcctatgtgatgtctgcttgtggtgggaaggtttctttgtttaccatgatgacatttaaggtgctgacaacattcatgccgccaccaccagcatcaacatttttagcatttcaccctcaagataataacatcatagcaataggaatggaagattcaaccattcacatatacgatgtcagggtagataaggtaaaaactgaactcaaaggacatcaaaagaggataactgggttggcattctccaccaaccttggcgtacttgtttcttcaggcgccgatgcacagctctgtgtgtggaccaatgacacctgggaaaaaaagagaacagtctcgatacaaatgctagctgggaaggctccttcaggaaatacacgggtccagtttagttctgaccaaaatcacttgctagtagtacaagagactcaactagccatatatgatgcatcaaaaatggagaggatctatcagtggataccgcaggacacattgtcagcttccatatcccatgcatcatactcatgtaacagccagctagttttttctgccttcattgatggtaacataggtgtttttgacgcggagaacttgagattaagatgccgaattgcgcaatcggtgataaacagcaatccacatgttcaccctcttgttgtcgccgcacatccgcacgagccaaaccaatttgcggtggggctgtcagatgggttcgttaaagtgctggagccattggagtccgaaggaaaatggggaacacctgctccggtgaccaatggcacccccaacggcaagacaccagcttcgtcgactacgagtaaccctgctacggaccaaatccaaagatagattgtatttcctaagcattcttctgtaagggctagtttggcatccctatttttctaaaaaaaattattttattaaggaaattagttcatttttctttgggaaaataaaaattccttagaaaaatgctgttgccaaactagccctaaactttctaattacaccgacttatctgtatgtgcatgctgttaggatgtcattgccatttgttgaaaaaaaaagatagaataggttcaagttcaggtgtggttagttttcagatagagatctcttccagatactaccctagtttttttaaggaaaggctgtagggaaaatccctacaacatgattttgttaaataatgaaaggaaggggacaaattagatcaagaaaagaaaaatgattcaaccggctatcgagaatttagccacaaagacaccctaagcctctgaccgctattaaacctaagcatttgcaacttcagcatgtcattgaagctgtccttccaagagaggaaagaagtggcaatgttcctgaagatgaagtcgttcctttgcttccaaatgcaccaaactatcactgct

SEQ ID NO: 217191 - DNA, 4075 bp, Zea Mays
tctctctcccacccaaccctcttccttccaccccatccccgcttctctctcgcctccgcttcgctcgcgcgagagggggccgacgacggaactctaggattcgcgcccgcccgcgcggccaagccaccaggatcgcgctccgcggactcgagggcgctagccaagctccagggcgcgcggatcgtgcaccgggcggggccggttaccgccgccatgtcatcgctcacccgcgacatcgtcttcctcgtcctccagttcctagacgaggagaagtttaaggagaccatgcataagtttgagcaagagtcggggttcttcttcaatatgaagtactttgaagcgaagggccatgctggggactgggatgaggtggagaaatacttgtcaggtttcaccaagatagatgacaataattattcgatgaagatcttctttgagattaggaaacagaagtatttggaagcgcttgataggcatgatggagcaaaggctttagatattcttgttaaggatcttaaagtcttttcgacattcaatgaggagtcatataaggaaataacacagcttctcacttttgagaattttagggaaaatgaacagttgtctaattatggggatactaaatcagctcgaactgttatgctggttgaactaaaaaaactcattaaagccaaccctcttctccaggaaaaacttgtcttcccgactcttaaggcatcacgcctccgaactttaattaatcaaagcttgaattggcagcatcaacattgtaagaatcctcgtccaaatccagatatcaaaactttattcactgaccatacatgtactttacccaatggagctcctgcatcacgggtatctgtaccactggcagctgttccaaagccactccaacttcctccacctagtccatctttagctcgttggctgacgaatacagccgtcccttcatctgttcagtctgctgttgtagcagcctcgtcaatacctgttccacccaatcaagttgtctccatgttgaaacgcccaactataacagactatcaaagtgcagtgcctgagcaactaatgaagcgcttgaggcctggtggacatggcattggtgagaccacatatcctactcccattcctcaacgtgcatggtcaatggatgatcttccaaggacagttgcttgttcattgtcacatggatctaatgtaactagcatggattttcatccaactcgccatacactgcttctagtgggatctgctaatggtgaatttacactttatgagatcggtctgcgtcaaacattactttcaaagccctttaaaattctggatacaaatgcatgctcaccacaatttcagaatgctgttgttaaagacccccccatgtccattaatcgagttacctggagccctcatggagaattgattggagttgcattcacaaaatatttgatccgtgtatatgcatatcaaccaccaaatgagacacgacatgttctagagattgttgctcattctggaggtgtaaatgatatagcattctcacgaccaaacaagcaactttgtgtggtcacctgtggagatgataaactgataaaggtatggaatatgcatggacagaaattatttacatttgaagggcacaaggcgcctgtgtattctatatgtgcgcatcacaaacagagtattcagtttaaatttagggattatggctatggagtttctactgcgactatggcatacaatatagtgatatgcctattcaagtggaaaaaagggagttcatcttctcaacttcccttgatggaaaaattaaggcctggctttatgacaatgtgggatctagggtggactatgaagctcctggcaagtggtgtactactttgctatatagtgctgatgggactaggttgttctcatgtggaacaagcaaagagggagactcatatttggttcagtggaatgaaaatgatggatctatcaagaggacatattctggattccgtaagaggtcagctggtgttgctggtgtagtgcagtttgatatagctcagaatcacattttggctgctggtgaagataacaagattaaattttgggatgttgataataataatatgctgatctgcaccgacgctgaaggaggcctcccagctcttcctcgcttgaggttcaataaagaaggcaatcttcttgctgttactacagtggacaatggttttaagatacttgcaaatgctgatggactcagaaatctacgcgcattaggtagcaggcctcctttcgaagcatttaggctacaatacgaagatgcttctatgaaggtctcaggtgctcctgttgttgctaccatatctcctaacataggccgaatggatcacttggataggaattctcctgcaaagccatctcctatgctgactggtggcgatacagcatcaagaagcatagatataaaggcaagaatctcagaagaaaagtctgataaagcaaaagcttcggaactaatggaggttctaaatccccaacaatgccgtgtagcaacaatgccagaaactcccgatcaggctagaaaggttgtccgacttctgtacacaaattctggtgttgggttgctagcactagggtcaaacgccattcaaaggctatggaaatggagtcgaaacgagcaaaatcctagtggaaaagccacagccagtgttgtgccacaccattggcagccaaatagcggtcttgtcatgacaaatgatacatcggataccaatccagaggaggcaatcccatgcattgcactctccaagaatgattcctatgtgatgtctgcttgtggtgggaaggtttctttgtttaccatgatgacatttaaggtgctgacaacattcatgccgccaccaccagcatcaacatttttagcatttcaccctcaagataataacatcatagcaataggaatggaagattcaaccattcacatatacgatgtcagggtagataaggtaaaaactgaactcaaaggacatcaaaagaggataactgggttggcattctccaccaaccttggcgtacttgtttcttcaggcgccgatgcacagctctgtgtgtggaccaatgacacctgggaaaaaaagagaacagtctcgatacaaatgctagctgggaaggctccttcaggaaatacacgggtccagtttagttctgaccaaaatcacttgctagtagtacaagagactcaactagccatatatgatgcatcaaaaatggagaggatctatcagtggataccgcaggacacattgtcagcttccatatcccatgcatcatactcatgtaacagccagctagttttttctgccttcattgatggtaacataggtgtttttgacgcggagaacttgagattaagatgccgaattgcgcaatcggtgataaacagcaatccacatgttcaccctcttgttgtcgccgcacatccgcacgagccaaaccaatttgcggtggggctgtcagatgggttcgttaaagtgctggagccattggagtccgaaggaaaatggggaacacctgctccggtgaccaatggcacccccaacggcaagacaccagcttcgtcgactacgagtaaccctgctacggaccaaatccaaagatagattgtatttcctaagctttctaattacaccgacttatctgtatgtgcatgctgttaggatgtcattgccatttgttgaaaaaaaaagatagaataggttcaagttcaggtgtggttagttttcagatagagatctcttccagatactaccctagtttttttaaggaaaggctgtagggaaaatccctacaacatgattttgttaaataatgaaaggaaggggacaaattagatcaagaaaagaaaaatgattcaaccggctatcgagaatttagccacaaagacaccctaagcctctgaccgctattaaacctaagcatttgcaacttcagcatgtcattgaagctgtccttccaagagaggaaagaagtggcaatgttcctgaagatgaagtcgttcctttgcttccaaatgcaccaaactatcactgct

SEQ ID NO: 217192 - DNA, 2246 bp, Zea Mays
gcgaattccgaactgcaagcccactctgtccgcccgacgcgcagaccacgcctgggccgtcaagcctccagatgagatgaccgccctccaacctcgcgtgggcttgggcatgccgacgaggccacctccagacctcctgaatcctgaattcatgatgcctcacgcggcgccagcactgggaggtagccgttgccatgacatcggtcgccatcaggcatcaggggaggaggccggtggccgaagcaaagcaactccgatgtggccggggaggtagcctactgccccctacccccgtagaggcgtagacccgtacccactccgcgagcgagggatggaatctgacgggtggccgcacgcgggaggcaaccgagaggcgcgcagggcacgccgattccttccttgccgccgcggtcgctcggcaatcgcgtgcgcccgctgctttaacctctcggctttgtcttcgctagccgaccaattgttgggccgccgctagcaggagccaggtcgcgccgacagcagcagttggaagaggatccatggggaaggaggcgacgcttgcgttcacgcccacctgggtggtggccatcgtatgcctcgtcatcgtctctatctccctcgccgctgagcgctcactccattacctcggcaagtatctggagtgtaagaagcagaaagcgcttttttcagctctacagagactaaaagaagagctaatgcttctcggattcatttcattcgtcctgagtctctcccaagtacagcaagaaaagaatgaaggacaagggtcatcattgagtattgttgtgctacatcgggagcaccaggatgaatttgtccacaagcggacaaagggattttggatgaagctcgctgttgcaagctggataactgcattcttgaagcaatttcaagattcagtgagtaaatcagattatgaagcacttagatcagcttttgtcgtggaacactatcccgagaaaccagatattgatttccacaaatacatgactcgcgctgttgaatatgagtttaaaagagttgttggtatcagctggtatctgtggctttttgtaatcttattcctgctgctgaatataaatggatggcacacatacttctggttggctttcttgcctctatttctgttacttattgttggtgccaaactagagcacattatcactcggttggctcaagaggcagcgatatcattatcaaataatacagaggaagttccgaaaataaagccatgcaaggaccatttctggtttcacaagcctgagctagtccttcatttgatccatttcatcctgttccagaattcgttcgagattagttttttcttctggattctggtatcagaaggtttcggttcgtgtatgatggaacggaagccttatgtcatttccagacttgttatcggggtgatcatcgaagtcatctgcagctatatcacgctgccactatacgccatcgtgacccatatgaccggacagatcaagctgcatggttttggctcccgcgtgcacgagagtgtccatggctggatcggcttgaggaagaaacccttctcgttctggaagattcccggcggtgaccctaacgctgattccggcagggaggccgacgtaacccgcagggtggccaaggagcggtcggggagctcgcgcagcatgccgatggcgccggctgacgagatcgtcaccgtcgacgacgtcgcggtggctgcagctgccgttggccaaggaccataaaattcctagctagcaaacaccagcagggaaggcaggcaggctgccgaggtaccgtgcgcagcgggttgatgggtcggacgctgcggaaaattcctcgtgtcgggagcaggctgggcggccgcgcccgcgcccgcgcgctgtagctctgatcgcgtgttgtaacgtcaacgtcatctcgtgtaacggtacgggcaggacgggacgcgtcgtccccatgcctgctcccgtgctagggccggccgccaggcgttgtggcatgtcacgtgcgacgttgcagcgcgacgctacaacgttgtatgtgggctgtggcacagccagccggcgcgtcattggccctggcccagcatggcctgctgctgctgccttgtgccggccgtaccttgctgtaaaggaaagctgggcgtacataacccattatccatggctcactgcgatctattgcaatgtagcaggcaggtgagcgttctcaagagtgtgatggaaggaaaagga

SEQ ID NO: 217193 - DNA, 1861 bp, Zea Mays
gaaaggtttcgagaaaatatcagtaaagagaaaagaaaatgattgaactccctgatcatcttagcctggagtatatggaagcatagaattaattgtatttttaagactgaatctccctctgttaatctgattttgtctaattttaaggatgagcacatcagcacagcctgtggtgcctggatggagccaaaaatctctaagccttagacatttgtggaactaattagtttctgttttgggtcgggctaggtgtgttttttctttctgttgtcctagaggtgtgttcccttctctcatgatacatgacctccgtatgagagctttggggttgtatagaggccttctttctctctttgattaatgaaacacagctctcctgccctttctaaaaaaacaactatacagtaaccttgttgaatttaacattgcttgtgaagcctcctttattgcaggtagtactactattccacatttacaaccatatatcaacaacataacaaaatcagagtttcaaatcttagtcatctgagcaaactggctcgtagaaacgatacagccagtagaattgatgaagctgacagattacgtatagtcttccttgcaatggaagatgcaagagctgtgctcattaagcttgctgacaggctacacaacatgaggactctggattctttgtccaagactaaacagcagagcgttgcaaaggaaacgttggagatatttgctcccttggcgaatcagttgggcatcttgaattggaaggaacaacttgaaaacctgtgcttcaagtatctttacccagaaaattttgatgaactgtcaacaaaacttatcgagatctataacatagatatgattgcagctgcaacaagacgacttgaacaagcccttcaggtgagaggactatcctattatgccatatatgggaggcacaagagcatgtacagcatctacagaaaaatggcaaggaagaagctggtcatggataaaatttatgatatacatggggtgcgtgttattctcgagaataaggctgattgttttgccacattagagattatccatcacctatggcctagaattcctggcaagttcaaagattatatcaacagccccaaacccaacaggtatcagtccctgcacacggttgttctcactgaacaaacgctgccactcgagatccaaattcgtacgagggacatgcatttgcaggcggagttcggaattgctgctcattggagatataaggaaggctatccttcatcacttgcatgtgatgcttcatcgaaggaaacgcacactatcccatctcactctgacgcctgtctgttgtcctactcaaaacaatgtgatcacaaagggcccgtacttatgtcagtgcaagaaatcccccaaaattggacgatactggacctactgaaaaggtcttcaaactatgggatgccgttgaggctgaggctgaactgccatgccgtccacaactggaaccaggagctaaaaatgggcgacgtgcttgaactgatcccttcgaccccatgcaaatccagaggtcacacgagggagctccaccagaagtttgatcaccgtctcgccgtttcccagtcctgacagccttagaacaccgtaccttgtaaatacatgacgtgaacccatataaatcatctgaagtttagatttcccctgtgcagacaaaatagagatgaggagtcatcaaaactctgtaaccgtcgtatactcattcaagccaaaacaagacagcatgtaatgtaaatcagtatatacatgatacacatggttttagctcaggaaatgacaatatataccgacgacgatgcgcttacggtttttagtagcaaaagga

SEQ ID NO: 217194 - DNA, 2514 bp, Zea Mays
cttaaacttggcctccagacaacaagataataattttgctgaatggtggagaaaggtttcgagaaaatatcagtaaagagaaaagaaaatgattgaactccctgatcatcttagcctggagtatatggaagcatagaattaattgtatttttaagactgaatctccctctgttaatctgattttgtctaattttaaggatgagcacatcagcacagcctgtggtgcctggatggagccaaaaatctctaagccttagacatttgtggaactaattagtttctgttttgggtcgggctaggtgtgttttttctttctgttgtcctagaggtgtgttcccttctctcatgatacatgacctccgtatgagagctttggggttgtatagaggccttctttctctctttgattaatgaaacacagctctcctgccctttctaaaaaaacaactatacagtaaccttgttgaatttaacattgcttgtgaagcctcctttattgcaggtagtactactattccacatttacaaccatatatcaacaacataacaaaatcagagtacgtcatcgatgccctgcacttgagcataacataagcggcgcaggagtgcaagatcagatcacaagcgactgcagtcctgcaaagaaaccttctctcggactcctctagttttatttctggtatttattggcttagtcgtattcgtgactgggaattgcgtgttgccatgtctctgattgtgactggcagaacttattgatcgttacttcgttcatggagcttctagaaagggtccttgttgtgtctatcccagtatcacgttactatcacctctacattattataatgggcacttgctgaatctagtgtaatgtaaaatcagttcctggtgggttagcagatccaatcagcactgtgctgtatgatgcttacctgtttccattctttccctttcgttttcttttttaatagaatgattcgtttatggtgtcacaccaatttatttcgggatatggaagtcttttgttttgtttattgtgctcatgaatgatatttattattggttgtctaaagtccacatttacaactaatatatgcagaggaaacttcagttgcttgtgacatcttggcttattcttttggacacgatgaggatattgtgtctcgtaccttcatttgactaaacaatggttttgttgccttttttgtaggtttcaaatcttagtcatctgagcaaactggctcgtagaaacgatacagccagtagaattgatgaagctgacagattacgtatagtcttccttgcaatggaagatgcaagagctgtgctcattaagcttgctgacaggctacacaacatgaggactctggattctttgtccaagactaaacagcagagcgttgcaaaggaaacgttggagatatttgctcccttggcgaatcagttgggcatcttgaattggaaggaacaacttgaaaacctgtgcttcaagtatctttacccagaaaattttgatgaactgtcaacaaaacttatcgagatctataacatagatatgattgcagctgcaacaagacgacttgaacaagcccttcaggaagaagctggtcatggataaaatttatgatatacatggggtgcgtgttattctcgagaataaggctgattgttttgccacattagagattatccatcacctatggcctagaattcctggcaagttcaaagattatatcaacagccccaaacccaacaggtatcagtccctgcacacggttgttctcactgaacaaacgctgccactcgagatccaaattcgtacgagggacatgcatttgcaggcggagttcggaattgctgctcattggagatataaggaaggctatccttcatcacttgcatgtgatgcttcatcgaaggaaacgcacactatcccatctcactctgacgcctgtctgttgtcctactcaaaacaatgtgatcacaaagggcccgtacttgtaatacttctggagaatgaaaagatgtcagtgcaagaaatcccccaaaattggacgatactggacctactgaaaaggtcttcaaactatgggatgccgttgaggctgaggctgaactgccatgccgtccacaactggaaccaggagctaaaaatgggcgacgtgcttgaactgatcccttcgaccccatgcaaatccagaggtcacacgagggagctccaccagaagtttgatcaccgtctcgccgtttcccagtcctgacagccttagaacaccgtaccttgtaaatacatgacgtgaacccatataaatcatctgaagtttagatttcccctgtgcagacaaaatagagatgaggagtcatcaaaactctgtaaccgtcgtatactcattcaagccaaaacaagacagcatgtaatgtaaatcagtatatacatgatacacatggttttagctcaggaaatgacaatatataccgacgacgatgcgcttacggtttttagtagcaaaagga

SEQ ID NO: 217195 - DNA, 2133 bp, Zea Mays
ctggcaagcccaactccctaaatcattctccacgagaccacgatgcctcttccatcaccgctctctacttctccttcgcctgcaagccagccagcctccattcgcgtggccgccaaaggcgccaaccgccggcgagctatgacaccatcggtctcctgcccggtcaagtgccgcccccacccctgccttgccccgcagccaccagcgccatcaccggagcttctcgccgctcgcggcgccccgatcgccggcgagctgcgggcgtgccggagccctccgtacttgcctctctcgcgctctgccgactccttggaactccgggcggcgtgccgcggcgctccgcctgccagccgagcccgtgctgccgtggcgctgggcggtgacggcccgtccgcggcgctgatagccggcgcacagtcgcgtcacgccatcttccgcgacgagctcgtgcggagagccttcactgccgccgaagcggctcaccgcggccaggtgcgcgcgagcggcgacccgtacctacaacactgcgtggagacagcggcgctgctcgcggagctgggcgccggccctgccgtcgttgctgccggcctgctgcacgacacggtcgacgacgcgggcctgggctacggtttcatctccgagcatttcggtgccggtgtcgccgaccttgtaaaaggggtttcaaatcttagtcatctgagcaaactggctcgtagaaacgatacagccagtagaattgatgaagctgacagattacgtatagtcttccttgcaatggaagatgcaagagctgtgctcattaagcttgctgacaggctacacaacatgaggactctggattctttgtccaagactaaacagcagagcgttgcaaaggaaacgttggagatatttgctcccttggcgaatcagttgggcatcttgaattggaaggaacaacttgaaaacctgtgcttcaagtatctttacccagaaaattttgatgaactgtcaacaaaacttatcgagatctataacatagatatgattgcagctgcaacaagacgacttgaacaagcccttcaggtgagaggactatcctattatgccatatatgggaggcacaagagcatgtacagcatctacagaaaaatggcaaggaagaagctggtcatggataaaatttatgatatacatggggtgcgtgttattctcgagaataaggctgattgttttgccacattagagattatccatcacctatggcctagaattcctggcaagttcaaagattatatcaacagccccaaacccaacaggtatcagtccctgcacacggttgttctcactgaacaaacgctgccactcgagatccaaattcgtacgagggacatgcatttgcaggcggagttcggaattgctgctcattggagatataaggaaggtgaacggagttgctgcacctctgtttctgaaattgttgagtgggtcagatgggttacatggcactgtcaaactctgaacacaggctatccttcatcacttgcatgtgatgcttcatcgaaggaaacgcacactatcccatctcactctgacgcctgtctgttgtcctactcaaaacaatgtgatcacaaagggcccgtacttgtaatacttctggagaatgaaaagtgcaagaaatcccccaaaattggacgatactggacctactgaaaaggtcttcaaactatgggatgccgttgaggctgaggctgaactgccatgccgtccacaactggaaccaggagctaaaaatgggcgacgtgcttgaactgatcccttcgaccccatgcaaatccagaggtcacacgagggagctccaccagaagtttgatcaccgtctcgccgtttcccagtcctgacagccttagaacaccgtaccttgtaaatacatgacgtgaacccatataaatcatctgaagtttagatttcccctgtgcagacaaaatagagatgaggagtcatcaaaactctgtaaccgtcgtatactcattcaagccaaaacaagacagcatgtaatgtaaatcagtatatacatgatacacatggttttagctcaggaaatgacaatatataccgacgacgatgcgcttacggtttttagtagcaaaagga

SEQ ID NO: 217196 - DNA, 615 bp, Zea Mays
ctcgttctcgtcgcgtccaaccagcacggcggctggatgcagttcgaccgctacgaggagtacaggtacctgcttgcaatcgtgtcgctggggttactctactcgctggcgcaggcggtgcggcgcgcgtaccggatgcgcggcggcgccgaccccgtctcctcagcatctgggaggcttctcgatttcgtcggtgaccaggtagttgcatacttgctgatgtccgcgctgtcggctgccgtccccatcactaaccgcatgagatctgcagttgtcaataactttacagacgcaaccgctgcagcaatcagcatggccttctttgcatttgtagctcttgccttgtcagcagtggtttctggttacaagctctccaaacaaacatacatgtgaatcatcgttctagaagtaaaacccattaggtggaatattcattatggattgcaatccaaagaagagaagcctctgatgcctctcttcaacttggatgtcatctgttatgtgctaaggtgattgttgttgcttgcagtaggttccatgtgtgtacatagaattatgcgtggcattcctgaatatgattgttttcctttcttaagtattgttgtcatgatgaga

SEQ ID NO: 217197 - DNA, 3922 bp, Zea Mays
ccgcgcccaaaccggttaggaaggaaataaaatggaagacgtcctcgtctccatcgccggttgtgtctcctcctatccatttctccagtcgtttctctcccctcgcgctgcccatggccatcccggaggacctagaggggacctcgggcgatggcggggtgacgaatcgcgggagtagagggcggcgaaaaggcgcggcgaaggggcgcgggaggggcaggccgcggagcgccgacagatcctttccgccgccggcgatggctggggtggcggtcggggacagggtgctcagggagaggaggcacacgaccaacgttttctgcgagcgcgacacggatgttgacgatgagtccatttattttcaggatgatgttgagacagttaggtccaaggactcaaggagtggcgatgttttacagactgcaaaaaagaggaagaagggaggtgcagggaaggtttctgtcacaaaaaggtcgaaaagagagggtgaagaacaaaagaaggcatcaccctccaaggataaagattgtgctgaaactaatgggaaaaggaagatgttgactggggataatgccctgatgtgccaccagtgccagaggaatgataaagggagggtggtctggtgtaattcatgcagaaataagcgcttctgtgtgccatgcattgaaagatggtatcctaacttgtcagaagacgaatttgctgcaaaatgcccatattgtcgcaagaactgtaattgcaaaggatgccttagaatgagaggggttgaagagcagcctccaaagaaggaaatttctgaagaaaatcaaatctcttatgcttgcaatgttgtgcgcttgttgcttccctggttgagaaaactgcgacaggagcagatggaggagaagaaattggaggctaaaataaaaggtgttttggtgaatgagatgaagttggaacaagctgaatataatctagatgagcgtgtctactgcaataattgcaaaacttctatagttgattttcacagaagctgcaagtactgcttttatgatctgtgccttgactgctgtgtggagatccgcagaggtgagattcctggaggagaagagataatgagagtaaagcctgaagatagaggccgagcatatctttttggtactactaactcaaaggatgggagtaaaaggttctccatgaggaggcacagctcatccctggagaatgagccttccaatgtagtaggttctagtgagggggcaaataactctctggagctgtggaaagcagaaagtgatggtagcataccttgcccaccaaaggagctaggaggctgtggcggttcgattttggatctcaagtgtttttttccagaaaagatgctttcaaatttagaagaacgagctgacagaattatgaggagcgaagtatttgcaaaagcagtagccaaaagaagtgaccagtgcccttgttatgaccattcaggaaacataagaactcaggacgtgcgagagactgcaaatacgaaaggctcaagtgataaccatctctactgcccagttgccactgctatcaaggaggatgacttggcgcactttcagatgcactggacaaaaggcgaaccagttattgtttctgatgttctgcatttgacttctggtctaagttgggaaccattagttatgtggcgggcattgcgagagaaaaagactaatggtgacgtagaagatgagcactttgctgtcagggcattagattgccttgattggtgtgaggtcaggagttatatttcattgaatgtttgagtgcatcctgtgaccttttatatttatgtatatatttaaatgtttccgtttgtattcctcttagatgtgctgttacttatttttgtagacttccctaggtgcatttagagagatgttcatttccctagctgatttttgtagacttccctaggtccctttgtgctctgctgcatatctttgtcccatgctgattttcatggtcgtacaactcttctagaagatttctttattaccatgacaagaaacaggacatgctctacaagtaaagtacaatgttgaattatcaatggatttgaattctatttcaattttgatggaattgtgttacctgtatgcatgcagatagactgctcacagctctgttgtcaacaggcagaacgcatcacatgacacactggcctgagatgcttaagctaaaggactggccgccatctagttcttttgatcagagattgcctcgccatggtgctgagtttatcagtgcattgccatttcctgagtacactgatcctcgatatggtccgctgaatcttacagtcaagctacctgatggtgcattgaagccagatcttggaccaaaaacttacatcgcttatggattttaccaagagttaggcaggggtgattctgtgaccaagcttcactgtgacatgtctgatgcggtaaatatattgacacacacagcacaagtgccctatgcgcgttatcaacttgagaagatagaggaaaccagaaagaaaatgaaagaacaagatcttcaggaactttatggtgtttcagaactaaacctatcatcaccttttactgattccaggaatataagtgctgatgaaatgtcaaagacctcatgtaactatggtttggacgtcaatgatgtaccacctgttaataatgaatctgaggtacaaagtggggcaggccagtgttcagattacattgacaaggatagaagttatgctgggatgcataacggggagagaaccggtggtgccttatgggatattttccgaagagaagattctgacaagatacaagattatcttaggaaacatgccacggaattccggcacatcttttgcaatcctgtgaagcaggttattcacccaattcacgatcagactttctacttaaccgaggagcataagagaaagctcaaggaagaatatggtgttgaaccctggacgtttgagcagaagcttggtgaagcggttttcattcctgctggatgtcctcaccaagtgaggaacttgaagtcttgcattaaggttgcgatggactttgtctccccagaaagcgtcaacgagtgcatgaaactgactggagagtttaggcggcttccacctgatcacagggctaaagaggataagctggagatcaagaagattgctcttcatgctctgaaccaagtagtaaatttcttggatccttcctcggagtggtcgaagagttggtttgcccaactcaagaacaaaaaaaaggctggagctgaagaacaggagaagcctaaaaggaagcgtggccgcccatgtcgcaagtccaacgatgaagctgctggcgataggcacagaaagaagggcggccgccaaagaggtcggaagaggggatacggcaagtccaaagatggcgctggcgctgttgatgtgaagcctcctaaaaggcagcgcaatctcctgaaaggctctggcaatcgtgtaggtggttgattgtttcactgctgactgggaagatggaaggcgtaagggctgtaccgacccaaccttgacgtggttattttggtaccaggttgtaagtgtagactctagattgtagaatagaccaggcatttcgtcacccctgggcgccattatggcgtcttgcttttgttcatatgtggcgattgccggttgacaccgttttggaagaataatatgctagatgctcgttgtaccagactcttcatgtagcgggctatggtgaattgctgttcagcatgtctgatgctgatgttggtaattgacctgaatagatgtggtcatttgaactctctggattctgattttacatatccaatccattggctgaggctgagcattcttagttgaaaaacgaagcaagttatggtgcagtccatagcatgtcaaccagatttgctagctgag

SEQ ID NO: 217198 - DNA, 3599 bp, Zea Mays
ataaaatggaagacgtcctcgtctccatcgccggttgtgtctcctcctatccatttctccagtcgtttctctcccctcgcgctgcccatggccatcccggaggacctagaggggacctcgggcgatggcggggtgacgaatcgcgggagtagagggcggcgaaaaggcgcggcgaaggggcgcgggaggggcaggccgcggagcgccgacagatcctttccgccgccggcgatggctggggtggcggtcggggacagggtgctcagggagaggaggcacacgaccaacgttttctgcgagcgcgacacggatgttgacgatgaggatgatgttgagacagttaggtccaaggactcaaggagtggcgatgttttacagactgcaaaaaagaggaagaagggaggtgcagggaaggtttctgtcacaaaaaggtcgaaaagagagggtgaagaacaaaagaaggcatcaccctccaaggataaagattgtgctgaaactaatggggaagatgttgactggggataatgccctgatgtgccaccagtgccagaggaatgataaagggagggtggtctggtgtaattcatgcagaaataagcgcttctgtgtgccatgcattgaaagatggtatcctaacttgtcagaagacgaatttgctgcaaaatgcccatattgtcgcaagaactgtaattgcaaaggatgccttagaatgagaggggttgaagagcctccaaagaaggaaatttctgaagaaaatcaaatctcttatgcttgcaatgttgtgcgcttgttgcttccctggttgagaaaactgcgacaggagcagatggaggagaagaaattggaggctaaaataaaaggtgttttggtgaatgagatgaagttggaacaagctgaatataatctagatgagcgtgtctactgcaataattgcaaaacttctatagttgattttcacagaagctgcaagtactgcttttatgatctgtgccttgactgctgtgtggagatccgcagaggtgagattcctggaggagaagagataatgagagtaaagcctgaagatagaggccgagcatatctttttggtactactaactcaaaggatgggagtaaaaggttctccatgaggaggcacagctcatccctggagaatgagccttccaatgtagtaggttctagtgagggggcaaataactctctggagctgtggaaagcagaaagtgatggtagcataccttgcccaccaaaggagctaggaggctgtggcggttcgattttggatctcaagtgtttttttccagaaaagatgctttcaaatttagaagaacgagctgacagaattatgaggagcgaagtatttgcaaaagcagtagccaaaagaagtgaccagtgcccttgttatgaccattcaggaaacataagaactcaggacgtgcgagagactgcaaatacgaaaggctcaagtgataaccatctctactgcccagttgccactgctatcaaggaggatgacttggcgcactttcagatgcactggacaaaaggcgaaccagttattgtttctgatgttctgcatttgacttctggtctaagttgggaaccattagttatgtggcgggcattgcgagagaaaaagactaatggtgacgtagaagatgagcactttgctgtcagggcattagattgccttgattggtgtgaggtggaaattaacatacacatgttttttgtgggatatatgaaaggcagaacgcatcacatgacacactggcctgagatgcttaagctaaaggactggccgccatctagttcttttgatcagagattgcctcgccatggtgctgagtttatcagtgcattgccatttcctgagtacactgatcctcgatatggtccgctgaatcttacagtcaagctacctgatggtgcattgaagccagatcttggaccaaaaacttacatcgcttatggattttaccaagagttaggcaggggtgattctgtgaccaagcttcactgtgacatgtctgatgcggtaaatatattgacacacacagcacaagtgccctatgcgcgttatcaacttgagaagatagaggaaaccagaaagaaaatgaaagaacaagatcttcaggaactttatggtgtttcagaactaaacctatcatcaccttttactgattccaggaatataagtgctgatgaaatgtcaaagacctcatgtaactatggtttggacgtcaatgatgtaccacctgttaataatgaatctgaggtacaaagtggggcaggccagtgttcagattacattgacaaggatagaagttatgctgggatgcataacggggagagaaccggtggtgccttatgggatattttccgaagagaagattctgacaagatacaagattatcttaggaaacatgccacggaattccggcacatcttttgcaatcctgtgaagcaggttattcacccaattcacgatcagactttctacttaaccgaggagcataagagaaagctcaaggaagaatatggtgttgaaccctggacgtttgagcagaagcttggtgaagcggttttcattcctgctggatgtcctcaccaagtgaggaacttgaagtcttgcattaaggttgcgatggactttgtctccccagaaagcgtcaacgagtgcatgaaactgactggagagtttaggcggcttccacctgatcacagggctaaagaggataagctggaggttggcatgctatattttcagttacttggtctctgtttatgatgcgctatctgatatgacggcttacctggactattgtctccagatcaagaagattgctcttcatgctctgaaccaagtagtaaatttcttggatccttcctcggagtggtcgaagagttggtttgcccaactcaagaacaaaaaaaaggctggagctgaagaacaggagaagcctaaaaggaagcgtggccgcccatgtcgcaagtccaacgatgaagctgctggcgataggcacagaaagaagggcggccgccaaagaggtcggaagaggggatacggcaagtccaaagatggcgctggcgctgttgatgtgaagcctcctaaaaggcagcgcaatctcctgaaaggctctggcaatcgtgtaggtggttgattgtttcactgctgactgggaagatggaaggcgtaagggctgtaccgacccaaccttgacgtggttattttggtaccaggttgtaagtgtagactctagattgtagaatagaccaggcatttcgtcacccctgggcgccattatggcgtcttgcttttgttcatatgtggcgattgccggttgacaccgttttggaagaataatatgctagatgctcgttgtaccagactcttcatgtagcgggctatggtgaattgctgttcagcatgtctgatgctgatgttggtaattgacctgaatagatgtggtcatttgaactctctggattctgattttacatatccaatccattggctgaggctgagcattcttagttgaaaaacgaagcaagttatggtgcagtccatagcatgtcaaccagatttgctagctgag

SEQ ID NO: 217199 - DNA, 3574 bp, Zea Mays
ataaaatggaagacgtcctcgtctccatcgccggttgtgtctcctcctatccatttctccagtcgtttctctcccctcgcgctgcccatggccatcccggaggacctagaggggacctcgggcgatggcggggtgacgaatcgcgggagtagagggcggcgaaaaggcgcggcgaaggggcgcgggaggggcaggccgcggagcgccgacagatcctttccgccgccggcgatggctggggtggcggtcggggacagggtgctcagggagaggaggcacacgaccaacgttttctgcgagcgcgacacggatgttgacgatgagtccatttattttcaggatgatgttgagacagttaggtccaaggactcaaggagtggcgatgttttacagactgcaaaaaagaggaagaagggaggtgcagggaaggtttctgtcacaaaaaggtcgaaaagagagggtgaagaacaaaagaaggcatcaccctccaaggataaagattgtgctgaaactaatgggtgccagaggaatgataaagggagggtggtctggtgtaattcatgcagaaataagcgcttctgtgtgccatgcattgaaagatggtatcctaacttgtcagaagacgaatttgctgcaaaatgcccatattgtcgcaagaactgtaattgcaaaggatgccttagaatgagaggggttgaagagcctccaaagaaggaaatttctgaagaaaatcaaatctcttatgcttgcaatgttgtgcgcttgttgcttccctggttgagaaaactgcgacaggagcagatggaggagaagaaattggaggctaaaataaaaggtgttttggtgaatgagatgaagttggaacaagctgaatataatctagatgagcgtgtctactgcaataattgcaaaacttctatagttgattttcacagaagctgcaagtactgcttttatgatctgtgccttgactgctgtgtggagatccgcagaggtgagattcctggaggagaagagataatgagagtaaagcctgaagatagaggccgagcatatctttttggtactactaactcaaaggatgggagtaaaaggttctccatgaggaggcacagctcatccctggagaatgagccttccaatgtagtaggttctagtgagggggcaaataactctctggagctgtggaaagcagaaagtgatggtagcataccttgcccaccaaaggagctaggaggctgtggcggttcgattttggatctcaagtgtttttttccagaaaagatgctttcaaatttagaagaacgagctgacagaattatgaggagcgaagtatttgcaaaagcagtagccaaaagaagtgaccagtgcccttgttatgaccattcaggaaacataagaactcaggacgtgcgagagactgcaaatacgaaaggctcaagtgataaccatctctactgcccagttgccactgctatcaaggaggatgacttggcgcactttcagatgcactggacaaaaggcgaaccagttattgtttctgatgttctgcatttgacttctggtctaagttgggaaccattagttatgtggcgggcattgcgagagaaaaagactaatggtgacgtagaagatgagcactttgctgtcagggcattagattgccttgattggtgtgaggtggaaattaacatacacatgttttttgtgggatatatgaaaggcagaacgcatcacatgacacactggcctgagatgcttaagctaaaggactggccgccatctagttcttttgatcagagattgcctcgccatggtgctgagtttatcagtgcattgccatttcctgagtacactgatcctcgatatggtccgctgaatcttacagtcaagctacctgatggtgcattgaagccagatcttggaccaaaaacttacatcgcttatggattttaccaagagttaggcaggggtgattctgtgaccaagcttcactgtgacatgtctgatgcggtaaatatattgacacacacagcacaagtgccctatgcgcgttatcaacttgagaagatagaggaaaccagaaagaaaatgaaagaacaagatcttcaggaactttatggtgtttcagaactaaacctatcatcaccttttactgattccaggaatataagtgctgatgaaatgtcaaagacctcatgtaactatggtttggacgtcaatgatgtaccacctgttaataatgaatctgaggtacaaagtggggcaggccagtgttcagattacattgacaaggatagaagttatgctgggatgcataacggggagagaaccggtggtgccttatgggatattttccgaagagaagattctgacaagatacaagattatcttaggaaacatgccacggaattccggcacatcttttgcaatcctgtgaagcaggttattcacccaattcacgatcagactttctacttaaccgaggagcataagagaaagctcaaggaagaatatggtgttgaaccctggacgtttgagcagaagcttggtgaagcggttttcattcctgctggatgtcctcaccaagtgaggaacttgaagtcttgcattaaggttgcgatggactttgtctccccagaaagcgtcaacgagtgcatgaaactgactggagagtttaggcggcttccacctgatcacagggctaaagaggataagctggaggttggcatgctatattttcagttacttggtctctgtttatgatgcgctatctgatatgacggcttacctggactattgtctccagatcaagaagattgctcttcatgctctgaaccaagtagtaaatttcttggatccttcctcggagtggtcgaagagttggtttgcccaactcaagaacaaaaaaaaggctggagctgaagaacaggagaagcctaaaaggaagcgtggccgcccatgtcgcaagtccaacgatgaagctgctggcgataggcacagaaagaagggcggccgccaaagaggtcggaagaggggatacggcaagtccaaagatggcgctggcgctgttgatgtgaagcctcctaaaaggcagcgcaatctcctgaaaggctctggcaatcgtgtaggtggttgattgtttcactgctgactgggaagatggaaggcgtaagggctgtaccgacccaaccttgacgtggttattttggtaccaggttgtaagtgtagactctagattgtagaatagaccaggcatttcgtcacccctgggcgccattatggcgtcttgcttttgttcatatgtggcgattgccggttgacaccgttttggaagaataatatgctagatgctcgttgtaccagactcttcatgtagcgggctatggtgaattgctgttcagcatgtctgatgctgatgttggtaattgacctgaatagatgtggtcatttgaactctctggattctgattttacatatccaatccattggctgaggctgagcattcttagttgaaaaacgaagcaagttatggtgcagtccatagcatgtcaaccagatttgctagctgag

SEQ ID NO: 217200 - DNA, 3472 bp, Zea Mays
gtctcctcctatccatttctccagtcgtttctctcccctcgcgctgcccatggccatcccggaggacctagaggggacctcgggcgatggcggggtgacgaatcgcgggagtagagggcggcgaaaaggcgcggcgaaggggcgcgggaggggcaggccgcggagcgccgacagatcctttccgccgccggcgatggctggggtggcggtcggggacagggtgctcagggagaggaggcacacgaccaacgttttctgcgagcgcgacacggatgttgacgatgaggatgatgttgagacagttaggtccaaggactcaaggagtggcgatgttttacagactgcaaaaaagaggaagaagggaggtgcagggaaggtttctgtcacaaaaaggtcgaaaagagagggtgaagaacaaaagaaggcatcaccctccaaggataaagattgtgctgaaactaatgggaaaaggaagatgttgactggggataatgccctgatgtgccaccagtgccagaggaatgataaagggagggtggtctggtgtaattcatgcagaaataagcgcttctgtgtgccatgcattgaaagatggtatcctaacttgtcagaagacgaatttgctgcaaaatgcccatattgtcgcaagaactgtaattgcaaaggatgccttagaatgagaggggttgaagagcctccaaagaaggaaatttctgaagaaaatcaaatctcttatgcttgcaatgttgtgcgcttgttgcttccctggttgagaaaactgcgacaggagcagatggaggagaagaaattggaggctaaaataaaaggtgttttggtgaatgagatgaagttggaacaagctgaatataatctagatgagcgtgtctactgcaataattgcaaaacttctatagttgattttcacagaagctgcaagtactgcttttatgatctgtgccttgactgctgtgtggagatccgcagaggtgagattcctggaggagaagagataatgagagtaaagcctgaagatagaggccgagcatatctttttggtactactaactcaaaggatgggagtaaaaggttctccatgaggaggcacagctcatccctggagaatgagccttccaatgtagtaggttctagtgagggggcaaataactctctggagctgtggaaagcagaaagtgatggtagcataccttgcccaccaaaggagctaggaggctgtggcggttcgattttggatctcaagtgtttttttccagaaaagatgctttcaaatttagaagaacgagctgacagaattatgaggagcgaagtatttgcaaaagcagtagccaaaagaagtgaccagtgcccttgttatgaccattcaggaaacataagaactcaggacgtgcgagagactgcaaatacgaaaggctcaagtgataaccatctctactgcccagttgccactgctatcaaggaggatgacttggcgcactttcagatgcactggacaaaaggcgaaccagttattgtttctgatgttctgcatttgacttctggtctaagttgggaaccattagttatgtggcgggcattgcgagagaaaaagactaatggtgacgtagaagatgagcactttgctgtcagggcattagattgccttgattggtgtgaggtggaaattaacatacacatgttttttgtgggatatatgaaaggcagaacgcatcacatgacacactggcctgagatgcttaagctaaaggactggccgccatctagttcttttgatcagagattgcctcgccatggtgctgagtttatcagtgcattgccatttcctgagtacactgatcctcgatatggtccgctgaatcttacagtcaagctacctgatggtgcattgaagccagatcttggaccaaaaacttacatcgcttatggattttaccaagagttaggcaggggtgattctgtgaccaagcttcactgtgacatgtctgatgcggtaaatatattgacacacacagcacaagtgccctatgcgcgttatcaacttgagaagatagaggaaaccagaaagaaaatgaaagaacaagatcttcaggaactttatggtgtttcagaactaaacctatcatcaccttttactgattccaggaatataagtgctgatgaaatgtcaaagacctcatgtttggacgtcaatgatgtaccacctgttaataatgaatctgaggtacaaagtggggcaggccagtgttcagattacattgacaaggatagaagttatgctgggatgcataacggggagagaaccggtggtgccttatgggatattttccgaagagaagattctgacaagatacaagattatcttaggaaacatgccacggaattccggcacatcttttgcaatcctgtgaagcaggttattcacccaattcacgatcagactttctacttaaccgaggagcataagagaaagctcaaggaagaatatggtgttgaaccctggacgtttgagcagaagcttggtgaagcggttttcattcctgctggatgtcctcaccaagtgaggaacttgaagtcttgcattaaggttgcgatggactttgtctccccagaaagcgtcaacgagtgcatgaaactgactggagagtttaggcggcttccacctgatcacagggctaaagaggataagctggagatcaagaagattgctcttcatgctctgaaccaagtagtaaatttcttggatccttcctcggagtggtcgaagagttggtttgcccaactcaagaacaaaaaaaaggctggagctgaagaacaggagaagcctaaaaggaagcgtggccgcccatgtcgcaagtccaacgatgaagctgctggcgataggcacagaaagaagggcggccgccaaagaggtcggaagaggggatacggcaagtccaaagatggcgctggcgctgttgatgtgaagcctcctaaaaggcagcgcaatctcctgaaaggctctggcaatcgtgtaggtggttgattgtttcactgctgactgggaagatggaaggcgtaagggctgtaccgacccaaccttgacgtggttattttggtaccaggttgtaagtgtagactctagattgtagaatagaccaggcatttcgtcacccctgggcgccattatggcgtcttgcttttgttcatatgtggcgattgccggttgacaccgttttggaagaataatatgctagatgctcgttgtaccagactcttcatgtagcgggctatggtgaattgctgttcagcatgtctgatgctgatgttggtaattgacctgaatagatgtggtcatttgaactctctggattctgattttacatatccaatccattggctgaggctgagcattcttagttgaaaaacgaagcaagttatggtgcagtccatagcatgtcaaccagatttgctagctgag

SEQ ID NO: 217201 - DNA, 3497 bp, Zea Mays
ctcctcctatccatttctccagtcgtttctctcccctcgcgctgcccatggccatcccggaggacctagaggggacctcgggcgatggcggggtgacgaatcgcgggagtagagggcggcgaaaaggcgcggcgaaggggcgcgggaggggcaggccgcggagcgccgacagatcctttccgccgccggcgatggctggggtggcggtcggggacagggtgctcagggagaggaggcacacgaccaacgttttctgcgagcgcgacacggatgttgacgatgagtccatttattttcaggatgatgttgagacagttaggtccaaggactcaaggagtggcgatgttttacagactgcaaaaaagaggaagaagggaggtgcagggaaggtttctgtcacaaaaaggtcgaaaagagagggtgaagaacaaaagaaggcatcaccctccaaggataaagattgtgctgaaactaatgggaaaaggaagatgttgactggggataatgccctgatgtgccaccagtgccagaggaatgataaagggagggtggtctggtgtaattcatgcagaaataagcgcttctgtgtgccatgcattgaaagatggtatcctaacttgtcagaagacgaatttgctgcaaaatgcccatattgtcgcaagaactgtaattgcaaaggatgccttagaatgagaggggttgaagagcagcctccaaagaaggaaatttctgaagaaaatcaaatctcttatgcttgcaatgttgtgcgcttgttgcttccctggttgagaaaactgcgacaggagcagatggaggagaagaaattggaggctaaaataaaaggtgttttggtgaatgagatgaagttggaacaagctgaatataatctagatgagcgtgtctactgcaataattgcaaaacttctatagttgattttcacagaagctgcaagtactgcttttatgatctgtgccttgactgctgtgtggagatccgcagaggtgagattcctggaggagaagagataatgagagtaaagcctgaagatagaggccgagcatatctttttggtactactaactcaaaggatgggagtaaaaggttctccatgaggaggcacagctcatccctggagaatgagccttccaatgtagtaggttctagtgagggggcaaataactctctggagctgtggaaagcagaaagtgatggtagcataccttgcccaccaaaggagctaggaggctgtggcggttcgattttggatctcaagtgtttttttccagaaaagatgctttcaaatttagaagaacgagctgacagaattatgaggagcgaagtatttgcaaaagcagtagccaaaagaagtgaccagtgcccttgttatgaccattcaggaaacataagaactcaggacgtgcgagagactgcaaatacgaaaggctcaagtgataaccatctctactgcccagttgccactgctatcaaggaggatgacttggcgcactttcagatgcactggacaaaaggcgaaccagttattgtttctgatgttctgcatttgacttctggtctaagttgggaaccattagttatgtggcgggcattgcgagagaaaaagactaatggtgacgtagaagatgagcactttgctgtcagggcattagattgccttgattggtgtgaggtggaaattaacatacacatgttttttgtgggatatatgaaaggcagaacgcatcacatgacacactggcctgagatgcttaagctaaaggactggccgccatctagttcttttgatcagagattgcctcgccatggtgctgagtttatcagtgcattgccatttcctgagtacactgatcctcgatatggtccgctgaatcttacagtcaagctacctgatggtgcattgaagccagatcttggaccaaaaacttacatcgcttatggattttaccaagagttaggcaggggtgattctgtgaccaagcttcactgtgacatgtctgatgcggtaaatatattgacacacacagcacaagtgccctatgcgcgttatcaacttgagaagatagaggaaaccagaaagaaaatgaaagaacaagatcttcaggaactttatggtgtttcagaactaaacctatcatcaccttttactgattccaggaatataagtgctgatgaaatgtcaaagacctcatgtaactatggtttggacgtcaatgatgtaccacctgttaataatgaatctgaggtacaaagtggggcaggccagtgttcagattacattgacaaggatagaagttatgctgggatgcataacggggagagaaccggtggtgccttatgggatattttccgaagagaagattctgacaagatacaagattatcttaggaaacatgccacggaattccggcacatcttttgcaatcctgtgaagcaggttattcacccaattcacgatcagactttctacttaaccgaggagcataagagaaagctcaaggaagaatatggtgttgaaccctggacgtttgagcagaagcttggtgaagcggttttcattcctgctggatgtcctcaccaagtgaggaacttgaagtcttgcattaaggttgcgatggactttgtctccccagaaagcgtcaacgagtgcatgaaactgactggagagtttaggcggcttccacctgatcacagggctaaagaggataagctggagatcaagaagattgctcttcatgctctgaaccaagtagtaaatttcttggatccttcctcggagtggtcgaagagttggtttgcccaactcaagaacaaaaaaaaggctggagctgaagaacaggagaagcctaaaaggaagcgtggccgcccatgtcgcaagtccaacgatgaagctgctggcgataggcacagaaagaagggcggccgccaaagaggtcggaagaggggatacggcaagtccaaagatggcgctggcgctgttgatgtgaagcctcctaaaaggcagcgcaatctcctgaaaggctctggcaatcgtgtaggtggttgattgtttcactgctgactgggaagatggaaggcgtaagggctgtaccgacccaaccttgacgtggttattttggtaccaggttgtaagtgtagactctagattgtagaatagaccaggcatttcgtcacccctgggcgccattatggcgtcttgcttttgttcatatgtggcgattgccggttgacaccgttttggaagaataatatgctagatgctcgttgtaccagactcttcatgtagcgggctatggtgaattgctgttcagcatgtctgatgctgatgttggtaattgacctgaatagatgtggtcatttgaactctctggattctgattttacatatccaatccattggctgaggctgagcattcttagttgaaaaacgaagcaagttatggtgcagtccatagcatgtcaaccagatttgctagctgag

SEQ ID NO: 217202 - DNA, 3475 bp, Zea Mays
ctcctcctatccatttctccagtcgtttctctcccctcgcgctgcccatggccatcccggaggacctagaggggacctcgggcgatggcggggtgacgaatcgcgggagtagagggcggcgaaaaggcgcggcgaaggggcgcgggaggggcaggccgcggagcgccgacagatcctttccgccgccggcgatggctggggtggcggtcggggacagggtgctcagggagaggaggcacacgaccaacgttttctgcgagcgcgacacggatgttgacgatgaggatgatgttgagacagttaggtccaaggactcaaggagtggcgatgttttacagactgcaaaaaagaggaagaagggaggtgcagggaaggtttctgtcacaaaaaggtcgaaaagagagggtgaagaacaaaagaaggcatcaccctccaaggataaagattgtgctgaaactaatgggaaaaggaagatgttgactggggataatgccctgatgtgccaccagtgccagaggaatgataaagggagggtggtctggtgtaattcatgcagaaataagcgcttctgtgtgccatgcattgaaagatggtatcctaacttgtcagaagacgaatttgctgcaaaatgcccatattgtcgcaagaactgtaattgcaaaggatgccttagaatgagaggggttgaagagcctccaaagaaggaaatttctgaagaaaatcaaatctcttatgcttgcaatgttgtgcgcttgttgcttccctggttgagaaaactgcgacaggagcagatggaggagaagaaattggaggctaaaataaaaggtgttttggtgaatgagatgaagttggaacaagctgaatataatctagatgagcgtgtctactgcaataattgcaaaacttctatagttgattttcacagaagctgcaagtactgcttttatgatctgtgccttgactgctgtgtggagatccgcagaggtgagattcctggaggagaagagataatgagagtaaagcctgaagatagaggccgagcatatctttttggtactactaactcaaaggatgggagtaaaaggttctccatgaggaggcacagctcatccctggagaatgagccttccaatgtagtaggttctagtgagggggcaaataactctctggagctgtggaaagcagaaagtgatggtagcataccttgcccaccaaaggagctaggaggctgtggcggttcgattttggatctcaagtgtttttttccagaaaagatgctttcaaatttagaagaacgagctgacagaattatgaggagcgaagtatttgcaaaagcagtagccaaaagaagtgaccagtgcccttgttatgaccattcaggaaacataagaactcaggacgtgcgagagactgcaaatacgaaaggctcaagtgataaccatctctactgcccagttgccactgctatcaaggaggatgacttggcgcactttcagatgcactggacaaaaggcgaaccagttattgtttctgatgttctgcatttgacttctggtctaagttgggaaccattagttatgtggcgggcattgcgagagaaaaagactaatggtgacgtagaagatgagcactttgctgtcagggcattagattgccttgattggtgtgaggtggaaattaacatacacatgttttttgtgggatatatgaaaggcagaacgcatcacatgacacactggcctgagatgcttaagctaaaggactggccgccatctagttcttttgatcagagattgcctcgccatggtgctgagtttatcagtgcattgccatttcctgagtacactgatcctcgatatggtccgctgaatcttacagtcaagctacctgatggtgcattgaagccagatcttggaccaaaaacttacatcgcttatggattttaccaagagttaggcaggggtgattctgtgaccaagcttcactgtgacatgtctgatgcggtaaatatattgacacacacagcacaagtgccctatgcgcgttatcaacttgagaagatagaggaaaccagaaagaaaatgaaagaacaagatcttcaggaactttatggtgtttcagaactaaacctatcatcaccttttactgattccaggaatataagtgctgatgaaatgtcaaagacctcatgtaactatggtttggacgtcaatgatgtaccacctgttaataatgaatctgaggtacaaagtggggcaggccagtgttcagattacattgacaaggatagaagttatgctgggatgcataacggggagagaaccggtggtgccttatgggatattttccgaagagaagattctgacaagatacaagattatcttaggaaacatgccacggaattccggcacatcttttgcaatcctgtgaagttattcacccaattcacgatcagactttctacttaaccgaggagcataagagaaagctcaaggaagaatatggtgttgaaccctggacgtttgagcagaagcttggtgaagcggttttcattcctgctggatgtcctcaccaagtgaggaacttgaagtcttgcattaaggttgcgatggactttgtctccccagaaagcgtcaacgagtgcatgaaactgactggagagtttaggcggcttccacctgatcacagggctaaagaggataagctggagatcaagaagattgctcttcatgctctgaaccaagtagtaaatttcttggatccttcctcggagtggtcgaagagttggtttgcccaactcaagaacaaaaaaaaggctggagctgaagaacaggagaagcctaaaaggaagcgtggccgcccatgtcgcaagtccaacgatgaagctgctggcgataggcacagaaagaagggcggccgccaaagaggtcggaagaggggatacggcaagtccaaagatggcgctggcgctgttgatgtgaagcctcctaaaaggcagcgcaatctcctgaaaggctctggcaatcgtgtaggtggttgattgtttcactgctgactgggaagatggaaggcgtaagggctgtaccgacccaaccttgacgtggttattttggtaccaggttgtaagtgtagactctagattgtagaatagaccaggcatttcgtcacccctgggcgccattatggcgtcttgcttttgttcatatgtggcgattgccggttgacaccgttttggaagaataatatgctagatgctcgttgtaccagactcttcatgtagcgggctatggtgaattgctgttcagcatgtctgatgctgatgttggtaattgacctgaatagatgtggtcatttgaactctctggattctgattttacatatccaatccattggctgaggctgagcattcttagttgaaaaacgaagcaagttatggtgcagtccatagcatgtcaaccagatttgctagctgag

SEQ ID NO: 217203 - DNA, 3425 bp, Zea Mays
ctcctcctatccatttctccagtcgtttctctcccctcgcgctgcccatggccatcccggaggacctagaggggacctcgggcgatggcggggtgacgaatcgcgggagtagagggcggcgaaaaggcgcggcgaaggggcgcgggaggggcaggccgcggagcgccgacagatcctttccgccgccggcgatggctggggtggcggtcggggacagggtgctcagggagaggaggcacacgaccaacgttttctgcgagcgcgacacggatgttgacgatgagactgcaaaaaagaggaagaagggaggtgcagggaaggtttctgtcacaaaaaggtcgaaaagagagggtgaagaacaaaagaaggcatcaccctccaaggataaagattgtgctgaaactaatgggaaaaggaagatgttgactggggataatgccctgatgtgccaccagtgccagaggaatgataaagggagggtggtctggtgtaattcatgcagaaataagcgcttctgtgtgccatgcattgaaagatggtatcctaacttgtcagaagacgaatttgctgcaaaatgcccatattgtcgcaagaactgtaattgcaaaggatgccttagaatgagaggggttgaagagcctccaaagaaggaaatttctgaagaaaatcaaatctcttatgcttgcaatgttgtgcgcttgttgcttccctggttgagaaaactgcgacaggagcagatggaggagaagaaattggaggctaaaataaaaggtgttttggtgaatgagatgaagttggaacaagctgaatataatctagatgagcgtgtctactgcaataattgcaaaacttctatagttgattttcacagaagctgcaagtactgcttttatgatctgtgccttgactgctgtgtggagatccgcagaggtgagattcctggaggagaagagataatgagagtaaagcctgaagatagaggccgagcatatctttttggtactactaactcaaaggatgggagtaaaaggttctccatgaggaggcacagctcatccctggagaatgagccttccaatgtagtaggttctagtgagggggcaaataactctctggagctgtggaaagcagaaagtgatggtagcataccttgcccaccaaaggagctaggaggctgtggcggttcgattttggatctcaagtgtttttttccagaaaagatgctttcaaatttagaagaacgagctgacagaattatgaggagcgaagtatttgcaaaagcagtagccaaaagaagtgaccagtgcccttgttatgaccattcaggaaacataagaactcaggacgtgcgagagactgcaaatacgaaaggctcaagtgataaccatctctactgcccagttgccactgctatcaaggaggatgacttggcgcactttcagatgcactggacaaaaggcgaaccagttattgtttctgatgttctgcatttgacttctggtctaagttgggaaccattagttatgtggcgggcattgcgagagaaaaagactaatggtgacgtagaagatgagcactttgctgtcagggcattagattgccttgattggtgtgaggtggaaattaacatacacatgttttttgtgggatatatgaaaggcagaacgcatcacatgacacactggcctgagatgcttaagctaaaggactggccgccatctagttcttttgatcagagattgcctcgccatggtgctgagtttatcagtgcattgccatttcctgagtacactgatcctcgatatggtccgctgaatcttacagtcaagctacctgatggtgcattgaagccagatcttggaccaaaaacttacatcgcttatggattttaccaagagttaggcaggggtgattctgtgaccaagcttcactgtgacatgtctgatgcggtaaatatattgacacacacagcacaagtgccctatgcgcgttatcaacttgagaagatagaggaaaccagaaagaaaatgaaagaacaagatcttcaggaactttatggtgtttcagaactaaacctatcatcaccttttactgattccaggaatataagtgctgatgaaatgtcaaagacctcatgtaactatggtttggacgtcaatgatgtaccacctgttaataatgaatctgaggtacaaagtggggcaggccagtgttcagattacattgacaaggatagaagttatgctgggatgcataacggggagagaaccggtggtgccttatgggatattttccgaagagaagattctgacaagatacaagattatcttaggaaacatgccacggaattccggcacatcttttgcaatcctgtgaagcaggttattcacccaattcacgatcagactttctacttaaccgaggagcataagagaaagctcaaggaagaatatggtgttgaaccctggacgtttgagcagaagcttggtgaagcggttttcattcctgctggatgtcctcaccaagtgaggaacttgaagtcttgcattaaggttgcgatggactttgtctccccagaaagcgtcaacgagtgcatgaaactgactggagagtttaggcggcttccacctgatcacagggctaaagaggataagctggagatcaagaagattgctcttcatgctctgaaccaagtagtaaatttcttggatccttcctcggagtggtcgaagagttggtttgcccaactcaagaacaaaaaaaaggctggagctgaagaacaggagaagcctaaaaggaagcgtggccgcccatgtcgcaagtccaacgatgaagctgctggcgataggcacagaaagaagggcggccgccaaagaggtcggaagaggggatacggcaagtccaaagatggcgctggcgctgttgatgtgaagcctcctaaaaggcagcgcaatctcctgaaaggctctggcaatcgtgtaggtggttgattgtttcactgctgactgggaagatggaaggcgtaagggctgtaccgacccaaccttgacgtggttattttggtaccaggttgtaagtgtagactctagattgtagaatagaccaggcatttcgtcacccctgggcgccattatggcgtcttgcttttgttcatatgtggcgattgccggttgacaccgttttggaagaataatatgctagatgctcgttgtaccagactcttcatgtagcgggctatggtgaattgctgttcagcatgtctgatgctgatgttggtaattgacctgaatagatgtggtcatttgaactctctggattctgattttacatatccaatccattggctgaggctgagcattcttagttgaaaaacgaagcaagttatggtgcagtccatagcatgtcaaccagatttgctagctgag

SEQ ID NO: 217204 - DNA, 3476 bp, Zea Mays
ctatccatttctccagtcgtttctctcccctcgcgctgcccatggccatcccggaggacctagaggggacctcgggcgatggcggggtgacgaatcgcgggagtagagggcggcgaaaaggcgcggcgaaggggcgcgggaggggcaggccgcggagcgccgacagatcctttccgccgccggcgatggctggggtggcggtcggggacagggtgctcagggagaggaggcacacgaccaacgttttctgcgagcgcgacacggatgttgacgatgaggatgatgttgagacagttaggtccaaggactcaaggagtggcgatgttttacagactgcaaaaaagaggaagaagggaggtgcagggaaggtttctgtcacaaaaaggtcgaaaagagagggtgaagaacaaaagaaggcatcaccctccaaggataaagattgtgctgaaactaatgggaaaaggaagatgttgactggggataatgccctgatgtgccaccagtgccagaggaatgataaagggagggtggtctggtgtaattcatgcagaaataagcgcttctgtgtgccatgcattgaaagatggtatcctaacttgtcagaagacgaatttgctgcaaaatgcccatattgtcgcaagaactgtaattgcaaaggatgccttagaatgagaggggttgaagagcagcctccaaagaaggaaatttctgaagaaaatcaaatctcttatgcttgcaatgttgtgcgcttgttgcttccctggttgagaaaactgcgacaggagcagatggaggagaagaaattggaggctaaaataaaaggtgttttggtgaatgagatgaagttggaacaagctgaatataatctagatgagcgtgtctactgcaataattgcaaaacttctatagttgattttcacagaagctgcaagtactgcttttatgatctgtgccttgactgctgtgtggagatccgcagaggtgagattcctggaggagaagagataatgagagtaaagcctgaagatagaggccgagcatatctttttggtactactaactcaaaggatgggagtaaaaggttctccatgaggaggcacagctcatccctggagaatgagccttccaatgtagtaggttctagtgagggggcaaataactctctggagctgtggaaagcagaaagtgatggtagcataccttgcccaccaaaggagctaggaggctgtggcggttcgattttggatctcaagtgtttttttccagaaaagatgctttcaaatttagaagaacgagctgacagaattatgaggagcgaagtatttgcaaaagcagtagccaaaagaagtgaccagtgcccttgttatgaccattcaggaaacataagaactcaggacgtgcgagagactgcaaatacgaaaggctcaagtgataaccatctctactgcccagttgccactgctatcaaggaggatgacttggcgcactttcagatgcactggacaaaaggcgaaccagttattgtttctgatgttctgcatttgacttctggtctaagttgggaaccattagttatgtggcgggcattgcgagagaaaaagactaatggtgacgtagaagatgagcactttgctgtcagggcattagattgccttgattggtgtgaggtggaaattaacatacacatgttttttgtgggatatatgaaaggcagaacgcatcacatgacacactggcctgagatgcttaagctaaaggactggccgccatctagttcttttgatcagagattgcctcgccatggtgctgagtttatcagtgcattgccatttcctgagtacactgatcctcgatatggtccgctgaatcttacagtcaagctacctgatggtgcattgaagccagatcttggaccaaaaacttacatcgcttatggattttaccaagagttaggcaggggtgattctgtgaccaagcttcactgtgacatgtctgatgcggtaaatatattgacacacacagcacaagtgccctatgcgcgttatcaacttgagaagatagaggaaaccagaaagaaaatgaaagaacaagatcttcaggaactttatggtgtttcagaactaaacctatcatcaccttttactgattccaggaatataagtgctgatgaaatgtcaaagacctcatgtaactatggtttggacgtcaatgatgtaccacctgttaataatgaatctgaggtacaaagtggggcaggccagtgttcagattacattgacaaggatagaagttatgctgggatgcataacggggagagaaccggtggtgccttatgggatattttccgaagagaagattctgacaagatacaagattatcttaggaaacatgccacggaattccggcacatcttttgcaatcctgtgaagcaggttattcacccaattcacgatcagactttctacttaaccgaggagcataagagaaagctcaaggaagaatatggtgttgaaccctggacgtttgagcagaagcttggtgaagcggttttcattcctgctggatgtcctcaccaagtgaggaacttgaagtcttgcattaaggttgcgatggactttgtctccccagaaagcgtcaacgagtgcatgaaactgactggagagtttaggcggcttccacctgatcacagggctaaagaggataagctggagatcaagaagattgctcttcatgctctgaaccaagtagtaaatttcttggatccttcctcggagtggtcgaagagttggtttgcccaactcaagaacaaaaaaaaggctggagctgaagaacaggagaagcctaaaaggaagcgtggccgcccatgtcgcaagtccaacgatgaagctgctggcgataggcacagaaagaagggcggccgccaaagaggtcggaagaggggatacggcaagtccaaagatggcgctggcgctgttgatgtgaagcctcctaaaaggcagcgcaatctcctgaaaggctctggcaatcgtgtaggtggttgattgtttcactgctgactgggaagatggaaggcgtaagggctgtaccgacccaaccttgacgtggttattttggtaccaggttgtaagtgtagactctagattgtagaatagaccaggcatttcgtcacccctgggcgccattatggcgtcttgcttttgttcatatgtggcgattgccggttgacaccgttttggaagaataatatgctagatgctcgttgtaccagactcttcatgtagcgggctatggtgaattgctgttcagcatgtctgatgctgatgttggtaattgacctgaatagatgtggtcatttgaactctctggattctgattttacatatccaatccattggctgaggctgagcattcttagttgaaaaacgaagcaagttatggtgcagtccatagcatgtcaaccagatttgctagctgag

SEQ ID NO: 217205 - DNA, 1833 bp, Zea Mays
cttctctttcccgttttttcccccccttccttgtcggaatcatctatttctgggctggccggaaagcgagcgctcgagagcgaggggaaatcaggtggaggaagcttaaaattagaagtccagcgcaataattgagcaggcaggcggcaggcccctcctaatcactgccctaaacacatgtgtgccgggccgaggtcacaatcgatgcacggaggaggatgccgccgtagctgcggagattgataatataaagcgggcggagaccgccggcccctctggcctcgctgctcctccccccttcctccccccacatgcgctgcccccgcccggccctgccctgccctgctgcgcccaagctgaatctccgcacagacaattagagtagctgcattggcggggaaagcgcaagaagctcagcagaaatggcggagcaggcaggcgccggaaggtactggtgccacatgtgcgccgcggtcgtgagccccgcggagggcgaggcggaggtgaagtgcccgcattgccacagcggcttccttgaggagatggagaccgtccgcggcacgcccgcggccgatgacggcgacggtgacggcgcggtggctcaagtgtaccccggcgccgaccgcccgagctccatctgggcgcacgctatcctcagcacggtcgacagctccgtccgccgccgccgcaaccggcggcagacggaggccgccggcgacgtctacgacgggaacgaccccgagttcgccctgcgccggcgtcgcgtcaccgcgttcctgcggctcctgcacgagctccgggaccgccagctgcagcggctggaggctgctgccggggtcgccctcgaaggcgaccagctgacccctttcggtcggagcctcttcatcggcgcagctggcggcggcgagcatggcgtggcgctgggcgactacttcctcggccccagcctcgacgctctggtgcagcagctcgccgagaacgacgcgggacggcacgggacgccgccggccaagaaggaggccgtggaggcaatgccgaccgtggaaatcgccggtggcaatggcaacgatgacgacacggccagctgccccgtctgcctggaggactacgcggccggcgagcgcgctcgggagatgccctgcaggcacaggttccactccaattgcatcgttccgtggctcgagatgcacagctcctgccctgtctgccggttccagctgccggccaccgacgacaagggctcatgcagcagcggcgacggtggttttgtcagtgtcgacgcggatggtgaaggcaatgacaacggcggcggcgatggtagggcaagtattccaggcaatgcggagcccgccgaagccgaagagaacggcagccggttgccgccatccttgcagtggctcaacagcctgttctcgccatcggcgcagtcctccggtagcggcagcggcagttcgcatcattgggagaattgaacaataatgcaatataagaatggatgattgttgctgcttgagcccattggtgccaatgtacataggaagagcaggagcatgccggcatgaaaaatttggagcctttttttcagtgtgtcaatttggctcatgtaatgttctctctgatatagttgtcatggctataaaaagaacaaaaattggcaagtatatgaacttgcctcttgcgtgaactgggtgtgaatatatccttggactcgatgaagaaaccgaatcaggacgactacacgtcctaatcggagacccaaacctcatgtaattgtggcctcgagtgcactatataaactaaggtagaacttgttggccacttgttttttattac

SEQ ID NO: 217206 - DNA, 1682 bp, Zea Mays
cgatccaatagctgagattcagcttgtggatccatctgttcatctatttactggtacggtatcgccagattaggagcttctgtgcctgctacctgtggatccatctgtgtggtaaaagatcatcgagctgaatctccgcacagacaattagagtagctgcattggcggggaaagcgcaagaagctcagcagaaatggcggagcaggcaggcgccggaaggtactggtgccacatgtgcgccgcggtcgtgagccccgcggagggcgaggcggaggtgaagtgcccgcattgccacagcggcttccttgaggagatggagaccgtccgcggcacgcccgcggccgatgacggcgacggtgacggcgcggtggctcaagtgtaccccggcgccgaccgcccgagctccatctgggcgcacgctatcctcagcacggtcgacagctccgtccgccgccgccgcaaccggcggcagacggaggccgccggcgacgtctacgacgggaacgaccccgagttcgccctgcgccggcgtcgcgtcaccgcgttcctgcggctcctgcacgagctccgggaccgccagctgcagcggctggaggctgctgccggggtcgccctcgaaggcgaccagctgacccctttcggtcggagcctcttcatcggcgcagctggcggcggcgagcatggcgtggcgctgggcgactacttcctcggccccagcctcgacgctctggtgcagcagctcgccgagaacgacgcgggacggcacgggacgccgccggccaagaaggaggccgtggaggcaatgccgaccgtggaaatcgccggtggcaatggcaacgatgacgacacggccagctgccccgtctgcctggaggactacgcggccggcgagcgcgctcgggagatgccctgcaggcacaggttccactccaattgcatcgttccgtggctcgagatgcacagctcctgccctgtctgccggttccagctgccggccaccgacgacaagggctcatgcagcagcggcgacggtggttttgtcagtgtcgacgcggatggtgaaggcaatgacaacggcggcggcgatggtagggcaagtattccggaaaaaaatttgttgcagccgggctgcaaacggcctggtttgcagcccggctgcaacaaatttttttccagtattccaggcaatgcggagcccgccgaagccgaagagaacggcagccggttgccgccatccttgcagtggctcaacagcctgttctcgccatcggcgcagtcctccggtagcggcagcggcagttcgcatcattgggagaattgaacaataatgcaatataagaatggatgattgttgctgcttgagcccattggtgccaatgtacataggaagagcaggagcatgccggcatgaaaaatttggagcctttttttcagtgtgtcaatttggctcatgtaatgttctctctgatatagttgtcatggctataaaaagaacaaaaattggcaagtatatgaacttgcctcttgcgtgaactgggtgtgaatatatccttggactcgatgaagaaaccgaatcaggacgactacacgtcctaatcggagacccaaacctcatgtaattgtggcctcgagtgcactatataaactaaggtagaacttgttggccacttgttttttattac

SEQ ID NO: 217207 - DNA, 2434 bp, Zea Mays
cggccatcgcataggtgacgccaccgtccctgtcccgccgtcgctacgaatttgctacacctacacgttttcatttgctggtttcgccgatgatctgatcacggcgcgctacttcgcctacttgcctgcttcagcttcaatccatcggggggttcctttcagttaataagatcgatttgaaaagcgcacccggcaacctgctccgctcctgcgctgtttaggttccggcctgtgtcaaagcgtgcatctcacgcgaggcgcaccaaggccggagccctggccacctagggtcacctccctgcgatcgggccgcggcgacggggacggccgcgatgggcttcgagcgtgtggagctgcgttgccccagggacctggacccgcgcccgagctggacgctcggcgacgtgctcgccgagctcgacgcgctagacgccacccgccgcgctgcgccgcccacgcccctgaagcagccgccccattgggttaacggcgtcggtacgagggagaaggcatttgtgatgcgggttgatggctacgacgaagacgacttagaagatgaagacgatggtacaagtgctgggaagtcccgggctctcatggctaaaggagcaaggttctcgtgtaacgatctccaatcaagtgattcagaggatgaattagatggccaagttaccccatacaacttaatggagaaaagggacctagcgaagagcattcttcttgagcttgaaagcgagcatcatctaaaagttcaagaagaagttagaagtaagctagctttgttggaggtatgccaccaaaatgaaatccatagaaccatttctgcatttgcccgacttcagaaatatgcagaatcaagaaaagagatcgacagaagacttgatgtacacttccagagaagaatggcagaagtactcgataagcacttatctatggtccaaagggatcatgaacaaaaatcccagattgttgaacgtcgaataagagatgatgcagctcttgaagaagctaaaagaaaagagcaagctgtcaaggaagaaaagttaaggcaggaaagagcccagcaagaagcagaggctaggcagaaggaagctgcaaagttagcagctgaagcgcgaaaaacagcatttgaggctgctaaaaaggaagcggcagaaaagcaggctgctaaattgagagatgcagcagcaacttcccaatctagtccagatttgcagaataatattgcagacatcaaagtttttggcgttaaatatgcattagaagcagagtcacggaggtatgcattagtacagaatcaagtgccagaaaacattcatcacaacaaggaattcagcaaatatgaccgacaaattgccaaatccataagtaaacttatgccaactactgatagtgtcagagcaagggctagtgagcttattaaagctttagatggacaggattgtccccgtccaatctcttgttgtctatttgcaaacaagattatttctattgtcaagagtagaaatacaaaggacagaaccttcggaaatttggcctttgcgtgtggatatgtcatgctattagtcacaaatcaggtaccagatgcaatggactatcttttagctgagttcaacagagtttgcatatacacggttccaaagcatttgcatgctttaaataagcacgaaatagagattattacagactgataggttaccaggaagaaaatggacaattcgagagcactgaaagttatctaacatatgtcgttgcatatgtcaaattgtacgcggcaatgattcaaacagaaatcaagggtgtacgccatcctcatggcttagctgagggatggaaatggctcgccatgttcctcaattctcttccagctactacagccactgcttgtgcccttcacgccttcctcaagatggctggttttgcacttcacaagaaatatggatcgcagttcatgaaaatcctatatgtgatttcacggtactttttaccggctttgaaggaacaaggcaacaagatgcaggctgaggctgtcaacaatctacagaattatctgaacgacaagatctacctggaggaaccagaagggcagtacctcgtccagcaattactatcgaaagagttgttcatgtaaagttcaaaacaccagatcgtgtgattgactctgaagggcgcacctcgtataagctactactatcgaaagagctgttcgtgtttcagaaacgcaagcgagccttgtagagatgacctgcaaggaaatcagtaccaaatctccccaacatttgtagtcttaaccgtagaggagatgaccctgcatgaaatatattgaatattatttgtacgtgctattaccttagtgtttgaaattattgattatttatttttaactcttcatttatcaaattggcataatttaattcacatgtatatttacgat

SEQ ID NO: 217208 - DNA, 2123 bp, Zea Mays
gcggcaccgccgatcccctcgccgtcgattcatatcacccctttcgattcaagcgacgccgcggccgccggccatcgcatagtgattcagaggatgaattagatggccaagttaccccatacaacttaatggagaaaagggacctagcgaagagcattcttcttgagcttgaaagcgagcatcatctaaaagttcaagaagaagttagaagtaagctagctttgttggaggtatgccaccaaaatgaaatccatagaaccatttctgcatttgcccgacttcagaaatatgcagaatcaagaaaagagatcgacagaagacttgatgtacacttccagagaagaatggcagaagtactcgataagcacttatctatggtccaaagggatcatgaacaaaaatcccagattgttgaacgtcgaataagagatgatgcagctcttgaagaagctaaaagaaaagagcaagctgtcaaggaagaaaagttaaggcaggaaagagcccagcaagaagcagaggctaggcagaaggaagctgcaaagttagcagctgaagcgcgaaaaacagcatttgaggctgctaaaaaggaagcggcagaaaagcaggctgctaaattgagagatgcagcagcaacttcccaatctagtccagatttgcagaataatattgcagacatcaaagtttttggcgttaaatatgcattagaagcagagtcacggaggtatgcattagtacagaatcaagtgccagaaaacattcatcacaacaaggaattcagcaaatatgaccgacaaattgccaaatccataagtaaacttatgccaactactgatagtgtcagagcaagggctagtgagcttattaaagctttagatggacaggattgtccccgtccaatctcttgttgtctatttgcaaacaagattatttctattgtcaagagtagaaatacaaaggacagaaccttcggaaatttggcctttgcgtgtggatatgtcatgctattagtcacaaatcaggtaccagatgcaatggactatcttttagctgagttcaacagagtttgcatatacacggttccaaagcatttgcatgctttaaatgtaagtctgcatggtatgactctgtaatatatttggaatttgtttatttctgactcttatatgggatgccatgagaaaacgccctaatagacacagcaatgctcagaattatttataatgcatttttaacaattgtatgcagcagatttgtggaccaaaatgctgtgacatactgtcacccactgttttatataaatgtatcgagctttggatttttttctcacgatatctgtaattttataggcagaagcacgaaatagagattattacagactgataggttaccaggaagaaaatggacaattcgagagcactgaaagttatctaacatatgtcgttgcatatgtcaaattgtacgcggcaatgattcaaacagaaatcaagggtgtacgccatcctcatggcttagctgagggatggaaatggctcgccatgttcctcaattctcttccagctactacagccactgcttgtgcccttcacgccttcctcaagatggctggttttgcacttcacaagaaatatggatcgcagttcatgaaaatcctatatgtgatttcacggtactttttaccggctttgaaggaacaaggcaacaagatgcaggctgaggctgtcaacaatctacagaattatctgaacgacaagatctacctggaggaaccagaagggcagtacctcgtccagcaattactatcgaaagagttgttcatgtaaagttcaaaacaccagatcgtgtgattgactctgaagggcgcacctcgtataagctactactatcgaaagagctgttcgtgtttcagaaacgcaagcgagccttgtagagatgacctgcaaggaaatcagtaccaaatctccccaacatttgtagtcttaaccgtagaggagatgaccctgcatgaaatatattgaatattatttgtacgtgctattaccttagtgtttgaaattattgattatttatttttaactcttcatttatcaaattggcataatttaattcacatgtatatttacgat

SEQ ID NO: 217209 - DNA, 2533 bp, Zea Mays
ctctccctctcgctctccctctgcggtgcggcaccgccgatcccctcgccgtcgattcatatcacccctttcgattcaagcgacgccgcggccgccggccatcgcataggtgacgccaccgtccctgtcccgccgtcgctacgaatttgctacacctacacgttttcatttgctggtttcgccgatgatctgatcacggcgcgctacttcgcctacttgcctgcttcagcttcaatccatcggggggttcctttcagttaataagatcgatttgaaaagcgcacccggcaacctgctccgctcctgcgctgtttaggttccggcctgtgtcaaagcgtgcatctcacgcgaggcgcaccaaggccggagccctggccacctagggtcacctccctgcgatcgggccgcggcgacggggacggccgcgatgggcttcgagcgtgtggagctgcgttgccccagggacctggacccgcgcccgagctggacgctcggcgacgtgctcgccgagctcgacgcgctagacgccacccgccgcgctgcgccgcccacgcccctgaagcagccgccccattgggttaacggcgtcggtacgagggagaaggcatttgtgatgcgggttgatggctacgacgaagacgacttagaagatgaagacgatggtacaagtgctgggaagtcccgggctctcatggctaaaggagcaaggttctcgtgtaacgatctccaatcaagtgattcagaggatgaattagatggccaagttaccccatacaacttaatggagaaaagggacctagcgaagagcattcttcttgagcttgaaagcgagcatcatctaaaagttcaagaagaagttagaagtaagctagctttgttggaggtatgccaccaaaatgaaatccatagaaccatttctgcatttgcccgacttcagaaatatgcagaatcaagaaaagagatcgacagaagacttgatgtacacttccagagaagaatggcagaagtactcgataagcacttatctatggtccaaagggatcatgaacaaaaatcccagattgttgaacgtcgaataagagatgatgcagctcttgaagaagctaaaagaaaagagcaagctgtcaaggaagaaaagttaaggcaggaaagagcccagcaagaagcagaggctaggcagaaggaagctgcaaagttagcagctgaagcgcgaaaaacagcatttgaggctgctaaaaaggaagcggcagaaaagcaggctgctaaattgagagatgcagcagcaacttcccaatctagtccagatttgcagaataatattgcagacatcaaagtttttggcgttaaatatgcattagaagcagagtcacggaggtatgcattagtacagaatcaagtgccagaaaacattcatcacaacaaggaattcagcaaatatgaccgacaaattgccaaatccataagtaaacttatgccaactactgatagtgtcagagcaagggctagtgagcttattaaagctttagatggacaggattgtccccgtccaatctcttgttgtctatttgcaaacaagattatttctattgtcaagagtagaaatacaaaggacagaaccttcggaaatttggcctttgcgtgtggatatgtcatgctattagtcacaaatcaggtaccagatgcaatggactatcttttagctgagttcaacagagtttgcatatacacggttccaaagcatttgcatgctttaaatgcagaagcacgaaatagagattattacagactgataggttaccaggaagaaaatggacaattcgagagcactgaaagttatctaacatatgtcgttgcatatgtcaaattgtacgcggcaatgattcaaacagaaatcaagggtgtacgccatcctcatggcttagctgagggatggaaatggctcgccatgttcctcaattctcttccagctactacagccactgcttgtgcccttcacgccttcctcaagatggctggttttgcacttcacaagaaatatggatcgcagttcatgaaaatcctatatgtgatttcacggtactttttaccggctttgaaggaacaaggcaacaagatgcaggctgaggctgtcaacaatctacagaattatctgaacgacaagatctacctggaggaaccagaagggcagtacctcgtccagcaattactatcgaaagagttgttcatgtaaagttcaaaacaccagatcgtgtgattgactctgaagggcgcacctcgtataagctactactatcgaaagagctgttcgtgtttcagaaacgcaagcgagccttgtagagatgacctgcaaggaaatcagtaccaaatctccccaacatttgtagtcttaaccgtagaggagatgaccctgcatgaaatatattgaatattatttgtacgtgctattaccttagtgtttgaaattattgattatttatttttaactcttcatttatcaaattggcataatttaattcacatgtatatttacgat

SEQ ID NO: 217210 - DNA, 1888 bp, Zea Mays
gtcattttagcccagagatcagtcatcaggttttgctgcgacggcgtgtcctctctcctttaggatcagggtttcgacgagcggcgatatgtgattgaacttatggatggacaggtggagacctttgtcggagatgaggaaggcgggtcgcctcaagttccttacgatggggagcagccaacgctgtatgatagtgtcgcgaagcagtacagtgaagagctaggtgaccagtacaacgagcaacctcgtgcccaatatgatgaagggtctgggaatccgtataatgattatgaagagcaagcaaacctgtacagtgaggaaactgggaatcggtacaacgaggacccagcagattcttaccaggaagagcaggagaatgcattcagtgggggcataaaccaacaggacaacttgcaggtcaacaatgttgacgataacaaatggcctggatggcctggagagagtgttttccgcatactcgttccagctcagaaggttggagctatcattggccgcaaaggggagtttatcaagaagatgtgcgaggagactaaagcgcgcatcaaaatacttgatggcccacctggtgtaccagaaagagcagtaatgatttcagcaaaggatgaaccagatgcacctctctctccagctatggatggcttacttagagttcataaaagaataactgatagttcagatggtgaatctagtcaacctcaacgaagtgctggtaatataggaccaacacgacttctagtgccatcttcgcaagctggcagccttattggcaagcagggagcaactattaaatcaatacaagattcttcaaaatctattgtccgtattgttgagaatgtgcctcctgttgcactaaatgatgatagagttgtggagatacaaggcgagcctcttggtgtccaggaagcagtggaattaatatcgagtcacctgagaaaatttcttgttgaccgcagtgttctaccattgtttgaagcgcatatgaaaatgcatggtatgccgagggagcaaccagtgccacctccccagcattggggccctcctcaaacctggatccgccctccaaacattcctccaggtggtcctggttttggaggaaatccacagttcatgcatccaaggccgcaagacagttactatccttctcctgatgtcccccatatggaaaagcagccgcactacggtatttctgcatacggccgggaggccccaccaagtggtgcttctgctacagggaatcaaccaccctctcatgcaggttctcaggtggctcatgacatgcacattccccttgcctacgctgatgctgtgattggggcagctggtgctagtatcagttatatccgtagacacagcggcgcaacagtaactattcaagagagcagaggtgcacccggagagatgaccgtggagataactgggactgcagcccaagttcaaactgcgcagcagctgatccagaatttcatggcagaagctgccccaccaccaccaggcccggcgccagcttccaaccctcccgcaccaccagttgatccaagctatggctcttacccaccaccatatggagcagctccttcttatggttcttccgcagctgctgggcctccgcagtacaatggtgggaactacggtggcccgacctaccctcccagctatggctattagtagacaagtgtagcataccaaggatttgccccccccccccccctctttttttccgaataacgacagtgttgggcttgacatccccctgcccctggttgggagtgcagtttttaaaaccacaatttttcaataccagtctgataattgctatgatataactatggtctttttatattcgtcaatcgaacacccgtttggtgtc

SEQ ID NO: 217211 - DNA, 1690 bp, Zea Mays
ttgcatgacaaggtggtggtcgtggtggaggaggaggtggagatggaggtttcatatgttctctaggctggggcaaattttgtggcaatgatgggattggaaggcctccatgttctttatcatcggttttagaggccaagagtccattggttgtctcactttgtgatatctccaccttgaatggcctcaaatgaatgggtaatgctgtttgatctaaagcctgctcgcaatttacttgctctgcagatattgaacctgaggaattatatgttacaatatgaaatattgggtacggaggtgctgcagtgcttccaaacacatgctgaactgtatactcagaatgttttgatgaagataattcaacaagtaggtggaacagcagatttgtgttctggtagcattgctgcttctttatatggacaatctgaagatggatttgagtgtaccagtggaactgatccactatcactgcatatagttggcactggtaattctggtggtggtgttactggaggaaaaggtggcagcggcagtggtggttcaccatgttgtaatgttttgggaggtgaagaacaagtcaacatgtgcaacagagaatttggatcttcattagtaattgggaaatccatgccagttactatattaggtctacttgttacttcctcatctatgaaatcagagattcctaaggaactttctgctgcagctatactacctttagagggtgaagttactgaggaatcatctaagtggagaacagtttgtctacaacctggactaaaggaacaagacccatcagctcttatttgttcatgttcagatattagggtgctcgaacaattttgggtgcaagaatcatgtggaggtggcagtggaggtgggtatgggggttgaggggcatatttgttagaagcaagcaaagttagactacctgaatgtagatacttttcctctgtcattgatgggtgaagatattgatgtggtggtattaggggaggtttaacatgctcttcatgtttggacgatcgtgaagaatacattgacatatctatgtattcatcaaatgataatgaaggtagagatgaaactgttcttattggtcgtagaggaggatgtactagagaaattttgggtgatgatctcaggggtatgtagagatgagatggtggaagcacagaagatatagctggatcatcccttccacttgtagaagtaacagagttctgtttagattctgtttgtgatggagaaaaaaacgacaaatctgtggatgcaccacgaagcagattgcgcctgggagatgatggagcaaaaagactagatgtcaacaatggttgaaaaggttttttctttagcaccaatcgagatgaatctgttgtatctgtatttgcattcatggaagttgaagcatggtttattgtcaagctagattcttctggtagaatgttcacacaagacatattagaagagtggctcctggagtcaattcccgccccttgttctgcagtgccattactactgcaagcatgaagctgatcgatatttttcttggcagaacttagccccgaagaagtgcttgaacagtgaagatatggtattcctgataatgaaagttcaaacccattattctcatctgtgggctcagtcacttctgaatttgtgtctctgatggtaaggttttcttcgttgc

SEQ ID NO: 217212 - DNA, 2876 bp, Zea Mays
tatcaatgatgccaaccagctgcctgcagatgtgggaaggactgattcagaaggctaaagatggaggcttggatgtgattcagacctatgtcttttggaacggacatgagcctacgcctggaaattactatttcgaagagaggtacgatttggtcaggttcgtaaagacggtccagaaggccggcctgtttgtacatctccgcatcggcccctacatctgcggcgagtggaacttcggtggcttcccagtttggttgaagtatgtaccaggcatcagcttcaggacagacaacgaacctttcaagacggcaatgcagggtttcactgagaaaattgttggaatgatgaagagcgaaaacctctttgcatcccaaggtggcccaattatcctctctcagattgagaatgagtatgggccagaaggcaaggagtttggtgccgcaggtcaggcatatatcaactgggcagcaaagatggcagtgggactggacactggtgtgccgtgggtgatgtgcaaggaggaggatgcacctgatccagtgatcaatgcgtgtaatggtttctactgtgatgcattttctcctaacaaaccttacaagcccacaatgtggactgaagcttggagtggctggttcacagaatttggtgggaccatccgccaacgaccggttgaagatctcgcatttgctgttgctcgatttgtacaaaagggtggctcttttatcaattactacatgtatcatggaggaacaaattttggacgcactgctgggggtcccttcatcacaacaagctatgattatgatgctccaattgatgaatatggacttattagagaaccaaagcacagtcatcttaaagaactccacagagctgttaagttatgtgaacaggctttggtttctgttgaccccacaattactacccttggaactatgcaagagctttccttgcaaactacaattctaactcccatgcaaaagttgtgttcaacaatgagcaatacagcctcccaccttggtcaattagcatccttcctgattgcaagaatgtagtttttaacagtgccacagttggtgttcagacatctcagatgcaaatgtggggagatggtgccacatcgatgatgtgggagaggtacgatgaggaggttgattctctggcagctgctccattgctcaccacaactggtttgcttgagcagcttaacgtcaccagagacagcagtgattatctgtggtacattaccagtgttgacataagcccatctgaaaactttctacaaggtggtggcaagcctccgtctctgagtgttcagtctgctggtcacgccttgcatgtctttgtcaacggacaacttcaaggttcttcgtatggtaccagggaggatcgaagaattaaatataatggcaatgttaaccttcgagctggtactaacaaaatcgcactactgagtgttgcttgcggattgccgaatgttggagtgcattatgagacgtggaacaccggcgtcggtggtcctgtcgtgcttcatggattgaatgaaggttcgcgagaccttacttggcagacctggtcctatcaggttggcctgaaaggcgagcagatgaatctgaactccgtagaaggctcaggctcagttgaatggatgcaagggtcactgatagctcagaagcaacagccgttggcctggtataaggcttacttcgagactcccagcggggacgagccattggctttggatatgggcagcatgggcaagggacaggtctggataaacggacaaagcattggacgctactggacagcgtatgcagacggggactgcaaagggtgcagctacaccgggaccttccgggcacccaagtgccaagcaggctgcggccagcccacccagcgttggtaccatgtgccaaggtcctggctgcagcccagcagaaacctactggtagtcttggaggaactgggtggtggggactcgtcgaagatcgccctagccaagaggtcggtctcgagcgtctgtgccgacgtgtccgaggaccatccgaacatcaagaagtggcagatcgagagctacggcgagcgcgagcaccgcagggccaaggtgcacctgaggtgcgcgcacgggcagtccatctccgcgatcagattcgcgagcttcgggacgcctgtgggcacctgcggcaacttccagcagggaggctgccactcggctagctctcacgctgtgctagagaagagatgcattgggctccagagatgcgtcgtcgccatctcccccgacaacttcggaggagacccctgcccgagcgtgacgaagagggtggcggtcgaggcggtgtgctctcccgccgcttaggcttagcctgcccgcccgcccctacttctccgactcaccgagcaacggatttgaaggccgaaaccgatgtgtgtggagagtggaactgtaagtatcgacttgcattggtcggagggaggtttagcattcgtccgtctgattccggattaggattggtgctctgctacgtctccatgaactgttcaaagcggccagctgggtccagggatggagctgtagagagagtaggagtagaagactgatcatgcgttcttttgctgttgtgtgttagtagtagctgtgtacctacccgtgacacatctcgtttttcttgaaacggaggaagacgcaggtgaagcgtgcatcgtgcctttgttgttgcaattgtgttgtgtgtggtgggggaggaaaaaaaaagaacaggctttgatgttctcagaagctcaagttcagatctgatagtgcatggaaaatcatgaaccctgaggaatcgattttcgcactctgatttgtaatgctgtactgtaattagacagac

SEQ ID NO: 217213 - DNA, 1075 bp, Zea Mays
cccccgccggcttcctcaccaacgggtacggcggcatgctccgtgcgggcatgggcatggccggcggcttcaggaacggcgtcagcgacgcgcggctcaaggggcagctgagcttcccgtcccggcaggggtcggtgatgtcgcagatctcggaggtgggcagcgaggagctcgacggcggaggcggcggcagccccgaggcggccggcagcaacgccagcggcgcgccgcgcggctacgtcggcatcccggggtacccgatgggcggcggcacgtccggcgcctggtcggacgagccgtcgccgtcgccgacgtccggcgcgaagcgccgcccccgcgactccggtcccgcgccgcagaacgtgcagcagcaaccgctggcgccgcagctcagcctgcccagcggcggcaagccggcctcggcggagatggcggcgatcgagaagttcctgcagttccaggacgccgtcccctgcaagatccgcgccaagcgcgggtgaggaggacgaagatcagcgagcggatacggaagctgcaggagctcgtgcccaacatggaaaagcaaaccaacactgccgacatgctggatctggctgtggactacatcaaggatcttcagaagcaggtcaaggtgctgaacgacggccgcgccaactgcacctgctccggcggcggcaagctgcaggacccgttcaccagttagaaggagcagcagccggcgcgcgcgtagcagtgcgcggccatgcatggcccgccgcaaggccggcctgactgacgcctccgtgccggccggcggctaagctcgcttcgagcgctcctcctcgattggagtaagagtcgtcgaagtatagtagtatcagtgtacgtgttcggctttacatagttaactgaatgagtagtacgtagtctgttatacatgcaagttcattagcaggcaggccccacgtacgtataccagtgacacagctgcgtcagttatctgtggctcttgcagcatgtgtgtctctgtcatcgtttgcacttactgctcggatcctacgcgacacgtacatgcatatgtacgcatgcatgcaca

SEQ ID NO: 217214 - DNA, 1109 bp, Zea Mays
cccccgccggcttcctcaccaacgggtacggcggcatgctccgtgcgggcatgggcatggccggcggcttcaggaacggcgtcagcgacgcgcggctcaaggggcagctgagcttcccgtcccggcaggggtcggtgatgtcgcagatctcggaggtgggcagcgaggagctcgacggcggaggcggcggcagccccgaggcggccggcagcaacgccagcggcgcgccgcgcggctacgtcggcatcccggggtacccgatgggcggcggcacgtccggcgcctggtcggacgagccgtcgccgtcgccgacgtccggcgcgaagcgccgcccccgcgactccggtcccgcgccgcagaacgtgcagcagcaaccgctggcgccgcagctcagcctgcccagcggcggcaagccggcctcggcggagatggcggcgatcgagaagttcctgcagttccaggacgccgtcccctgcaagatccgcgccaagcgcgggtgcgccacccacccgcgcagcatcgccgagcgggtgaggaggacgaagatcagcgagcggatacggaagctgcaggagctcgtgcccaacatggaaaagcaaaccaacactgccgacatgctggatctggctgtggactacatcaaggatcttcagaagcaggtcaaggtgctgaacgacggccgcgccaactgcacctgctccggcggcggcaagctgcaggacccgttcaccagttagaaggagcagcagccggcgcgcgcgtagcagtgcgcggccatgcatggcccgccgcaaggccggcctgactgacgcctccgtgccggccggcggctaagctcgcttcgagcgctcctcctcgattggagtaagagtcgtcgaagtatagtagtatcagtgtacgtgttcggctttacatagttaactgaatgagtagtacgtagtctgttatacatgcaagttcattagcaggcaggccccacgtacgtataccagtgacacagctgcgtcagttatctgtggctcttgcagcatgtgtgtctctgtcatcgtttgcacttactgctcggatcctacgcgacacgtacatgcatatgtacgcatgcatgcaca

SEQ ID NO: 217215 - DNA, 5052 bp, Zea Mays
cctccgaaaggccttaaccccaaacgaaaccaccctccgcgacaaagccgactactataggctgtcgtagccaacaagcgcgacatcctccgcccccacctcgccgccggcgatggagccgccttcgcctccggcgacccactccgcggccgtccgtgtcctctcccgcactcctccgccgacctccccgaacccctcctccacgggcccggcggccccgtcgcccgcctcccgcgacggggtcgtcgccgtcggcttcgtgggcgccgcggggaccgcccgcctcgcggaccggatcctcgacgcccacgtcttctctcccggtggctcggcggggagcctcgcgggaagggtaaggtaccaccgcgacgccggcaagaggatggtgttccttcacctcacgccgccgccgcccgcgccgctcgaggcggtggcaggatgctgcgatgacggcgaactaccggagatgctcttcatgttctctgtctgccacgtaattatatttctgcaacaaggcttcagatttaacacacaaaccttaaagaagttccgactgctgcaatcttcaaagcatgctctcgctccatttgtcaagccattggtggcagctgcaatgcctgccagaactgttgcctctgacaccccaacaagagcaacccacagggcttcttccgtctcccctccaacacgccgaggaggtcacgctgggcgtcagtcctcggctatctcacttatgtctggaaccagttcaactccttctgtcttgccaggccaatgcattcctgtattgctctttgtctttgaggatgatgcggttgatgtttcaagtgctgcagcaagtcccgatgatataggtgatgcatcttcatcaaatcagggttctacccctgatggactaccaaaacagagcttagcttcaaaaagttctggttcagtaattatgctttcccgggcagcaaacaaatctgagggcagttcaggcaaaaaactgcattcgtcactggagggacagatccgtgtcttgatcaagaagtgcagggtgcttgcaggcatggagcctggacatattggcccaaggggcgtaagtaacatgagtcatcatttacccctgttctcactcgatacctcgagggtagttgcactgttggaacggtatattaataagaaacaggaaccactggacaccattgcaggactatttgaagattctttgtgctccaaatcgccattggatattctttcgctcgaaaacaactaccatccaacaaaccatgatgactttcagttgatcaaggattttatatttcggcagtctgatgcgctgagagggaaagggggatattcaagcaatgcaagtgccgggtctgttgcaggtgttggcatggtggctgctgctgctgcagcagctgcagcatcagctgcatctgggaaaccagttaatgcacctgacctccctacttttgataaatggttgtccataagtacctctattctaactgcactgttgagtggaagaaatgtgctgagatgtcagtctgaaagcaagactcatacaagtcctactgagaagaatggccaacttcctgtaggatctaatgctattgagatcgcattatcgtgcttggaaagtaacaatgggctgaacatgaaattttcttcatcatggtgtcaaagggtgcttccagctgctaaggagatatacctgaaaggtttgcctgccttttaccccacaagaatgcatgaagtgcagctacagaaggcattgcggtcctttggctcaatggttaaaggaccagcagtcagggtattctcaaagaagctagaagatgagtgccgggcaatatgggaatctggaaggcagcaatgtgacgctgttagcctaactggcagaccatgtaagcaccgcaggcatggcgatttcttttcatcagatgcaatggagcaacattctagtggatatgtcttcctccatgcatgttcctgtggccggtcacgccgccttagagatgatccttttgactttcagacagccaacgtgtcttttaattgtttccaaaattgcgatgacctattacctacccttgcgcttccaagaggcagcaatgatggttcattttcagtatcctcttggtgcttggtgcgtcttggaggagcaaggtactacaagccaacaaaaggactccttcaaagtggatttagctccaaggagaggtatcttctaaggtggattgtatctgttcataaggggcaagtgagaaatgacattcgttctaatactattacttcatccgcaagatctggtatgaacccgcagactcccccaatagtcactggtgaagtaaaatctgccataacccaagtcacagcacaaattaaatatgcaaagcttgaaaattctggaaaacaagctgaagttgaaccagtgagcaacttaggcattaattttggtaaaggtctgccaaattttactatgaaaaagcccttttctgaagttgttgctggcaccacatcaaaagataccgagtttcctgctcttcagcagacaaggccaccaaaacctggtggtcgaaaagatgagcagcgtcaaatgaatatagtagaccagactaatggccgaggtcatgtggctgtcagccaagggtctgtagctgaaactgaatcggcaaaagcaagcagaaacaagagtagtgaaaatgctgatgggaagccctttttacagatagggagcaatatagtaccagtgattgctggaaatgagactagagaaactagtcagccagtacaacagtttgttgtgtatattggatttgagcatgagtgtccctatggtcatcgcttcttactgtcagagaaacatatgaaggagatcgagtcttcctgtttgcagtatcaaagacctcatctaaacaaagaagcagaagtcaagcatgcacaaaagttgctccaaaatgcatctggtttaatagcatctgcagtggacataaacagtgcacggaaaaacagtaagccattggaatcatcagggagaaacagccagcagcaatcactgcagctgaggattgatgcagagacctcacagccttctcctcggctttcagatccacagaatgccaaaaggtgggagcattattttcgaagcgttacaattgatgatggtggagaagcattttcactgatgaacagaaacttgccaatatatatgcgctgtccacattgcaaggtctcagaaaggaaggaacatcaagatgtaaagtttgctggtgttgtgtctcaacttcagcggattttcattgtgacacctgatttccctgttctgttggcaagctgcccacttgtacagtttgaggggtcatgtttgccatcaaatgtctctgatcatgatcgagaaggatcattcagtattgggtgccgagttatcctcccacctgagagctttcttactatgaggcttccctttgtctatggtgttgagacaaaggagggaagtaaatttcccctcaaatactttgagcgacaaccagaactcacagcatggcttgttgcaggcacagccctgcaaatcgtgtcggtaggggatgtcactgagaaagaaaccgttatgaagtgatagacatgtcatataaagctttactggctttagcatgttctagtcatatatcagtgatttgctatcgcattgtgaaatagaagttccgctgatatctgcctgacctggatggtgtatatagatgcaagcagagggggcaggcccacaggcaatcacgccgttcttgtctttgtacatgaaaggtgccaggaggttaagtttagctggttatgtaaaggtccgctttttgaggacctgtccagtggatcaatcccattcctagactggtttgccttgaggcttggagattttgtagtaagactattagttcaattgagctgtttgtccagttgatgagttgttttattcctaggcttgttgagaaatctggccttggaatatagaacccagaagaaaggatttttctgaatgatgttgtagcaaacggttgcttgagatgcatgatctcctcaaataaacttgactgatctgcctgtatcccttattctttcttgtatataatgtatgcagtacaggtatttccccgcagtctttggagaagaagatggatttgtgaagtgatagcacaaaaaaaaaagtcatcaggcgcttctggtggtagactggagactgggctggagaaatgttggagctggaaggaaacgcacggatggctcctgcttgacaagtgtaaaggcaggcggcaagcagggacgtcgagtcgaggccccggccggctccaagagcttctttctccaatccaatccaatccaatccagaaccctgactgcagtccatggtattgtagcgctaccatttgtccacgtccgatgggtgaagtgaagcatgactgactgactgcatgggtttgagtgagttgcttggacaagtggctgtgtgtggtgctgctactgctacctaaccttttgcttggccgatagataagaataccggactgatggatggaagtggatgtgaacaaacagctggttggctcagggcaggctccacaccaccaacggccggagcagatggacatggacgtctcacttaggaggagaaggcagatgcggcagaagcaccagcacactgaatgcaatcattcaatactcatctacagctagccaagatgtgagaagagagcaaggaagaattgtcaagcctcccacgtttccccaatcttctctcttcttttcatttccccacttttaatatgtttattttcctcttatttgcaacagctcctttaattatatagcaacattttttttaagatatagtagtatatatattaattttatcatatctctagtccgaataccacgcaaaagtagctagtaagtaggatgtaccaactagctacagcagtgtataataaagaaaaaagtcgttgggcggtcgatggagtaatgcacatcatatacgtacagcttggtacaaaacgaccgcaaattcacaaggcaaag

SEQ ID NO: 217216 - DNA, 4925 bp, Zea Mays
cctccgaaaggccttaaccccaaacgaaaccaccctccgcgacaaagccgactactataggctgtcgtagccaacaagcgcgacatcctccgcccccacctcgccgccggcgatggagccgccttcgcctccggcgacccactccgcggccgtccgtgtcctctcccgcactcctccgccgacctccccgaacccctcctccacgggcccggcggccccgtcgcccgcctcccgcgacggggtcgtcgccgtcggcttcgtgggcgccgcggggaccgcccgcctcgcggaccggatcctcgacgcccacgtcttctctcccggtggctcggcggggagcctcgcgggaagggtaaggtaccaccgcgacgccggcaagaggatggtgttccttcacctcacgccgccgccgcccgcgccgctcgaggcggtggcaggatgctgcgatgacggcgaactaccggagatgctcttcatgttctctgtctgccacgtaattatatttctgcaacaaggcttcagatttaacacacaaaccttaaagaagttccgactgctgcaatcttcaaagcatgctctcgctccatttgtcaagccattggtggcagctgcaatgcctgccagaactgttgcctctgacaccccaacaagagcaacccacagggcttcttccgtctcccctccaacacgccgaggaggtcacgctgggcgtcagtcctcggctatctcacttatgtctggaaccagttcaactccttctgtcttgccaggccaatgcattcctgtattgctctttgtctttgaggatgatgcggttgatgtttcaagtgctgcagcaagtcccgatgatataggtgatgcatcttcatcaaatcagggttctacccctgatggactaccaaaacagagcttagcttcaaaaagttctggttcagtaattatgctttcccgggcagcaaacaaatctgagggcagttcaggcaaaaaactgcattcgtcactggagggacagatccgtgtcttgatcaagaagtgcagggtgcttgcaggcatggagcctggacatattggcccaaggggcgtaagtaacatgagtcatcatttacccctgttctcactcgatacctcgagggtagttgcactgttggaacggtatattaataagaaacaggaaccactggacaccattgcaggactatttgaagattctttgtgctccaaatcgccattggatattctttcgctcgaaaacaactaccatccaacaaaccatgatgactttcagttgatcaaggattttatatttcggcagtctgatgcgctgagagggaaagggggatattcaagcaatgcaagtgccgggtctgttgcaggtgttggcatggtggctgctgctgctgcagcagctgcagcatcagctgcatctgggaaaccagttaatgcacctgacctccctacttttgataaatggttgtccataagtacctctattctaactgcactgttgagtggaagaaatgtgctgagatgtcagtctgaaagcaagactcatacaagtcctactgagaagaatggccaacttcctgtaggatctaatgctattgagatcgcattatcgtgcttggaaagtaacaatgggctgaacatgaaattttcttcatcatggtgtcaaagggtgcttccagctgctaaggagatatacctgaaaggtttgcctgccttttaccccacaagaatgcatgaagtgcagctacagaaggcattgcggtcctttggctcaatggttaaaggaccagcagtcagggtattctcaaagaagctagaagatgagtgccgggcaatatgggaatctggaaggcagcaatgtgacgctgttagcctaactggcagaccatgtaagcaccgcaggcatggcgatttcttttcatcagatgcaatggagcaacattctagtggatatgtcttcctccatgcatgttcctgtggccggtcacgccgccttagagatgatccttttgactttcagacagccaacgtgtcttttaattgtttccaaaattgcgatgacctattacctacccttgcgcttccaagaggcagcaatgatggttcattttcagtatcctcttggtgcttggtgcgtcttggaggagcaaggtactacaagccaacaaaaggactccttcaaagtggatttagctccaaggagaggtatcttctaaggtggattgtatctgttcataaggggcaagtgagaaatgacattcgttctaatactattacttcatccgcaagatctggtatgaacccgcagactcccccaatagtcactggtgaagtaaaatctgccataacccaagtcacagcacaaattaaatatgcaaagcttgaaaattctggaaaacaagctgaagttgaaccagtgagcaacttaggcattaattttggtaaaggtctgccaaattttactatgaaaaagcccttttctgaagttgttgctggcaccacatcaaaagataccgagtttcctgctcttcagcagacaaggccaccaaaacctggtggtcgaaaagatgagcagcgtcaaatgaatatagtagaccagactaatggccgaggtcatgtggctgtcagccaagggtctgtagctgaaactgaatcggcaaaagcaagcagaaacaagagtagtgaaaatgctgatgggaagccctttttacagatagggagcaatatagtaccagtgattgctggaaatgagactagagaaactagtcagccagtacaacagtttgttgtgtatattggatttgagcatgagtgtccctatggtcatcgcttcttactgtcagagaaacatatgaaggagatcgagtcttcctgtttgcagtatcaaagacctcatctaaacaaagaagcagaagtcaagcatgcacaaaagttgctccaaaatgcatctggtttaatagcatctgcagtggacataaacagtgcacggaaaaacagtaagccattggaatcatcagggagaaacagccagcagcaatcactgcagctgaggattgatgcagagacctcacagccttctcctcggctttcagatccacagaatgccaaaaggtctcagaaaggaaggaacatcaagatgtaaagtttgctggtgttgtgtctcaacttcagcggattttcattgtgacacctgatttccctgttctgttggcaagctgcccacttgtacagtttgaggcaagggtcatgtttgccatcaaatgtctctgatcatgatcgagaaggatcattcagtattgggtgccgagttatcctcccacctgagagctttcttactatgaggcttccctttgtctatggtgttgagacaaaggagggaagtaaatttcccctcaaatactttgagcgacaaccagaactcacagcatggcttgttgcaggcacagccctgcaaatcgtgtcggtaggggatgtcactgagaaagaaaccgttatgaagtgatagacatgtcatataaagctttactggctttagcatgttctagtcatatatcagtgatttgctatcggcattgaataggtctgttgatggttatattctgtctgaagttttcacttctactcctgaacttgtgctgctaagctgttgacacaactattgcttgctttcactgtgctggaagcattgtgaaatagaagttccgctgatatctgcctgacctggatggtgtatatagatgcaagcagagggggcaggcccacaggcaatcacgccgttcttgtctttgtacatgaaaggtgccaggaggttaagtttagctggttatgtaaaggtccgctttttgaggacctgtccagtggatcaatcccattcctagactggtttgccttgaggcttggagattttgtagtaagactattagttcaattgagctgtttgtccagttgatgagttgttttattcctaggcttgttgagaaatctggccttggaatatagaacccagaagaaaggatttttctgaatgatgttgtagcaaacggttgcttgagatgcatgatctcctcaaataaacttgactgatctgcctgtatcccttattctttcttgtatataatgtatgcagtacaggtatttccccgcagtctttggagaagaagatggatttgtgaagtgatagcacaaaaaaaaaagtcatcaggcgcttctggtggtagactggagactgggctggagaaatgttggagctggaaggaaacgcacggatggctcctgcttgacaagtgtaaaggcaggcggcaagcagggacgtcgagtcgaggccccggccggctccaagagcttctttctccaatccaatccaatccaatccagaaccctgactgcagtccatgataagaataccggactgatggatggaagtggatgtgaacaaacagctggttggctcagggcaggctccacaccaccaacggccggagcagatggacatggacgtctcacttaggaggagaaggcagatgcggcagaagcaccagcacactgaatgcaatcattcaatactcatctacagctagccaagatgtgagaagagagcaaggaagaattgtcaagcctcccacgtttccccaatcttctctcttcttttcatttccccacttttaatatgtttattttcctcttatttgcaacagctcctttaattatatagcaacattttttttaagatatagtagtatatatattaattttatcatatctctagtccgaataccacgcaaaagtagctagtaagtaggatgtaccaactagctacagcagtgtataataaagaaaaaagtcgttgggcggtcgatggagtaatgcacatcatatacgtacagcttggtacaaaacgaccgcaaattcacaaggcaaag

SEQ ID NO: 217217 - DNA, 5185 bp, Zea Mays
cctccgaaaggccttaaccccaaacgaaaccaccctccgcgacaaagccgactactataggctgtcgtagccaacaagcgcgacatcctccgcccccacctcgccgccggcgatggagccgccttcgcctccggcgacccactccgcggccgtccgtgtcctctcccgcactcctccgccgacctccccgaacccctcctccacgggcccggcggccccgtcgcccgcctcccgcgacggggtcgtcgccgtcggcttcgtgggcgccgcggggaccgcccgcctcgcggaccggatcctcgacgcccacgtcttctctcccggtggctcggcggggagcctcgcgggaagggtaaggtaccaccgcgacgccggcaagaggatggtgttccttcacctcacgccgccgccgcccgcgccgctcgaggcggtggcaggatgctgcgatgacggcgaactaccggagatgctcttcatgttctctgtctgccacgtaattatatttctgcaacaaggcttcagatttaacacacaaaccttaaagaagttccgactgctgcaatcttcaaagcatgctctcgctccatttgtcaagccattggtggcagctgcaatgcctgccagaactgttgcctctgacaccccaacaagagcaacccacagggcttcttccgtctcccctccaacacgccgaggaggtcacgctgggcgtcagtcctcggctatctcacttatgtctggaaccagttcaactccttctgtcttgccaggccaatgcattcctgtattgctctttgtctttgaggatgatgcggttgatgtttcaagtgctgcagcaagtcccgatgatataggtgatgcatcttcatcaaatcagggttctacccctgatggactaccaaaacagagcttagcttcaaaaagttctggttcagtaattatgctttcccgggcagcaaacaaatctgagggcagttcaggcaaaaaactgcattcgtcactggagggacagatccgtgtcttgatcaagaagtgcagggtgcttgcaggcatggagcctggacatattggcccaaggggcgtaagtaacatgagtcatcatttacccctgttctcactcgatacctcgagggtagttgcactgttggaacggtatattaataagaaacaggaaccactggacaccattgcaggactatttgaagattctttgtgctccaaatcgccattggatattctttcgctcgaaaacaactaccatccaacaaaccatgatgactttcagttgatcaaggattttatatttcggcagtctgatgcgctgagagggaaagggggatattcaagcaatgcaagtgccgggtctgttgcaggtgttggcatggtggctgctgctgctgcagcagctgcagcatcagctgcatctgggaaaccagttaatgcacctgacctccctacttttgataaatggttgtccataagtacctctattctaactgcactgttgagtggaagaaatgtgctgagatgtcagtctgaaagcaagactcatacaagtcctactgagaagaatggccaacttcctgtaggatctaatgctattgagatcgcattatcgtgcttggaaagtaacaatgggctgaacatgaaattttcttcatcatggtgtcaaagggtgcttccagctgctaaggagatatacctgaaaggtttgcctgccttttaccccacaagaatgcatgaagtgcagctacagaaggcattgcggtcctttggctcaatggttaaaggaccagcagtcagggtattctcaaagaagctagaagatgagtgccgggcaatatgggaatctggaaggcagcaatgtgacgctgttagcctaactggcagaccatgtaagcaccgcaggcatggcgatttcttttcatcagatgcaatggagcaacattctagtggatatgtcttcctccatgcatgttcctgtggccggtcacgccgccttagagatgatccttttgactttcagacagccaacgtgtcttttaattgtttccaaaattgcgatgacctattacctacccttgcgcttccaagaggcagcaatgatggttcattttcagtatcctcttggtgcttggtgcgtcttggaggagcaaggtactacaagccaacaaaaggactccttcaaagtggatttagctccaaggagaggtatcttctaaggtggattgtatctgttcataaggggcaagtgagaaatgacattcgttctaatactattacttcatccgcaagatctggtatgaacccgcagactcccccaatagtcactggtgaagtaaaatctgccataacccaagtcacagcacaaattaaatatgcaaagcttgaaaattctggaaaacaagctgaagttgaaccagtgagcaacttaggcattaattttggtaaaggtctgccaaattttactatgaaaaagcccttttctgaagttgttgctggcaccacatcaaaagataccgagtttcctgctcttcagcagacaaggccaccaaaacctggtggtcgaaaagatgagcagcgtcaaatgaatatagtagaccagactaatggccgaggtcatgtggctgtcagccaagggtctgtagctgaaactgaatcggcaaaagcaagcagaaacaagagtagtgaaaatgctgatgggaagccctttttacagatagggagcaatatagtaccagtgattgctggaaatgagactagagaaactagtcagccagtacaacagtttgttgtgtatattggatttgagcatgagtgtccctatggtcatcgcttcttactgtcagagaaacatatgaaggagatcgagtcttcctgtttgcagtatcaaagacctcatctaaacaaagaagcagaagtcaagcatgcacaaaagttgctccaaaatgcatctggtttaatagcatctgcagtggacataaacagtgcacggaaaaacagtaagccattggaatcatcagggagaaacagccagcagcaatcactgcagctgaggattgatgcagagacctcacagccttctcctcggctttcagatccacagaatgccaaaaggtgggagcattattttcgaagcgttacaattgatgatggtggagaagcattttcactgatgaacagaaacttgccaatatatatgcgctgtccacattgcaaggtctcagaaaggaaggaacatcaagatgtaaagtttgctggtgttgtgtctcaacttcagcggattttcattgtgacacctgatttccctgttctgttggcaagctgcccacttgtacagtttgaggggtcatgtttgccatcaaatgtctctgatcatgatcgagaaggatcattcagtattgggtgccgagttatcctcccacctgagagctttcttactatgaggcttccctttgtctatggtgttgagacaaaggagggaagtaaatttcccctcaaatactttgagcgacaaccagaactcacagcatggcttgttgcaggcacagccctgcaaatcgtgtcggtaggggatgtcactgagaaagaaaccgttatgaagtgatagacatgtcatataaagctttactggctttagcatgttctagtcatatatcagtgatttgctatcggtctgttgatggttatattctgtctgaagttttcacttctactcctgaacttgtgctgctaagctgttgacacaactattgcttgctttcactgtgctggaagcattgtgaaatagaagttccgctgatatctgcctgacctggatggtgtatatagatgcaagcagagggggcaggcccacaggcaatcacgccgttcttgtctttgtacatgaaaggtgccaggaggttaagtttagctggttatgtaaaggtccgctttttgaggacctgtccagtggatcaatcccattcctagactggtttgccttgaggcttggagattttgtagtaagactattagttcaattgagctgtttgtccagttgatgagttgttttattcctaggcttgttgagaaatctggccttggaatatagaacccagaagaaaggatttttctgaatgatgttgtagcaaacggttgcttgagatgcatgatctcctcaaataaacttgactgatctgcctgtatcccttattctttcttgtatataatgtatgcagtacaggtatttccccgcagtctttggagaagaagatggatttgtgaagtgatagcacaaaaaaaaaagtcatcaggcgcttctggtggtagactggagactgggctggagaaatgttggagctggaaggaaacgcacggatggctcctgcttgacaagtgtaaaggcaggcggcaagcagggacgtcgagtcgaggccccggccggctccaagagcttctttctccaatccaatccaatccaatccagaaccctgactgcagtccatggtattgtagcgctaccatttgtccacgtccgatgggtgaagtgaagcatgactgactgactgcatgggtttgactggttggctcagggcaggctccacaccaccaacggccggagcagatggacatggacgtctcacttagaaagaggaaagcaggatgggagctgcacgtgatgttccgtgcttgcacgagcaggatggtgtggagcatgtgacgtgtaggctggagcttggcttggcttagaggttactagctagctcactctgaatgatctccattcttcaggaggagaaggcagatgcggcagaagcaccagcacactgaatgcaatcattcaatactcatctacagctagccaagatgtgagaagagagcaaggaagaattgtcaagcctcccacgtttccccaatcttctctcttcttttcatttccccacttttaatatgtttattttcctcttatttgcaacagctcctttaattatatagcaacattttttttaagatatagtagtatatatattaattttatcatatctctagtccgaataccacgcaaaagtagctagtaagtaggatgtaccaactagctacagcagtgtataataaagaaaaaagtcgttgggcggtcgatggagtaatgcacatcatatacgtacagcttggtacaaaacgaccgcaaattcacaaggcaaag

SEQ ID NO: 217218 - DNA, 1328 bp, Zea Mays
tctccgcccgctgggccgaggcccgagactgaagtctatgttcttatccaagccctgttcattagcgttgccacctgactcccctcatagagcagtggatccacaatataagggcatcaagcgattcctactcacattgttgttgttctacagtaagcaaagcaagtccatcagaggagcaaatgttgtttatgatcgaatcacttctcaagttgatgcacctactatttatgatgtttttcagttggagaaaacatttaagacaacattttcattgcttgttctccatatgtggcttgttctacgccgcttgaaggaagaagggaaggatggtgttaagttcggacagtacatctacgaaatgtacaaccacgatgtagaactcagagtttctaaagctggggttaacttgcttctgacaaaatggatgaaggagctagagaaaatattctatggaaacattgtgaagtatgatgctgcgataagcccagaggctcgtcaagatgatcttgtaaatgtcatctggagaaatatttatgctgaggaaggttcagaggctatggatgtggctgctgcccctgctgtccaggcattggcaagatacacacgaagggaggcaacttgcctatcattgactggcaaagattctatgttctcggggaacttcaaattcacagctctgctgccggcaactcccagtcccagcccaaagaagcctgtgcgatgaactgccgtggtacgtccacatttcacgcgaaggtttagaaaacagcaggatcggtggatacctgctgttctctcagcagtacaaataacaggcttcttccagcagttgtttactctggggtccccacgattcaaacccttttgatggatatacttcgttccagataggaagtttgttttgttaatctctagtctcgagtatttgctctaggagaccacccaccagaacggagccttcttgtcgccggaccaggcatcgattcgcacactgtatgaggcgatgctgaaagaaaaaaaaaaggaaggcagcaccgatgttcggtcattaatatgcagtttctttcggctgcatgtgtctcttatgtagagtaaaactaatttattctcgcatatagaatcatactataccggacatcaattgatgatgtgaaccgtatgcaagatcatcgccatctactgtagtatgtgacagtgtaagttgttttttttccttaaaaaatgtaggcggagcaaagtcgaatctgttgtgttttttgcgatttatctggggaagagaaagaaaatggaccgctttaacatgctaatgtagagttgctaccgtg

SEQ ID NO: 217219 - DNA, 1188 bp, Zea Mays
aaggaaatggctgttataataataatactacaaaagcaattgcatcgttccgagtagcacttttccaaagctctaccaataaggaaaaaaaaaaactcttctccacgcgtccttcctattctcctcgtcatcttcctgctgcgcgtccctgccagcacagcgccgcctcccctaacggccccaccatctcctcacatcgttatcgtgtcacggcctctcggcctcgcgcccttctgagctgtcgtcgtctccccctctctcgctcggctgtcgccgcggatctccctgcgtcggccgcaacgatggcctcctcatccgccgcggcgtcggccgccgccctaggtgctcgtcgcctcgctcgccgatgactccccagtcgcccgtgacgccgcgctcgctgccctccgcgacatcgcgccgttgaacccgatgctcatcctcgactgctgcgccaccgtctcccgtggcggacgtcggcggtttggcaacatggctggggtttttcttgtcatggcatctgcagtcagggctctcgatcactctgacgccgagagcgagttcctccggaaaatcgcgaagattgcaactgctgagattgttacctcaaaggaattcaatgttgattggcaaagagcagctgcttgtcttctggttgctataggttcacatgatccagacttgatgatgggggaaatttttcttcacttctctggaccaacttctgctctgccagccatgttacaaatacttgcagattttgcgtcttctgaagctttgcagttcaccccacggttgaaggacgtgcttttgcgtgttttacctatcctaggaagtgtgcgagatggccaacggcctgtttttgcgaatgcattcaagtgttggtgccaggctgcatggcagtacctgggagatgccccctctgagcttcctcttgataacgatgttatgtccttcatgaattcagtatttgagttacttataaaagtatggacaggctcacgtgatctaaaggtgcgtccgaattttggctttgagtttttttttcacacaacttataacaatataatgtctcaacttataggactattagccatggatttcaatcgcctgatcgtctggcctgggcgatcagccgattagacgcgattagggcgacgattagtcgcccctaatctaccctagccgtcc

SEQ ID NO: 217220 - DNA, 2729 bp, Zea Mays
gaagatttggcgaatacgttgccgccaaaaccttatctcctttaaaacctacgctccacttgcttccctccgttcatggcagctctgccaccgccatggcctacctctccagtctccaccacgcgccttatccccgcctacttctccaccaccgctacctcttcttttctgcatcctccccacctcccgtcgtcactacacgacgccttgttcctacactggcatgccatggccgcgatctgctcgacgtaatgccctacagagacagcaggccctcaggaacggagggaagcagagcaggcccaggcggagcaccgcgtgtcacaaacagctcaactgtgcgaggaaacgccacagcacaggaggcacatatgccgatgtggcgggaaaggacccctggcacgccaaggacgtggaagaaaggggacagggttatgctacaagaacatgcggagggggagtcacaagaaaagagctggaggcgagggctgacacggagtttggagtcaaaagggcccatggtgaggaagagctggactagagacggaaatggaatgcgggcaaaagaatctggaaaggttggaaattcaagagatgagggtacaggaagaagaaacgcatgtaagaaaatgaagaaacccccggatggtgagtatgctggcaagctgagagttgagctggacatgtgctccaagagaggagatgtgatgggggcgatcactctgtatgattccgcagtcgaggaggggatcaagttggggcagcatcactacaatgtgctcctttatctgtgttcttcagcttctcttggttttgtgcaaccagcaaaaagtggtaatatgggtagtggtatcgccagtattggtcctgcacagaaacttgatccatcacccagcagaagcttgggaggttcagagggagacaatgcatatgcatctgaaagtcatgttcaagatcagggaaaaaacaaggccgatttgattccaggtggtttgaaggcacaaacagttagcataccagtagaagatgagcttggagactatgcacgtgcacgaggatttgagatatttgataaaatgtgctcagagaaagagagagttcaaatgagtgaggctgctctgaccgcaaaggcacgtatggcgttgtccatgggtgacagtgatatggcctttgagattgtgaaacagatgaaaggcctgggtttaaagccaaagttgcgctcatatggtcctgctttaacagcattttgcaacagtggtaatgttgaaaaagcatttgaagtagaagcccatatgttggaatctgggatcacacccgaagaagctgagttggagacacttctcagggctagtgtggttggccgacgcggagacaaggtatattatttgctgcataaatttaggactgctgtcagacaggtatcccattccacagctgaattgtttgaggcttggtttcggagcccaacagcatctaaagttggaaagagaaagtgggatgcaggtgctatagcgaaggctattgagaataatggagggggttggcatgggtttggttggttggggagagggaaatggacagtggcacactcaaatatcaacgagaatggtgtctgccttgcttgtggagaaaagctggctattatagatcttgacccaaaagaaacagaagattttgccacatttgtggcaaaattagctattaagagagagaggaaatcgaactttgagaacttccagaaatggcttgaaaagcatgggccttttgaggcagtcgtggatgctgccaatgttggcctgtttagccacaaacacctttctttgagtaaggttaattctgttgccgatgcaataaggctaaggtttacgtcaaaaaaatggcctttgatagttttacataacaagcatctcattggagagcgcatgaaaaaacttaatgatcacaagttggtacaaaagtggaagcaagaaaattcaatatatgcaacccctactggttcaaatgatgattgttcaggtactggctgtacgctgctatcagatgcaaatgcttgatcattaccaatgatgaaatgagagaccacacatttcagattttggaaaggaatttcttccccaagtggaaggaaaggcatcaggtacacttcactttggaagaccgctgcgtcacatttcaaatgccacctccatactcagttgttatacaggaatccgataaaggtcactggcatatccctgtctcggaggaaggcttgctagagaaggaccgaacctggctatgcgttacacggcagaattcacaggcacagtgactaacgaagctggagttgttcgatggcaaacattaacggtgtttttttttctgaacactcaagtcagtatcgcatccgccctctcttcgtcagtctgagaaacttcctctattaagtactcattatgatttctacatggtcttattcagttttgttactgaactgctgcatatgttgtaattctgtcttattcagttttgagctggtctacattttgtttagtaaactgatataggtaatacgattccctgctatcagaacaagatctctgctattttccgctcatcccaggatcaggaaataaccgcaaagctgacgagatactgtgcatactggcatagtcactttgcttccgttggtgaaatttttacgtccatatgacatgcatggaaaaaagaacaggcctgattgaattctt

SEQ ID NO: 217221 - DNA, 2727 bp, Zea Mays
gccgccaaaaccttatctcctttaaaacctacgctccacttgcttccctccgttcatggcagctctgccaccgccatggcctacctctccagtctccaccacgcgccttatccccgcctacttctccaccaccgctacctcttcttttctgcatcctccccacctcccgtcgtcactacacgacgccttgttcctacactggcatgccatggccgcgatctgctcgacgtaatgccctacagagacagcaggccctcaggaacggagggaagcagagcaggcccaggcggagcaccgcgtgtcacaaacagctcaactgtgcgaggaaacgccacagcacaggaggcacatatgccgatgtggcgggaaaggacccctggcacgccaaggacgtggaagaaaggggacagggttatgctacaagaacatgcggagggggagtcacaagaaaagagctggaggcgagggctgacacggagtttggagtcaaaagggcccatggtgaggaagagctggactagagacggaaatggaatgcgggcaaaagaatctggaaaggttggaaattcaagagatgagggtacaggaagaagaaacgcatgtaagaaaatgaagaaacccccggatggtgagtatgctggcaagctgagagttgagctggacatgtgctccaagagaggagatgtgatgggggcgatcactctgtatgattccgcagtcgaggaggggatcaagttggggcagcatcactacaatgtgctcctttatctgtgttcttcagcttctcttggttttgtgcaaccagcaaaaagtggtaatatgggtagtggtatcgccagtattggtcctgcacagaaacttgatccatcacccagcagaagcttgggaggttcagagggagacaatgcatatgcatctgaaagtcatgttcaagatcagggaaaaaacaaggccgatttgattccaggtggtttgaaggcacaaacagttagcataccagtagaagatgagcttggagactatgcacgtgcacgaggatttgagatatttgataaaatgtgctcagagaaagagagagttcaaatgagtgaggctgctctgaccgcaaaggcacgtatggcgttgtccatgggtgacagtgatatggcctttgagattgtgaaacagatgaaaggcctgggtttaaagccaaagttgcgctcatatggtcctgctttaacagcattttgcaacagtggtaatgttgaaaaagcatttgaagtagaagcccatatgttggaatctgggatcacacccgaagaagctgagttggagacacttctcagggctagtgtggttggccgacgcggagacaaggtatattatttgctgcataaatttaggactgctgtcagacaggtatcccattccacagctgaattgtttgaggcttggtttcggagcccaacagcatctaaagttggaaagagaaagtgggatgcaggtgctatagcgaaggctattgagaataatggagggggttggcatgggtttggttggttggggagagggaaatggacagtggcacactcaaatatcaacgagaatggtgtctgccttgcttgtggagaaaagctggctattatagatcttgacccaaaagaaacagaagattttgccacatttgtggcaaaattagctattaagagagagaggaaatcgaactttgagaacttccagaaatggcttgaaaagcatgggccttttgaggcagtcgtggatgctgccaatgttggcctgtttagccacaaacacctttctttgagtaaggttaattctgttgccgatgcaataaggctaaggtttacgtcaaaaaaatggcctttgatagttttacataacaagcatctcattggagagcgcatgaaaaaacttaatgatcacaagttggtacaaaagtggaagcaagaaaattcaatatatgcaacccctactggttcaaatgatgattgttcaggtactggctgtacgctgctatcagatgcaaatgcttgatcattaccaatgatgaaatgagagaccacacatttcagattttggaaaggaatttcttccccaagtggaaggaaaggcatcagtattgttttcactaacaggtacacttcactttggaagaccgctgcgtcacatttcaaatgccacctccatactcagttgttatacaggaatccgataaaggtcactggcatatccctgtctcggaggaaggcttgctagagaaggaccgaacctggctatgcgttacacggcagaattcacaggcacagtgactaacgaagctggagttgttcgatggcaaacattaacggtgtttttttttctgaacactcaagtcagtatcgcatccgccctctcttcgtcagtctgagaaacttcctctattaagtactcattatgatttctacatggtcttattcagttttgttactgaactgctgcatatgttgtaattctgtcttattcagttttgagctggtctacattttgtttagtaaactgatataggtaatacgattccctgctatcagaacaagatctctgctattttccgctcatcccaggatcaggaaataaccgcaaagctgacgagatactgtgcatactggcatagtcactttgcttccgttggtgaaatttttacgtccatatgacatgcatggaaaaaagaacaggcctgattgaattctt

SEQ ID NO: 217222 - DNA, 1618 bp, Zea Mays
ggcagctctgccaccgccatggcctacctctccagtctccaccacgcgccttatccccgcctacttctccaccaccgctacctcttcttttctgcatcctccccacctcccgtcgtcactacacgacgccttgttcctacactggcatgccatggccgcgatctgctcgacgtaatgccctacagagacagcaggccctcaggaacggagggaagcagagcaggcccaggcggagcaccgcgtgtcacaaacagctcaactgtgcgaggaaacgccacagcacaggaggcacatatgccgatgtggcgggaaaggacccctggcacgccaaggacgtggaagaaaggggacagggttatgctacaagaacatgcggagggggagtcacaagaaaagagctggaggcgagggctgacacggagtttggagtcaaaagggcccatggtgaggaagagctggactagagacggaaatggaatgcgggcaaaagaatctggaaaggttggaaattcaagagatgagggtacaggaagaagaaacgcatgtaagaaaatgaagaaacccccggatggtgagtatgctggcaagctgagagttgagctggacatgtgctccaagagaggagatgtgatgggggcgatcactctgtatgattccgcagtcgaggaggggatcaagttggggcagcatcactacaatgtgctcctttatctgtgttcttcagcttctcttggttttgtgcaaccagcaaaaagtggtaatatgggtagtggtatcgccagtattggtcctgcacagaaacttgatccatcacccagcagaagcttgggaggttcagagggagacaatgcatatgcatctgaaagtcatgttcaagatcagggaaaaaacaaggccgatttgattccaggtggtttgaaggcacaaacagttagcataccagtagaagatgagcttggagactatgcacgtgcacgaggatttgagatatttgataaaatgtgctcagagaaagagagagttcaaatgagtgaggctgctctgaccgcaaaggcacgtatggcgttgtccatgggtgacagtgatatggcctttgagattgtgaaacagatgaaaggcctgggtttaaagccaaagttgcgctcatatggtcctgctttaacagcattttgcaacagtggtaatgttgaaaaagcatttgaagtagaagcccatatgttggaatctgggatcacacccgaagaagctgagttggagacacttctcagggctagtgtggttggccgacgcggagacaaggttaattctgttgccgatgcaataaggctaaggtttacgtcaaaaaaatggcctttgatagttttacataacaagcatctcattggagagcgcatgaaaaaacttaatgatcacaagttggtacaaaagtggaagcaagaaaattcaatatatgcaacccctactggttcaaatgatgattggtactggctgtacgctgctatcagatgcaaatgcttgatcattaccaatgatgaaatgagagaccacacatttcagattttggaaaggaatttcttccccaagtggaaggaaaggcatcagtattgttttcactaac

SEQ ID NO: 217223 - DNA, 3155 bp, Zea Mays
ctcggattgcttgttgtggacgcagggggaggagactgatcgcccggggaggcagaacagaacaagacagaacggaggaggaggaggaggaggagagagaggagaccgaccctccccctccctcccctgtgttcttgctcctcctctgtttccagtcccccgccgcctccgtggagccataagcaggtgcttggcccgccggtcggcggcgagggcggcagacatgggttgcgcggtgtcgaggcccggggtggtgtcctcgccgtcgtacgaggacgacgtgtcgtcgtgctcctacaatatgtcccgcagcgcgtcggcgtcggcggacctgggctcggcgtcggcgtcggcgtcggcgatgtcgatatggagccggccggtgcggctggaggcgttcaaagacgacgacgaggacgagcggcggcggcggcggtcggggagggaggctgcggtagcggcggcagcgcggctggggagcgtccggccgtgcgtggagggcgagcaggcggcagccgggtggccggcgtggctgagcgcggtggccgccgaggccgtgcacgggtgggtgccgctccgcgccgacggcttcgagaagctggagaaggtggggcagggcacgtacagcagcgtgttccgcgcgcgggagctggccacgggccgcctggtggcgctcaagaaggtgcgcttcgacagcgtggagcccgagagcgtgcggttcatggcgcgggagatcctcatcctccgccgcctccaaggccaccccaacgtcgtcggactcgagggcctcgtcacctcccgctcctccccctccatctacctcgtcttcgagtacctcgagcatgacctcgccggactcagctcctcccccgacatcaccttcaccgagtcgcagaaactgcggtacgcatcagtcggacaccgcgatcgcgggggccatgcatgctgtcagctcttgacccttgtcaccatccaatccaatggcgatcggtcgatcgtcttgtcacgatccacaaccgttgcctgatgacgcgcgcgcgataccatgccgtgcgtgcgtgcgtgcagatcaagtgctacatgcggcagctgctcgaggggctggcgcactgccacgcgcgcggggtgatgcaccgggacatcaagtgcgccaacctgctggtgagcgacggcggcgagctcaaggtggcggacttcgggctggcgaacctcttcgcgccggcgccggcggcgccgctgaccagccgggtggtcacgctctggtaccgcccgccggagctgctcctgggcgccacggcgtacgagccctccgtcgacctctggagcgccggctgcgtcttcgccgagatgcacgcgcgccgccccgtcctgcagggccgcaccgaggtcgagcagatccacaagatcttcaagctctgcggctcgccgcccgatcacttctggcgccgctcgggcctgtcccacgccgccgtcttccgcccgcagcaaccttacccgagccgactccgggacaccttcgccgcgtccatgcccgaccacgcgttccgactcctcgccatgctcctctccctcgaccctgccgcccgcggcaccgccgccgccgccctcgacgccgagtacttcacgacggcaccgtacgcatgcgaccccgggagcctgcccaagtacgcgcccaacaaggagatggacgccaagttccgggaagaatctagaaggaggagcaacctccggagccaaggcggcgagggggcgaagcggctgtcctgggggcacaagagcatgcagctgcaggacacgaaccagagccacgtgcacgccgaggaatcgctgcccgttgtggccaaaagcggcgcggcggtggcaaggaacgacggcgactcgcggctgctcgtcgacctggagcccgtgccggcgatcagattcagcaagcggcacggcgacgacggcgccggcgaccacgcgccgccgtacgccaagaccttgtccagcagcttcaaggagccggcccgtgtcgcggaccgccgccctctctccggccccgggcagctcgccgcgtccaccggtttcgcctgggccaagaagccccggtccgtcgccaggtcttcgacggcggcagccgccgtcacgaagcggagctactccaagggttcagggaccaagaacaacagcagcggaggaggtgacagagcaagaaccacctccgccgccaccgccactgaagcggcggcaccatacgaggtggagaagcaggaggtgatcaagcagtgggcacaggccgctgacgcattcagcgcctctgaagcttacagcagcaggttcaggcagacacttgctgccaggcagctcaagaatggaaagatgtacaaggggaaggtgagcagggtggaccactcagggccgctgctgtcacagccccggcgcatcgacgaattcctgctgcacagccacgagcagcaggtccggcaagctggtcgccggccatggttcaagaaaggtgccttgcctattgatggacacactggttgaatttctctgacactgccatgaccaactgcgaactgcattggttccttcccgacaggcagcaagaaggagcagcacagatggcagaggcacggcatgatcacattgaaacggcgtgatcaaaacaggagatgctgcgagcagatgaaagggatggaacgagttgggccatgagctctcctgatgagcaggtgtttttttcagggctggacagacagacagccccatgccatcagggaaagctgagatggaagtggaagctgttgtagtggggttttcaggtttcatgcaaccagattttgctctacctgaactagacaacaatgttgttgctgctgctgttgtacaagatctttttttgtgctcgcttgtgatgataatatgcatggcaagctccaaaatgtggtttccaatttatgtatagcaaggggttacaaaagttggtaatcataatgcttgtgccctgtagtatcatactattaccacgccaacttaatttcttgttttacccctgctggcgcctccaaaaccaaaacccagaatcgtattagcacatttgaaagtgtaggcttaccgcactttgtccacgtgaatcggttaacgccaaactgcagcttgctaatggtttcttt

SEQ ID NO: 217224 - DNA, 3246 bp, Zea Mays
cttcgttgctatctttaggctagccgctgctcggattgcttgttgtggacgcagggggaggagactgatcgcccggggaggcagaacagaacaagacagaacggaggaggaggaggaggaggagagagaggagaccgaccctccccctccctcccctgtgttcttgctcctcctctgtttccagtcccccgccgcctccgtggagccataagcaggtgcttggcccgccggtcggcggcgagggcggcagacatgggttgcgcggtgtcgaggcccggggtggtgtcctcgccgtcgtacgaggacgacgtgtcgtcgtgctcctacaatatgtcccgcagcgcgtcggcgtcggcggacctgggctcggcgtcggcgtcggcgtcggcgatgtcgatatggagccggccggtgcggctggaggcgttcaaagacgacgacgaggacgagcggcggcggcggcggtcggggagggaggctgcggtagcggcggcagcgcggctggggagcgtccggccgtgcgtggagggcgagcaggcggcagccgggtggccggcgtggctgagcgcggtggccgccgaggccgtgcacgggtgggtgccgctccgcgccgacggcttcgagaagctggagaaggtggggcagggcacgtacagcagcgtgttccgcgcgcgggagctggccacgggccgcctggtggcgctcaagaaggtgcgcttcgacagcgtggagcccgagagcgtgcggttcatggcgcgggagatcctcatcctccgccgcctccaaggccaccccaacgtcgtcggactcgagggcctcgtcacctcccgctcctccccctccatctacctcgtcttcgagtacctcgagcatgacctcgccggactcagctcctcccccgacatcaccttcaccgagtcgcaggtcacattgttggagatgctcttagctttagcttgtctgcctcgcgcgggcaaacatgtcagaaactgcggtacgcatcagtcggacaccgcgatcgcgggggccatgcatgctgtcagctcttgacccttgtcaccatccaatccaatggcgatcggtcgatcgtcttgtcacgatccacaaccgttgcctgatgacgcgcgcgcgataccatgccgtgcgtgcgtgcgtgcagatcaagtgctacatgcggcagctgctcgaggggctggcgcactgccacgcgcgcggggtgatgcaccgggacatcaagtgcgccaacctgctggtgagcgacggcggcgagctcaaggtggcggacttcgggctggcgaacctcttcgcgccggcgccggcggcgccgctgaccagccgggtggtcacgctctggtaccgcccgccggagctgctcctgggcgccacggcgtacgagccctccgtcgacctctggagcgccggctgcgtcttcgccgagatgcacgcgcgccgccccgtcctgcagggccgcaccgaggtcgagcagatccacaagatcttcaagctctgcggctcgccgcccgatcacttctggcgccgctcgggcctgtcccacgccgccgtcttccgcccgcagcaaccttacccgagccgactccgggacaccttcgccgcgtccatgcccgaccacgcgttccgactcctcgccatgctcctctccctcgaccctgccgcccgcggcaccgccgccgccgccctcgacgccgagtacttcacgacggcaccgtacgcatgcgaccccgggagcctgcccaagtacgcgcccaacaaggagatggacgccaagttccgggaagaatctagaaggaggagcaacctccggagccaaggcggcgagggggcgaagcggctgtcctgggggcacaagagcatgcagctgcaggacacgaaccagagccacgtgcacgccgaggaatcgctgcccgttgtggccaaaagcggcgcggcggtggcaaggaacgacggcgactcgcggctgctcgtcgacctggagcccgtgccggcgatcagattcagcaagcggcacggcgacgacggcgccggcgaccacgcgccgccgtacgccaagaccttgtccagcagcttcaaggagccggcccgtgtcgcggaccgccgccctctctccggccccgggcagctcgccgcgtccaccggtttcgcctgggccaagaagccccggtccgtcgccaggtcttcgacggcggcagccgccgtcacgaagcggagctactccaagggttcagggaccaagaacaacagcagcggaggaggtgacagagcaagaaccacctccgccgccaccgccactgaagcggcggcaccatacgaggtggagaagcaggaggtgatcaagcagtgggcacaggccgctgacgcattcagcgcctctgaagcttacagcagcaggttcaggcagacacttgctgccaggcagctcaagaatggaaagatgtacaaggggaaggtgagcagggtggaccactcagggccgctgctgtcacagccccggcgcatcgacgaattcctgctgcacagccacgagcagcaggtccggcaagctggtcgccggccatggttcaagaaaggtgccttgcctattgatggacacactggttgaatttctctgacactgccatgaccaactgcgaactgcattggttccttcccgacaggcagcaagaaggagcagcacagatggcagaggcacggcatgatcacattgaaacggcgtgatcaaaacaggagatgctgcgagcagatgaaagggatggaacgagttgggccatgagctctcctgatgagcaggtgtttttttcagggctggacagacagacagccccatgccatcagggaaagctgagatggaagtggaagctgttgtagtggggttttcaggtttcatgcaaccagattttgctctacctgaactagacaacaatgttgttgctgctgctgttgtacaagatctttttttgtgctcgcttgtgatgataatatgcatggcaagctccaaaatgtggtttccaatttatgtatagcaaggggttacaaaagttggtaatcataatgcttgtgccctgtagtatcatactattaccacgccaacttaatttcttgttttacccctgctggcgcctccaaaaccaaaacccagaatcgtattagcacatttgaaagtgtaggcttaccgcactttgtccacgtgaatcggttaacgccaaactgcagcttgctaatggtttcttt

SEQ ID NO: 217225 - DNA, 4215 bp, Zea Mays
gtttttttttcaaaattaattttttttgctcagaataattaagttttcccatgtgtaagcttttctcgcactcgtactccctcctccgctccggctaggaggctgctccctccgccgctccgccttcgtcgcgcggccatcgtttccggctctgtccccggatatctcttcgccaccgcttcctgcgccgcggcgccgccacaaccgaaggcgacccagtcgccttcaacactatggtgactcctcccactgtcgagcaggaggacgaggagatgctcgtgccccgccaggaggcggtcgacaccgacgcagcgcagcccatggaaggtactgtggtggcacagactgaggtggtgagcacggcggagagccagcctgtggaagatccgcagacatcacggttcacttggacaattgagaacttcaccaggttcagtgagaagaagcactatttagaggtttttgttgttggcggattcaaatggagtgtgctgattttccccaaggggaacaatgtggaccacttctcaatgtacttggatgttgctgactcaaccagccttccgtatggttggagccgctatgctcagtttagtcttgctgttgtaaaccaaatccagccagagtttacgatacgcaaagagacccaacatcaatttaatgctcgtgagagtgattggggtttcacatcttttatgcctttgagtgagctctatgatgcaagtagaggttacctcgtgaatgatactgttgttgtggaggccgaggttgctgtccgcagaattgttgactattggacatatgactcaaaaaaggaaactggttatgtgggcctgaaaaaccaaggagctacctgttatatgaactcccttctacagacactataccatataccctacttcaggaaggctgtatatcatatgccaaccactgaaaatgacataccatcaggaagcattcccttggcgctgcagagccttttctacaagctccagtacagtgacagtagtgtagctacaaaagagctgacaaaatcttttggttgggacacatatgattctttcatgcagcatgatgtacaagagctcaacagagttctgtctgagaaacttgaggacaaaatgaagggaactgtcgtagaaggaacaattgagcaattatttgaaggtcaccacatcaattacattgagtgtataaacgttgagcataaatctaaccgcaaggaatccttttatgatcttcagcttgacgtcaaaggctgtcgtgacatttattcgtcgtttgataaatatgttgaagttgaacgtctagagggtgataacaagtatcacgcagagaatcatggtctacaggatgcaaaaaagggcgttcttttccttgatttcccccctgttttgcaactccagctgaagcgctttgagtatgattatatgagagatagcatggttaagattaatgatcgctatgagttccctctgcaacttgatctggatagagatggtggcaaatacattgctccaaatgcagatcgaagtacacgaaacctttacactcttcacagtgttcttgttcatagtggtggggtacatggtggtcactactatgcattcatacggccaactttatctgagcaatggtataaatttgatgatgaacgtgtaacaaaagaagatgctaagaaggctcttgaagaacaatatgggggtgatgaagagttaccccaaataaaccctggtttcaacaacgctccatttaaattcacgaagtattcaaacgcgtatatgcttgtttatattcgtgaaagtgccaaggagaaaattatgtgtactgttgatgaaaaagacattgctgagcatttaagggtaaggttgaaaaaagaacaagaagagaaagaacacaaaaagaaagaaaaagctgaagctcatctttataccataattaaggtagctcgagatgaggatttgaaggaacaaattggaaagggtatatattttgatttggtggaccatgaaaaggtccataatttccgtatacagaaacaaatgccttttagttgtttcaaggaggaagtagccaaggaatatggcatccctgttcagtttcagcgcttctggttgtgggcaaagaggcaaaaccatacataccgccctaatcgtccattgaccgttcatgaggaaacacaatctgtggggcaactgagagaaatatcaaataaggcacacaatgttgagttgaagctgtttttggaagtagaacttgggctggatttgcggcctctccctcctcctgagaagggcaaggaagatattcttcttttcttcaaattctacaacccagaaaaggaagaactctgtttcatggggaggctctttgtgaaggccttgggaaaaccttcagaaatcctggcaaaactaaacgaaatggctggatttccccctgatcaagaaattgagctttttgaggaaattaagtttgagccaaacgtgatgtgtgaaactatagacaagaaactcacttttcattatagtcagcttgaagatggggacattatttgtttccaaaaatcaccaggagcagaatatgatgcacccgtgcgatatccggatgttccttcatttttggagtatgtccataataggcaggttgtacatttccggtctttggagaaaccaaaggatgatgatttttctttggaattgtcaaagcttcatacctatgatgatgttgttgagagagttgctcgccaacttgaattggacgatccagcgaaaattcggcttacaccccacaattgctactctcagcaacctaaaccacagcccgtcaaatatcgaggagtggtgcatctgtcggacatgctcatccactacaatcagacgtctgacatcttgtattatgaagtgttggatataccactgccagaattgcagttcctaaaaaccctgaaagttgcatttcaccatcctacgaaggatgaggttgttattcatagcatcaggcttccaaaaaatagcaccattgctgatgtaatatatgacttgaaaactaaggttgaactgtccagtcctaatgctgaactacgtgtactagaagtcttctaccacaagatctataagatctttccactacatgagaagatagagaatataaacgaccaatattggacactacgtgctgaggagattccagaagaggaaaaaaatataggcccaaatgatcggctaattcatgtttatcacttcaagaaagatattaatcagactcagcagattcagaactttggagaccctttcgttttggtcgttcatgaaggtgagactttagcagaagtcaagaagcgcatacagagtaaactgcaagtctctgctgatgaattttccaagtggaaatttgcatttatatcaatgaatcggccagactacctccaggattcagatgttgtacctactggctttcagaggagagaggtctacggagcttgggagcaatatcttgggatagagcacgctgatactgcaccaaaaagggtctatacagtgaatcagaaccgtcacgcatacgaaaagccggtcaaaatttacaattgagatttctaactaacatggccgcacggtgaaggcctccatacgagaggagcggccagaaaagggaggacagggaatttatactgtcagggggaaaacctcatagttagcgagccattcggtgtggcacggccatgtattccagcgctagaggccagccactgttatttcatctgtagcagccagcagctcctatagcaatgattttctttttgtacaagattttccttctttgccttagggtgatggcgcgagcgcattggtgtccgtttcggttgggcaattgcttcattcttagagcaaagctgggtacataagattttggtaggaagcgtgtatacaggcaggctgtatagttgtggctctctcggcttgatccctcgtatcttgtcttgtgctattgttaatgcagtgacaggggctgactgtaaatcgtggttccaattttcaggtcccatctcatgcacgacgctttgggggagctttcagaaacttgcggtatttgttggggaaaaacctccatgttgatttagtgatgtacggttgagatgtagtatggtaaagtttctggtcaaatgagcgtcttcctgctgaggtgatgcagccaaaccggcgtctcctcaaaacagac

SEQ ID NO: 217226 - DNA, 4049 bp, Zea Mays
aataattaagttttcccatgtgtaagcttttctcgcactcgtactccctcctccgctccggctaggaggctgctccctccgccgctccgccttcgtcgcgcggccatcgtttccggctctgtccccggatatctcttcgccaccgcttcctgcgccgcggcgccgccacaaccgaaggcgacccagtcgccttcaacactatggtgactcctcccactgtcgagcaggaggacgaggagatgctcgtgccccgccaggaggcggtcgacaccgacgcagcgcagcccatggaagtggtggcacagactgaggtggtgagcacggcggagagccagcctgtggaagatccgcagacatcacggttcacttggacaattgagaacttcaccaggttcagtgagaagaagcactatttagaggtttttgttgttggcggattcaaatggagtgtgctgattttccccaaggggaacaatgtggaccacttctcaatgtacttggatgttgctgactcaaccagccttccgtatggttggagccgctatgctcagtttagtcttgctgttgtaaaccaaatccagccagagtttacgatacgcaaagagacccaacatcaatttaatgctcgtgagagtgattggggtttcacatcttttatgcctttgagtgagctctatgatgcaagtagaggttacctcgtgaatgatactgttgttgtggaggccgaggttgctgtccgcagaattgttgactattggacatatgactcaaaaaaggaaactggttatgtgggcctgaaaaaccaaggagctacctgttatatgaactcccttctacagacactataccatataccctacttcaggaaggctgtatatcatatgccaaccactgaaaatgacataccatcaggaagcattcccttggcgctgcagagccttttctacaagctccagtacagtgacagtagtgtagctacaaaagagctgacaaaatcttttggttgggacacatatgattctttcatgcagcatgatgtacaagagctcaacagagttctgtctgagaaacttgaggacaaaatgaagggaactgtcgtagaaggaacaattgagcaattatttgaaggtcaccacatcaattacattgagtgtataaacgttgagcataaatctaaccgcaaggaatccttttatgatcttcagcttgacgtcaaaggctgtcgtgacatttattcgtcgtttgataaatatgttgaagttgaacgtctagagggtgataacaagtatcacgcagagaatcatggtctacaggatgcaaaaaagggcgttcttttccttgatttcccccctgttttgcaactccagctgaagcgctttgagtatgattatatgagagatagcatggttaagattaatgatcgctatgagttccctctgcaacttgatctggatagagatggtggcaaatacattgctccaaatgcagatcgaagtacacgaaacctttacactcttcacagtgttcttgttcatagtggtggggtacatggtggtcactactatgcattcatacggccaactttatctgagcaatggtataaatttgatgatgaacgtgtaacaaaagaagatgctaagaaggctcttgaagaacaatatgggggtgatgaagagttaccccaaataaaccctggtttcaacaacgctccatttaaattcacgaagtattcaaacgcgtatatgcttgtttatattcgtgaaagtgccaaggagaaaattatgtgtactgttgatgaaaaagacattgctgagcatttaagggtaaggttgaaaaaagaacaagaagagaaagaacacaaaaagaaagaaaaagctgaagctcatctttataccataattaaggtagctcgagatgaggatttgaaggaacaaattggaaagggtatatattttgatttggtggaccatgaaaaggtccataatttccgtatacagaaacaaatgccttttagttgtttcaaggaggaagtagccaaggaatatggcatccctgttcagtttcagcgcttctggttgtgggcaaagaggcaaaaccatacataccgccctaatcgtccattgaccgttcatgaggaaacacaatctgtggggcaactgagagaaatatcaaataaggcacacaatgttgagttgaagctgtttttggaagtagaacttgggctggatttgcggcctctccctcctcctgagaagggcaaggaagatattcttcttttcttcaaattctacaacccagaaaaggaagaactctgtttcatggggaggctctttgtgaaggccttgggaaaaccttcagaaatcctggcaaaactaaacgaaatggctggatttccccctgatcaagaaattgagctttttgaggaaattaagtttgagccaaacgtgatgtgtgaaactatagacaagaaactcacttttcattatagtcagcttgaagatggggacattatttgtttccaaaaatcaccaggagcagaatatgatgcacccgtgcgatatccggatgttccttcatttttggagtatgtccataataggcaggttgtacatttccggtctttggagaaaccaaaggatgatgatttttctttggaattgtcaaagcttcatacctatgatgatgttgttgagagagttgctcgccaacttgaattggacgatccagcgaaaattcggcttacaccccacaattgctactctcagcaacctaaaccacagcccgtcaaatatcgaggagtggtgcatctgtcggacatgctcatccactacaatcagacgtctgacatcttgtattatgaagtgttggatataccactgccagaattgcagttcctaaaaaccctgaaagttgcatttcaccatcctacgaaggatgaggttgttattcatagcatcaggcttccaaaaaatagcaccattgctgatgtaatatatgacttgaaaactaaggttgaactgtccagtcctaatgctgaactacgtgtactagaagtcttctaccacaagatctataagatctttccactacatgagaagatagagaatataaacgaccaatattggacactacgtgctgaggagattccagaagaggaaaaaaatataggcccaaatgatcggctaattcatgtttatcacttcaagaaagatattaatcagactcagcagattcagaactttggagaccctttcgttttggtcgttcatgaaggtgagactttagcagaagtcaagaagcgcatacagagtaaactgcaagtctctgctgatgaattttccaagtggaaatttgcatttatatcaatgaatcggccagactacctccaggattcagatgttgtacctactggctttcagaggagagaggtctacggagcttgggagcaatatcttgggatagagcacgctgatactgcaccaaaaagggtctatacagtgaatcagaaccgtcacgcatacgaaaagccggtcaaaatttacaattgagatttctaactaacatggccgcacggtgaaggcctccatacgagaggagcggccagaaaagggaggacagggaatttatactgtcagggggaaaacctcatagttagcgagccattcggtgtggcacggccatgtattccagcgctagaggccagccactgttatttcatctgtagcagccagcagctcctatagcaatgattttctttttgtacaagattttccttctttgccttagggtgatggcgcgagcgcattggtgtccgtttcggttgggcaattgcttcattcttagagcaaagctgggtacataagattttggtcccatctcatgcacgacgctttgggggagctttcagaaacttgcggtatttgttggggaaaaacctccatgttgatttagtgatgtacggttgagatgtagtatggtaaagtttctggtcaaatgagcgtcttcctgctgaggtgatgcagccaaaccggcgtctcctcaaaacagac

SEQ ID NO: 217227 - DNA, 3674 bp, Zea Mays
gttttcccatgtgtaagcttttctcgcactcgtactccctcctccgctccggctaggaggctgctccctccgccgctccgccttcgtcgcgcggccatcgtttccggctctgtccccggatatctcttcgccaccgcttcctgcgccgcggcgccgccacaaccgaaggcgacccagtcgccttcaacactatggtgactcctcccactgtcgagcaggaggacgaggagatgctcgtgccccgccaggaggcggtcgacaccgacgcagcgcagcccatggaagtggtggcacagactgaggtggtgagcacggcggagagccagcctgtggaagatccgcagacatcacggttcacttggacaattgagaacttcaccaggttcagtgagaagaagcactatttagaggtttttgttgttggcggattcaaatggagtgtgctgattttccccaaggggaacaatgtggaccacttctcaatgtacttggatgttgctgactcaaccagccttccgtatggttggagccgctatgctcagtttagtcttgctgttgtaaaccaaatccagccagagtttacgatacgcaaagagacccaacatcaatttaatgctcgtgagagtgattggggtttcacatcttttatgcctttgagtgagctctatgatgcaagtagaggttacctcgtgaatgatactgttgttgtggaggccgaggttgctgtccgcagaattgttgactattggacatatgactcaaaaaaggaaactggttatgtgggcctgaaaaaccaaggagctacctgttatatgaactcccttctacagacactataccatataccctacttcaggaaggctgtatatcatatgccaaccactgaaaatgacataccatcaggaagcattcccttggcgctgcagagccttttctacaagctccagtacagtgacagtagtgtagctacaaaagagctgacaaaatcttttggttgggacacatatgattctttcatgcagcatgatgtacaagagctcaacagagttctgtctgagaaacttgaggacaaaatgaagggaactgtcgtagaaggaacaattgagcaattatttgaaggtcaccacatcaattacattgagtgtataaacgttgagcataaatctaaccgcaaggaatccttttatgatcttcagcttgacgtcaaaggctgtcgtgacatttattcgtcgtttgataaatatgttgaagttgaacgtctagagggtgataacaagtatcacgcagagaatcatggtctacaggatgcaaaaaagggcgttcttttccttgatttcccccctgttttgcaactccagctgaagcgctttgagtatgattatatgagagatagcatggttaagattaatgatcgctatgagttccctctgcaacttgatctggatagagatggtggcaaatacattgctccaaatgcagatcgaagtacacgaaacctttacactcttcacagtgttcttgttcatagtggtggggtacatggtggtcactactatgcattcatacggccaactttatctgagcaatggtataaatttgatgatgaacgtgtaacaaaagaagatgctaagaaggctcttgaagaacaatatgggggtgatgaagagttaccccaaataaaccctggtttcaacaacgctccatttaaattcacgaagtattcaaacgcgtatatgcttgtttatattcgtgaaagtgccaaggagaaaattatgtgtactgttgatgaaaaagacattgctgagcatttaagggtaaggttgaaaaaagaacaagaagagaaagaacacaaaaagaaagaaaaagctgaagctcatctttataccataattaaggtagctcgagatgaggatttgaaggaacaaattggaaagggtatatattttgatttggtggaccatgaaaaggtccataatttccgtatacagaaacaaatgccttttagttgtttcaaggaggaagtagccaaggaatatggcatccctgttcagtttcagcgcttctggttgtgggcaaagaggcaaaaccatacataccgccctaatcgtccattgaccgttcatgaggaaacacaatctgtggggcaactgagagaaatatcaaataaggcacacaatgttgagttgaagctgtttttggaagtagaacttgggctggatttgcggcctctccctcctcctgagaagggcaaggaagatattcttcttttcttcaaattctacaacccagaaaaggaagaactctgtttcatggggaggctctttgtgaaggccttgggaaaaccttcagaaatcctggcaaaactaaacgaaatggctggatttccccctgatcaagaaattgagctttttgaggaaattaagtttgagccaaacgtgatgtgtgaaactatagacaagaaactcacttttcattatagtcagcttgaagatggggacattatttgtttccaaaaatcaccaggagcagaatatgatgcacccgtgcgatatccggatgttccttcatttttggagtatgtccataataggcaggttgtacatttccggtctttggagaaaccaaaggatgatgatttttctttggaattgtcaaagcttcatacctatgatgatgttgttgagagagttgctcgccaacttgaattggacgatccagcgaaaattcggcttacaccccacaattgctactctcagcaacctaaaccacagcccgtcaaatatcgaggagtggtgcatctgtcggacatgctcatccactacaatcagacgtctgacatcttgtattatgaagtgttggatataccactgccagaattgcagttcctaaaaaccctgaaagttgcatttcaccatcctacgaaggatgaggttgttattcatagcatcaggcttccaaaaaatagcaccattgctgatgtaatatatgacttgaaaactaaggttgaactgtccagtcctaatgctgaactacgtgtactagaagtcttctaccacaagatctataagatctttccactacatgagaagatagagaatataaacgaccaatattggacactacgtgctgaggagattccagaagaggaaaaaaatataggcccaaatgatcggctaattcatgtttatcacttcaagaaagatattaatcagactcagattcagaactttggagaccctttcgttttggtcgttcatgaaggtgagactttagcagaagtcaagaagcgcatacagagtaaactgcaagtctctgctgatgaattttccaagtggaaatttgcatttatatcaatgaatcggccagactacctccaggattcagatgttgtacctactggctttcagaggagagaggtctacggagcttgggagcaatatcttgggatagagcacgctgatactgcaccaaaaagggtctatacagtgaatcaggtcccatctcatgcacgacgctttgggggagctttcagaaacttgcggtatttgttggggaaaaacctccatgttgatttagtgatgtacggttgagatgtagtatggtaaagtttctggtcaaatgagcgtcttcctgctgaggtgatgcagccaaaccggcgtctcctcaaaacagac

SEQ ID NO: 217228 - DNA, 4037 bp, Zea Mays
gttttcccatgtgtaagcttttctcgcactcgtactccctcctccgctccggctaggaggctgctccctccgccgctccgccttcgtcgcgcggccatcgtttccggctctgtccccggatatctcttcgccaccgcttcctgcgccgcggcgccgccacaaccgaaggcgacccagtcgccttcaacactatggtgactcctcccactgtcgagcaggaggacgaggagatgctcgtgccccgccaggaggcggtcgacaccgacgcagcgcagcccatggaagtggtggcacagactgaggtggtgagcacggcggagagccagcctgtggaagatccgcagacatcacggttcacttggacaattgagaacttcaccaggttcagtgagaagaagcactatttagaggtttttgttgttggcggattcaaatggagtgtgctgattttccccaaggggaacaatgtggaccacttctcaatgtacttggatgttgctgactcaaccagccttccgtatggttggagccgctatgctcagtttagtcttgctgttgtaaaccaaatccagccagagtttacgatacgcaaagagacccaacatcaatttaatgctcgtgagagtgattggggtttcacatcttttatgcctttgagtgagctctatgatgcaagtagaggttacctcgtgaatgatactgttgttgtggaggccgaggttgctgtccgcagaattgttgactattggacatatgactcaaaaaaggaaactggttatgtgggcctgaaaaaccaaggagctacctgttatatgaactcccttctacagacactataccatataccctacttcaggaaggctgtatatcatatgccaaccactgaaaatgacataccatcaggaagcattcccttggcgctgcagagccttttctacaagctccagtacagtgacagtagtgtagctacaaaagagctgacaaaatcttttggttgggacacatatgattctttcatgcagcatgatgtacaagagctcaacagagttctgtctgagaaacttgaggacaaaatgaagggaactgtcgtagaaggaacaattgagcaattatttgaaggtcaccacatcaattacattgagtgtataaacgttgagcataaatctaaccgcaaggaatccttttatgatcttcagcttgacgtcaaaggctgtcgtgacatttattcgtcgtttgataaatatgttgaagttgaacgtctagagggtgataacaagtatcacgcagagaatcatggtctacaggatgcaaaaaagggcgttcttttccttgatttcccccctgttttgcaactccagctgaagcgctttgagtatgattatatgagagatagcatggttaagattaatgatcgctatgagttccctctgcaacttgatctggatagagatggtggcaaatacattgctccaaatgcagatcgaagtacacgaaacctttacactcttcacagtgttcttgttcatagtggtggggtacatggtggtcactactatgcattcatacggccaactttatctgagcaatggtataaatttgatgatgaacgtgtaacaaaagaagatgctaagaaggctcttgaagaacaatatgggggtgatgaagagttaccccaaataaaccctggtttcaacaacgctccatttaaattcacgaagtattcaaacgcgtatatgcttgtttatattcgtgaaagtgccaaggagaaaattatgtgtactgttgatgaaaaagacattgctgagcatttaagggtaaggttgaaaaaagaacaagaagagaaagaacacaaaaagaaagaaaaagctgaagctcatctttataccataattaaggtagctcgagatgaggatttgaaggaacaaattggaaagggtatatattttgatttggtggaccatgaaaaggtccataatttccgtatacagaaacaaatgccttttagttgtttcaaggaggaagtagccaaggaatatggcatccctgttcagtttcagcgcttctggttgtgggcaaagaggcaaaaccatacataccgccctaatcgtccattgaccgttcatgaggaaacacaatctgtggggcaactgagagaaatatcaaataaggcacacaatgttgagttgaagctgtttttggaagtagaacttgggctggatttgcggcctctccctcctcctgagaagggcaaggaagatattcttcttttcttcaaattctacaacccagaaaaggaagaactctgtttcatggggaggctctttgtgaaggccttgggaaaaccttcagaaatcctggcaaaactaaacgaaatggctggatttccccctgatcaagaaattgagctttttgaggaaattaagtttgagccaaacgtgatgtgtgaaactatagacaagaaactcacttttcattatagtcagcttgaagatggggacattatttgtttccaaaaatcaccaggagcagaatatgatgcacccgtgcgatatccggatgttccttcatttttggagtatgtccataataggcaggttgtacatttccggtctttggagaaaccaaaggatgatgatttttctttggaattgtcaaagcttcatacctatgatgatgttgttgagagagttgctcgccaacttgaattggacgatccagcgaaaattcggcttacaccccacaattgctactctcagcaacctaaaccacagcccgtcaaatatcgaggagtggtgcatctgtcggacatgctcatccactacaatcagacgtctgacatcttgtattatgaagtgttggatataccactgccagaattgcagttcctaaaaaccctgaaagttgcatttcaccatcctacgaaggatgaggttgttattcatagcatcaggcttccaaaaaatagcaccattgctgatgtaatatatgacttgaaaactaaggttgaactgtccagtcctaatgctgaactacgtgtactagaagtcttctaccacaagatctataagatctttccactacatgagaagatagagaatataaacgaccaatattggacactacgtgctgaggagattccagaagaggaaaaaaatataggcccaaatgatcggctaattcatgtttatcacttcaagaaagatattaatcagactcagattcagaactttggagaccctttcgttttggtcgttcatgaaggtgagactttagcagaagtcaagaagcgcatacagagtaaactgcaagtctctgctgatgaattttccaagtggaaatttgcatttatatcaatgaatcggccagactacctccaggattcagatgttgtacctactggctttcagaggagagaggtctacggagcttgggagcaatatcttgggatagagcacgctgatactgcaccaaaaagggtctatacagtgaatcagaaccgtcacgcatacgaaaagccggtcaaaatttacaattgagatttctaactaacatggccgcacggtgaaggcctccatacgagaggagcggccagaaaagggaggacagggaatttatactgtcagggggaaaacctcatagttagcgagccattcggtgtggcacggccatgtattccagcgctagaggccagccactgttatttcatctgtagcagccagcagctcctatagcaatgattttctttttgtacaagattttccttctttgccttagggtgatggcgcgagcgcattggtgtccgtttcggttgggcaattgcttcattcttagagcaaagctgggtacataagattttggtcccatctcatgcacgacgctttgggggagctttcagaaacttgcggtatttgttggggaaaaacctccatgttgatttagtgatgtacggttgagatgtagtatggtaaagtttctggtcaaatgagcgtcttcctgctgaggtgatgcagccaaaccggcgtctcctcaaaacagac

SEQ ID NO: 217229 - DNA, 4170 bp, Zea Mays
gttttcccatgtgtaagcttttctcgcactcgtactccctcctccgctccggctaggaggctgctccctccgccgctccgccttcgtcgcgcggccatcgtttccggctctgtccccggatatctcttcgccaccgcttcctgcgccgcggcgccgccacaaccgaaggcgacccagtcgccttcaacactatggtgactcctcccactgtcgaggaggacgaggagatgctcgtgccccgccaggaggcggtcgacaccgacgcagcgcagcccatggaaggtactgtggtggcacagactgaggtggtgagcacggcggagagccagcctgtggaagatccgcagacatcacggttcacttggacaattgagaacttcaccaggttcagtgagaagaagcactatttagaggtttttgttgttggcggattcaaatggagtgtgctgattttccccaaggggaacaatgtggaccacttctcaatgtacttggatgttgctgactcaaccagccttccgtatggttggagccgctatgctcagtttagtcttgctgttgtaaaccaaatccagccagagtttacgatacgcaaagagacccaacatcaatttaatgctcgtgagagtgattggggtttcacatcttttatgcctttgagtgagctctatgatgcaagtagaggttacctcgtgaatgatactgttgttgtggaggccgaggttgctgtccgcagaattgttgactattggacatatgactcaaaaaaggaaactggttatgtgggcctgaaaaaccaaggagctacctgttatatgaactcccttctacagacactataccatataccctacttcaggaaggctgtatatcatatgccaaccactgaaaatgacataccatcaggaagcattcccttggcgctgcagagccttttctacaagctccagtacagtgacagtagtgtagctacaaaagagctgacaaaatcttttggttgggacacatatgattctttcatgcagcatgatgtacaagagctcaacagagttctgtctgagaaacttgaggacaaaatgaagggaactgtcgtagaaggaacaattgagcaattatttgaaggtcaccacatcaattacattgagtgtataaacgttgagcataaatctaaccgcaaggaatccttttatgatcttcagcttgacgtcaaaggctgtcgtgacatttattcgtcgtttgataaatatgttgaagttgaacgtctagagggtgataacaagtatcacgcagagaatcatggtctacaggatgcaaaaaagggcgttcttttccttgatttcccccctgttttgcaactccagctgaagcgctttgagtatgattatatgagagatagcatggttaagattaatgatcgctatgagttccctctgcaacttgatctggatagagatggtggcaaatacattgctccaaatgcagatcgaagtacacgaaacctttacactcttcacagtgttcttgttcatagtggtggggtacatggtggtcactactatgcattcatacggccaactttatctgagcaatggtataaatttgatgatgaacgtgtaacaaaagaagatgctaagaaggctcttgaagaacaatatgggggtgatgaagagttaccccaaataaaccctggtttcaacaacgctccatttaaattcacgaagtattcaaacgcgtatatgcttgtttatattcgtgaaagtgccaaggagaaaattatgtgtactgttgatgaaaaagacattgctgagcatttaagggtaaggttgaaaaaagaacaagaagagaaagaacacaaaaagaaagaaaaagctgaagctcatctttataccataattaaggtagctcgagatgaggatttgaaggaacaaattggaaagggtatatattttgatttggtggaccatgaaaaggtccataatttccgtatacagaaacaaatgccttttagttgtttcaaggaggaagtagccaaggaatatggcatccctgttcagtttcagcgcttctggttgtgggcaaagaggcaaaaccatacataccgccctaatcgtccattgaccgttcatgaggaaacacaatctgtggggcaactgagagaaatatcaaataaggcacacaatgttgagttgaagctgtttttggaagtagaacttgggctggatttgcggcctctccctcctcctgagaagggcaaggaagatattcttcttttcttcaaattctacaacccagaaaaggaagaactctgtttcatggggaggctctttgtgaaggccttgggaaaaccttcagaaatcctggcaaaactaaacgaaatggctggatttccccctgatcaagaaattgagctttttgaggaaattaagtttgagccaaacgtgatgtgtgaaactatagacaagaaactcacttttcattatagtcagcttgaagatggggacattatttgtttccaaaaatcaccaggagcagaatatgatgcacccgtgcgatatccggatgttccttcatttttggagtatgtccataataggcaggttgtacatttccggtctttggagaaaccaaaggatgatgatttttctttggaattgtcaaagcttcatacctatgatgatgttgttgagagagttgctcgccaacttgaattggacgatccagcgaaaattcggcttacaccccacaattgctactctcagcaacctaaaccacagcccgtcaaatatcgaggagtggtgcatctgtcggacatgctcatccactacaatcagacgtctgacatcttgtattatgaagtgttggatataccactgccagaattgcagttcctaaaaaccctgaaagttgcatttcaccatcctacgaaggatgaggttgttattcatagcatcaggcttccaaaaaatagcaccattgctgatgtaatatatgacttgaaaactaaggttgaactgtccagtcctaatgctgaactacgtgtactagaagtcttctaccacaagatctataagatctttccactacatgagaagatagagaatataaacgaccaatattggacactacgtgctgaggagattccagaagaggaaaaaaatataggcccaaatgatcggctaattcatgtttatcacttcaagaaagatattaatcagactcagcagattcagaactttggagaccctttcgttttggtcgttcatgaaggtgagactttagcagaagtcaagaagcgcatacagagtaaactgcaagtctctgctgatgaattttccaagtggaaatttgcatttatatcaatgaatcggccagactacctccaggattcagatgttgtacctactggctttcagaggagagaggtctacggagcttgggagcaatatcttgggatagagcacgctgatactgcaccaaaaagggtctatacagtgaatcagaaccgtcacgcatacgaaaagccggtcaaaatttacaattgagatttctaactaacatggccgcacggtgaaggcctccatacgagaggagcggccagaaaagggaggacagggaatttatactgtcagggggaaaacctcatagttagcgagccattcggtgtggcacggccatgtattccagcgctagaggccagccactgttatttcatctgtagcagccagcagctcctatagcaatgattttctttttgtacaagattttccttctttgccttagggtgatggcgcgagcgcattggtgtccgtttcggttgggcaattgcttcattcttagagcaaagctgggtacataagattttggtaggaagcgtgtatacaggcaggctgtatagttgtggctctctcggcttgatccctcgtatcttgtcttgtgctattgttaatgcagtgacaggggctgactgtaaatcgtggttccaattttcaggtcccatctcatgcacgacgctttgggggagctttcagaaacttgcggtatttgttggggaaaaacctccatgttgatttagtgatgtacggttgagatgtagtatggtaaagtttctggtcaaatgagcgtcttcctgctgaggtgatgcagccaaaccggcgtctcctcaaaacagac

SEQ ID NO: 217230 - DNA, 4089 bp, Zea Mays
gttttcccatgtgtaagcttttctcgcactcgtactccctcctccgctccggctaggaggctgctccctccgccgctccgccttcgtcgcgcggccatcgtttccggctctgtccccggatatctcttcgccaccgcttcctgcgccgcggcgccgccacaaccgaaggcgacccagtcgccttcaacactatggtgactcctcccactgtcgagcaggaggacgaggagatgctcgtgccccgccaggaggcggtcgacaccgacgcagcgcagcccatggaagtggtggcacagactgaggtggtgagcacggcggagagccagcctgtggaagatccgcagacatcacggttcacttggacaattgagaacttcaccaggttcagtgagaagaagcactatttagaggtttttgttgttggcggattcaaatggagtgtgctgattttccccaaggggaacaatgtggaccacttctcaatgtacttggatgttgctgactcaaccagccttccgtatggttggagccgctatgctcagtttagtcttgctgttgtaaaccaaatccagccagagtttacgatacgcaaagagacccaacatcaatttaatgctcgtgagagtgattggggtttcacatcttttatgcctttgagtgagctctatgatgcaagtagaggttacctcgtgaatgatactgttgttgtggaggccgaggttgctgtccgcagaattgttgactattggacatatgactcaaaaaaggaaactggttatgtgggcctgaaaaaccaaggagctacctgttatatgaactcccttctacagacactataccatataccctacttcaggaaggctgtatatcatatgccaaccactgaaaatgacataccatcaggaagcattcccttggcgctgcagagccttttctacaagctccagtacagtgacagtagtgtagctacaaaagagctgacaaaatcttttggttgggacacatatgattctttcatgcagcatgatgtacaagagctcaacagagttctgtctgagaaacttgaggacaaaatgaagggaactgtcgtagaaggaacaattgagcaattatttgaaggtcaccacatcaattacattgagtgtataaacgttgagcataaatctaaccgcaaggaatccttttatgatcttcagcttgacgtcaaaggctgtcgtgacatttattcgtcgtttgataaatatgttgaagttgaacgtctagagggtgataacaagtatcacgcagagaatcatggtctacaggatgcaaaaaagggcgttcttttccttgatttcccccctgttttgcaactccagctgaagcgctttgagtatgattatatgagagatagcatggttaagattaatgatcgctatgagttccctctgcaacttgatctggatagagatggtggcaaatacattgctccaaatgcagatcgaagtacacgaaacctttacactcttcacagtgttcttgttcatagtggtggggtacatggtggtcactactatgcattcatacggccaactttatctgagcaatggtataaatttgatgatgaacgtgtaacaaaagaagatgctaagaaggctcttgaagaacaatatgggggtgatgaagagttaccccaaataaaccctggtttcaacaacgctccatttaaattcacgaagtattcaaacgcgtatatgcttgtttatattcgtgaaagtgccaaggagaaaattatgtgtactgttgatgaaaaagacattgctgagcatttaagggtaaggttgaaaaaagaacaagaagagaaagaacacaaaaagaaagaaaaagctgaagctcatctttataccataattaaggtagctcgagatgaggatttgaaggaacaaattggaaagggtatatattttgatttggtggaccatgaaaaggtccataatttccgtatacagaaacaaatgccttttagttgtttcaaggaggaagtagccaaggaatatggcatccctgttcagtttcagcgcttctggttgtgggcaaagaggcaaaaccatacataccgccctaatcgtccattgaccgttcatgaggaaacacaatctgatttgcggcctctccctcctcctgagaagggcaaggaagatattcttcttttcttcaaattctacaacccagaaaaggaagaactctgtttcatggggaggctctttgtgaaggccttgggaaaaccttcagaaatcctggcaaaactaaacgaaatggctggatttccccctgatcaagaaattgagctttttgaggaaattaagtttgagccaaacgtgatgtgtgaaactatagacaagaaactcacttttcattatagtcagcttgaagatggggacattatttgtttccaaaaatcaccaggagcagaatatgatgcacccgtgcgatatccggatgttccttcatttttggagtatgtccataataggcaggttgtacatttccggtctttggagaaaccaaaggatgatgatttttctttggaattgtcaaagcttcatacctatgatgatgttgttgagagagttgctcgccaacttgaattggacgatccagcgaaaattcggcttacaccccacaattgctactctcagcaacctaaaccacagcccgtcaaatatcgaggagtggtgcatctgtcggacatgctcatccactacaatcagacgtctgacatcttgtattatgaagtgttggatataccactgccagaattgcagttcctaaaaaccctgaaagttgcatttcaccatcctacgaaggatgaggttgttattcatagcatcaggcttccaaaaaatagcaccattgctgatgtaatatatgacttgaaaactaaggttgaactgtccagtcctaatgctgaactacgtgtactagaagtcttctaccacaagatctataagatctttccactacatgagaagatagagaatataaacgaccaatattggacactacgtgctgaggagattccagaagaggaaaaaaatataggcccaaatgatcggctaattcatgtttatcacttcaagaaagatattaatcagactcagcagattcagaactttggagaccctttcgttttggtcgttcatgaaggtgagactttagcagaagtcaagaagcgcatacagagtaaactgcaagtctctgctgatgaattttccaagtggaaatttgcatttatatcaatgaatcggccagactacctccaggattcagatgttgtacctactggctttcagaggagagaggtctacggagcttgggagcaatatcttgggatagagcacgctgatactgcaccaaaaagggtctatacagtgaatcagaaccgtcacgcatacgaaaagccggtcaaaatttacaattgagatttctaactaacatggccgcacggtgaaggcctccatacgagaggagcggccagaaaagggaggacagggaatttatactgtcagggggaaaacctcatagttagcgagccattcggtgtggcacggccatgtattccagcgctagaggccagccactgttatttcatctgtagcagccagcagctcctatagcaatgattttctttttgtacaagattttccttctttgccttagggtgatggcgcgagcgcattggtgtccgtttcggttgggcaattgcttcattcttagagcaaagctgggtacataagattttggtaggaagcgtgtatacaggcaggctgtatagttgtggctctctcggcttgatccctcgtatcttgtcttgtgctattgttaatgcagtgacaggggctgactgtaaatcgtggttccaattttcaggtcccatctcatgcacgacgctttgggggagctttcagaaacttgcggtatttgttggggaaaaacctccatgttgatttagtgatgtacggttgagatgtagtatggtaaagtttctggtcaaatgagcgtcttcctgctgaggtgatgcagccaaaccggcgtctcctcaaaacagac

SEQ ID NO: 217231 - DNA, 2477 bp, Zea Mays
cggcggagagccagcctgtggaagatccgcagacatcacggttcacttggacaattgagaacttcaccaggttcagtgagaagaagcactatttagaggtttttgttgttggcggattcaaatggagtgtgctgattttcccccctgttttgcaactccagctgaagcgctttgagtatgattatatgagagatagcatggttaagattaatgatcgctatgagttccctctgcaacttgatctggatagagatggtggcaaatacattgctccaaatgcagatcgaagtacacgaaacctttacactcttcacagtgttcttgttcatagtggtggggtacatggtggtcactactatgcattcatacggccaactttatctgagcaatggtataaatttgatgatgaacgtgtaacaaaagaagatgctaagaaggctcttgaagaacaatatgggggtgatgaagagttaccccaaataaaccctggtttcaacaacgctccatttaaattcacgaagtattcaaacgcgtatatgcttgtttatattcgtgaaagtgccaaggagaaaattatgtgtactgttgatgaaaaagacattgctgagcatttaagggtaaggttgaaaaaagaacaagaagagaaagaacacaaaaagaaagaaaaagctgaagctcatctttataccataattaaggtagctcgagatgaggatttgaaggaacaaattggaaagggtatatattttgatttggtggaccatgaaaaggtccataatttccgtatacagaaacaaatgccttttagttgtttcaaggaggaagtagccaaggaatatggcatccctgttcagtttcagcgcttctggttgtgggcaaagaggcaaaaccatacataccgccctaatcgtccattgaccgttcatgaggaaacacaatctgtggggcaactgagagaaatatcaaataaggcacacaatgttgagttgaagctgtttttggaagtagaacttgggctggatttgcggcctctccctcctcctgagaagggcaaggaagatattcttcttttcttcaaattctacaacccagaaaaggaagaactctgtttcatggggaggctctttgtgaaggccttgggaaaaccttcagaaatcctggcaaaactaaacgaaatggctggatttccccctgatcaagaaattgagctttttgaggaaattaagtttgagccaaacgtgatgtgtgaaactatagacaagaaactcacttttcattatagtcagcttgaagatggggacattatttgtttccaaaaatcaccaggagcagaatatgatgcacccgtgcgatatccggatgttccttcatttttggagtatgtccataataggcaggttgtacatttccggtctttggagaaaccaaaggatgatgatttttctttggaattgtcaaagcttcatacctatgatgatgttgttgagagagttgctcgccaacttgaattggacgatccagcgaaaattcggcttacaccccacaattgctactctcagcaacctaaaccacagcccgtcaaatatcgaggagtggtgcatctgtcggacatgctcatccactacaatcagacgtctgacatcttgtattatgaagtgttggatataccactgccagaattgcagttcctaaaaaccctgaaagttgcatttcaccatcctacgaaggatgaggttgttattcatagcatcaggcttccaaaaaatagcaccattgctgatgtaatatatgacttgaaaactaaggttgaactgtccagtcctaatgctgaactacgtgtactagaagtcttctaccacaagatctataagatctttccactacatgagaagatagagaatataaacgaccaatattggacactacgtgctgaggagattccagaagaggaaaaaaatataggcccaaatgatcggctaattcatgtttatcacttcaagaaagatattaatcagactcagattcagaactttggagaccctttcgttttggtcgttcatgaaggtgagactttagcagaagtcaagaagcgcatacagagtaaactgcaagtctctgctgatgaattttccaagtggaaatttgcatttatatcaatgaatcggccagactacctccaggattcagatgttgtacctactggctttcagaggagagaggtctacggagcttgggagcaatatcttgggatagagcacgctgatactgcaccaaaaagggtctatacagtgaatcaggtcccatctcatgcacgacgctttgggggagctttcagaaacttgcggtatttgttggggaaaaacctccatgttgatttagtgatgtacggttgagatgtagtatggtaaagtttctggtcaaatgagcgtcttcctgctgaggtgatgcagccaaaccggcgtctcctcaaaacagac

SEQ ID NO: 217232 - DNA, 1939 bp, Zea Mays
ctgtcgtagaaggaacaattgagcaattatttgaaggtcaccacatcaattacattgagtgtataaacgttgagcataaatctaaccgcaaggaatccttttatgatcttcagcttgacgtcaaaggctgtcgtgacatttattcgtcgtttgataaatatgttgaagttgaacgtctagagggtgataacaagtatcacgcagagaatcatggtctacaggatgcaaaaaagggcgttcttttccttgatttcccccctgttttgcaactccagctgaagcgctttgagtatgattatatgagagatagcatggttaagattaatgatcgctatgagttccctctgcaacttgatctggatagagatggtggcaaatacattgctccaaatgcagatcgaagtacacgaaacctttacactcttcacagtgttcttgttcatagtggtggggtacatggtggtcactactatgcattcatacggccaactttatctgagcaatggtataaatttgatgatgaacgtgtaacaaaagaagatgctaagaaggctcttgaagaacaatatgggggtgatgaagagttaccccaaataaaccctggtttcaacaacgctccatttaaattcacgaagtattcaaacgcgtatatgcttgtttatattcgtgaaagtgccaaggagaaaattatgtgtactgttgatgaaaaagacattgctgagcatttaagggtaaggttgaaaaaagaacaagaagagaaagaacacaaaaagaaagaaaaagctgaagctcatctttataccataattaaggtagctcgagatgaggatttgaaggaacaaattggaaagggtatatattttgatttggtggaccatgaaaaggtccataatttccgtatacagaaacaaatgccttttagttgtttcaaggaggaagtagccaaggaatatggcatccctgttcagtttcagcgcttctggttgtgggcaaagaggcaaaaccatacataccgccctaatcgtccattgaccgttcatgaggaaacacaatctgtggggcaactgagagaaatatcaaataaggcacacaatgttgagttgaagctgtttttggaagtagaacttgggctggatttgcggcctctccctcctcctgagaagggcaaggaagatattcttcttttcttcaaattctacaacccagaaaaggaagaactctgtttcatggggaggctctttgtgaaggccttgggaaaaccttcagaaatcctggcaaaactaaacgaaatggctggatttccccctgatcaagaaattgagctttttgaggaaattaagtttgagccaaacgtgatgtgtgaaactatagacaagaaactcacttttcattatagtcagcttgaagatggggacattatttgtttccaaaaatcaccaggagcagaatatgatgcacccgtgcgatatccggatgttccttcatttttggagtatgtccataataggcaggttgtacatttccggtctttggagaaaccaaaggatgatgatttttctttggaattgtcaaagcttcatacctatgatgatgttgttgagagagttgctcgccaacttgaattggacgatccagcgaaaattcggcttacaccccacaattgctactctcagcaacctaaaccacagcccgtcaaatatcgaggagtggtgcatctgtcggacatgctcatccactacaatcagacgtctgacatcttgtattatgaagtgttggatataccactgccagaattgcagttcctaaaaaccctgaaagttgcatttcaccatcctacgaaggatgaggttgttattcatagcatcaggcttccaaaaaatagcaccattgctgatgtaatatatgacttgaaaactaaggttacaagagcagattactt

SEQ ID NO: 217233 - DNA, 4799 bp, Zea Mays
cggggaagtgggaccatggcctcgagcctggttaccacggacaggagatggggtgctactcctgcaaggaaatctagtatgactgttctgggaaaagtcccaaaaccgattaatttaccaagtcagaggttggaaaacaatggtcttgatcccaatctggaactggttccaaagggcacccacacctggggcagcaaagcaccatctacaacaccaaacgcatggagttcctcatcaattctgtcttccaagaacgatggaagttccacttcatctagtcacttcaatgtccggcccacctctggcggaggctcaaggccatcaacagctggaagtgaatcacttggttcacccaatgcttggggtgcaaattctcgcccatcttcagcatcaggcacatttccatcatctcatctaccaatggccacaaatcgtccccaaagtgcggaaacaagacctggaagttcacaaatttctcgatttgcggataatgcttcagataatgtgaaagcatcgataaggactattgatagatcggaatcttcatcacgtgggcctgggttcacattaagtactggtgatttcccaacgcttggctctgaagcaaacagtcaacgagggcatagttcgaaagggcgcccaacttctagtttgggtaaagaggtgtcgcaaggtgaacaagtgaagagcctagcaactggaactggtgaagtaatttcaccatccaataatcaccctgttgatatcatgaagacagagcatcatgcacacactggaggtgctcctgtcccagccacaagtgtgccaaatgaaggcttgcaacaacagccatatccaccaaattttcctatgcctcctctgcagtttgattcatggcgtgcacctcctggtcacccccctgagggaatgtggcatagaggaccagtgccaggtgggccatacagacctgttggcccccctggtagtttccctgtcgaaccctttggttattatggccagttcccacccaactccgaagctgcaggaaggcagggctcagggcatggtggatatcacactaaaaatgatgtgtatcatcctatgcctcataattcctatattatgaatcagcctgttattccagtcagaccagtttatcagggtccagtgctgtatgatgggtattatggccctcaagcaaatttcaataacaccaatgttagagatcctcattttgttggaggtcctggaatactaaatcaattcccaaatcagaatgacaggtttcaccctggacatcctcaaaacagaccaggcaaacatgaaacggtcccaagggagcagctggaatctgataagctacatgtctttcaccaagaacaccctgggagtttgcatgataatccagatcgtctaggaggttcccgtgaatttgaaaggaatgtgcagccagcaccgccacttcttccacatcctgatggaaaacagactgatatgaacatgagggcagatacaagggacacctttagtgagactgaaagaaccgtggtacttacaaaatcggtgcctaaccagagaggttcggttggtatagaccatttgtctgtttatgaaaacacacgatcccatcacagagaaacttgtgatggcactctgcgcaagaagttcaaggaggatagctcagttgtacttgaccagcatcctgtcattaagaagaatgcagctttaatagagaaaattgagagtttgaacaacaaagccagaaatgtctatgcacagaatctcccagaaccagcttcatccaaggaattcaagaagcataaaaaaactactgatgtttcatctaatgatgtcatcagtacgacatgcacatctgatcaggcagtttctgtttcacatatttctgctgtggtgcagagacgaccaaatgtgaccattgagggtacaattcttggaccggcacattcacatttaactgaatttagcaaagctgagaagcttggtgattcaattaacaatcatttacataggagagttgattcttcgagaaacagttaccatggtccttgtaaagataggccagctaataaattcggaagttgtggacgtggagaaagttacataactaattcattaccagtagctgatttggggaatgatatccatcatggccaacaacctcagattgcctcacagctgcaacctgtgattgtacctgatgatatgccagcttcactcgattatgagtctcagaacaaaaagcaggatgcagcatcaaatgctcaaaacaatcagcgggcaaaaatgaaggagttggctgcagaacgtgcaaaaaggatgaaagctgaggaagaggaacggataaagaaccaaaaagcaaaagcactcgcaaagttggaagaattgaacaggcgatcatcagtacttcagaagaaatcaaatgatacaaaagtagaaactgatgatgcacatgataagcaacagattggacttgatgtgaatgctaaacttgacacttcaactgaacaacatgatgttgttacgcctgataggcttactgctcttctgcctcctaatgatcccaatcatactatggttcagatacaggcccagtctactgcacaatcaaatgctttagatggtggcaaagcgcatgatgctcataccacctcatctttggtcaagaacacacacagcaacatggagcatgttgtgcagaagagtatctcacagtcgcataatatcagtatggtaaagactaagcaaggctacaggaaaagacaggttgtttcagaggagaaaatttctggcgagaaggcaagtgcttcagtaaccactgattccagtgtgcagaaaaatgttgatgttcccgtcgacacagtaacggctgttgttgcaccacatgatgatcccccaactcagaacaagaagggaacccggcatttgaggagtaagaaaaagctatgaatcaggagcatgttaattcagcagatggaacaaatagtactgaaagtggcctatcaagacctcagcaagcaagaaaatctggaaagcatcagcatgttcttcggcctgttgagaagccacatgggaatgatggtgtcttgtgggcaccagatatgctaccattgcataatgagcagtctgatggagccatgccgactgcagcagtagctgacgtcactcagccagctgggaaagccatcaatgatggagagaatgtgacaagaacaaagagggctgaaatggaaagatatgttcccaagcctatgtccaaagagctgcaacaacataatccaagccatgataaggaagcaattgataagcccggtgctgctaaatcacatcctgcagccgaacccaagaaaactagcaaaggacatgggggcaaatctaatccttcttggcgcaagcgggatccagatcaacctgctatggtggcaccaaattctgttgaccaagcagacaactcttatgaatcaaaggaggttcagaactgcaccgatatgaatcagcctgttgaacttggcaaggaagatacacagttaaaatccaatgtagatgctgctgctgagaatagctcagctccagctcaaactgttccactatctgccggtggtgcaaaagaacatagtgcggctaacaggcaaaggcgacagcattttaaggctcaaagaaatgaagcaagtagctactcaaatgagagcaaagttagagagggcaagaacgactctgtctatcaatcagcatcaccggtgattgattcgaactcatccaatcacaagaatgtgccaagatcagatgtgaaaaacagcggcatagtttcacattctagagcctggaagccgaaaaccaattcccatcctcagaacagctcagacggcaagattgctgttgaagggaaagtggattcccatggtggtaggcttgagctgaacatgcccaaaggatctgatacaattacccatcaagacaccagcagtaaaccgatgaaaaggagtgatggcaccgatgaggcctcacacagcaaacaggagaacctgacacaggaagatggtaaccagaagatcgagactggacaggagcaggctaatcctgcaccgcgtcgccaaggccagcccaatgcaaggtatcacaggggaggtggggcacacaggggaaggggcggttatgacactgggaggccaaaccatggcacaaacgcggagaggtggaagggtggcagccatcttgaataccagccggtcggatcccaaaacaaagctggaggcgacttccagctgagtcagggcatggaagatcgaaccgaggggcctcctgcatctggacaagcgttcggggagcgtggccacagcagggggctacgcccagcaggccgctttgtccggcgaaacactgcctctacgtctaccactaattctcaccaacatgaataatcttccgcggctgccacatccgctgagctgcaggaaaaaactcgccttcgtggtggcgtttcacaacatatttggatgcacttgggtgggcggttggtgtccgtcgtcaacgacgagtctacggtggtgagcattaggatcatgtaacggtattagtctttgccccaaagggcacaccctggcccctcacgtgtcacgtgtgactagattttttccagaggaacatccacccttgtttgggatgcaacgttggaacgtgtgctaacagagttgtgtttgagaactgggtttaaatgttgttagcctgtgttgctgatgggaactgagagtgttggtttttgcccaactttcatggcatgtctttgtttgattgttggctctgtt

SEQ ID NO: 217234 - DNA, 4698 bp, Zea Mays
cggggaagtgggaccatggcctcgagcctggttaccacggacaggagatggggtgctactcctgcaaggaaatctagtatgactgttctgggaaaagtcccaaaaccgattaatttaccaagtcagaggttggaaaacaatggtcttgatcccaatctggaactggttccaaagggcacccacacctggggcagcaaagcaccatctacaacaccaaacgcatggagttcctcatcaattctgtcttccaagaacgatggaagttccacttcatctagtcacttcaatgtccggcccacctctggcggaggctcaaggccatcaacagctggaagtgaatcacttggttcacccaatgcttggggtgcaaattctcgcccatcttcagcatcaggcacatttccatcatctcatctaccaatggccacaaatcgtccccaaagtgcggaaacaagacctggaagttcacaaatttctcgatttgcggataatgcttcagataatgtgaaagcatcgataaggactattgatagatcggaatcttcatcacgtgggcctgggttcacattaagtactggtgatttcccaacgcttggctctgaagcaaacagtcaacgagggcatagttcgaaagggcgcccaacttctagtttgggtaaagaggtgtcgcaaggtgaacaagtgaagagcctagcaactggaactggtgaagtaatttcaccatccaataatcaccctgttgatatcatgaagacagagcatcatgcacacactggaggtgctcctgtcccagccacaagtgtgccaaatgaaggcttgcaacaacagccatatccaccaaattttcctatgcctcctctgcagtttgattcatggcgtgcacctcctggtcacccccctgagggaatgtggcatagaggaccagtgccaggtgggccatacagacctgttggcccccctggtagtttccctgtcgaaccctttggttattatggccagttcccacccaactccgaagctgcaggaaggcagggctcagggcatggtggatatcacactaaaaatgatgtgtatcatcctatgcctcataattcctatattatgaatcagcctgttattccagtcagaccagtttatcagggtccagtgctgtatgatgggtattatggccctcaagcaaatttcaataacaccaatgttagagatcctcattttgttggaggtcctggaatactaaatcaattcccaaatcagaatgacaggtttcaccctggacatcctcaaaacagaccaggcaaacatgaaacggtcccaagggagcagctggaatctgataagctacatgtctttcaccaagaacaccctgggagtttgcatgataatccagatcgtctaggaggttcccgtgaatttgaaaggaatgtgcagccagcaccgccacttcttccacatcctgatggaaaacagactgatatgaacatgagggcagatacaagggacacctttagtgagactgaaagaaccgtggtacttacaaaatcggtgcctaaccagagaggttcggttggtatagaccatttgtctgtttatgaaaacacacgatcccatcacagagaaacttgtgatggcactctgcgcaagaagttcaaggaggatagctcagttgtacttgaccagcatcctgtcattaagaagaatgcagctttaatagagaaaattgagagtttgaacaacaaagccagaaatgtctatgcacagaatctcccagaaccagcttcatccaaggaattcaagaagcataaaaaaactactgatgtttcatctaatgatgtcatcagtacgacatgcacatctgatcaggcagtttctgtttcacatatttctgctgtggtgcagagacgaccaaatgtgaccattgagggagagttgattcttcgagaaacagttaccatggtccttgtaaagataggccagctaataaattcggaagttgtggacgtggagaaagttacataactaattcattaccagtagctgatttggggaatgatatccatcatggccaacaacctcagattgcctcacagctgcaacctgtgattgtacctgatgatatgccagcttcactcgattatgagtctcagcgggcaaaaatgaaggagttggctgcagaacgtgcaaaaaggatgaaagctgaggaagaggaacggataaagaaccaaaaagcaaaagcactcgcaaagttggaagaattgaacaggcgatcatcagtacttcagaagaaatcaaatgatacaaaagtagaaactgatgatgcacatgataagcaacagattggacttgatgtgaatgctaaacttgacacttcaactgaacaacatgatgttgttacgcctgataggcttactgctcttctgcctcctaatgatcccaatcatactatggttcagatacaggcccagtctactgcacaatcaaatgctttagatggtggcaaagcgcatgatgctcataccacctcatctttggtcaagaacacacacagcaacatggagcatgttgtgcagaagagtatctcacagtcgcataatatcagtatggtaaagactaagcaaggctacaggaaaagacaggttgtttcagaggagaaaatttctggcgagaaggcaagtgcttcagtaaccactgattccagtgtgcagaaaaatgttgatgttcccgtcgacacagtaacggctgttgttgcaccacatgatgatcccccaactcagaacaagaagggaacccggcatttgaggagtaagaaaaagtataactgttggtggactttcacttacagctatgaatcaggagcatgttaattcagcagatggaacaaatagtactgaaagtggcctatcaagacctcagcaagcaagaaaatctggaaagcatcagcatgttcttcggcctgttgagaagccacatgggaatgatggtgtcttgtgggcaccagatatgctaccattgcataatgagcagtctgatggagccatgccgactgcagcagtagctgacgtcactcagccagctgggaaagccatcaatgatggagagaatgtgacaagaacaaagagggctgaaatggaaagatatgttcccaagcctatgtccaaagagctgcaacaacataatccaagccatgataaggaagcaattgataagcccggtgctgctaaatcacatcctgcagccgaacccaagaaaactagcaaaggacatgggggcaaatctaatccttcttggcgcaagcgggatccagatcaacctgctatggtggcaccaaattctgttgaccaagcagacaactcttatgaatcaaaggaggttcagaactgcaccgatatgaatcagcctgttgaacttggcaaggaagatacacagttaaaatccaatgtagatgctgctgctgagaatagctcagctccagctcaaactgttccactatctgccggtggtgcaaaagaacatagtgcggctaacaggcaaaggcgacagcattttaaggctcaaagaaatgaagcaagtagctactcaaatgagagcaaagttagagagggcaagaacgactctgtctatcaatcagcatcaccggtgattgattcgaactcatccaatcacaagaatgtgccaagatcagatgtgaaaaacagcggcatagtttcacattctagagcctggaagccgaaaaccaattcccatcctcagaacagctcagacggcaagattgctgttgaagggaaagtggattcccatggtggtaggcttgagctgaacatgcccaaaggatctgatacaattacccatcaagacaccagcagtaaaccgatgaaaaggagtgatggcaccgatgaggcctcacacagcaaacaggagaacctgacacaggaagatggtaaccagaagatcgagactggacaggagcaggctaatcctgcaccgcgtcgccaaggccagcccaatgcaaggtatcacaggggaggtggggcacacaggggaaggggcggttatgacactgggaggccaaaccatggcacaaacgcggagaggtggaagggtggcagccatcttgaataccagccggtcggatcccaaaacaaagctggaggcgacttccagctgagtcagggcatggaagatcgaaccgaggggcctcctgcatctggacaagcgttcggggagcgtggccacagcagggggctacgcccagcaggccgctttgtccggcgaaacactgcctctacgtctaccactaattctcaccaacatgaataatcttccgcggctgccacatccgctgagctgcaggaaaaaactcgccttcgtggtggcgtttcacaacatatttggatgcacttgggtgggcggttggtgtccgtcgtcaacgacgagtctacggtggtgagcattaggatcatgtaacggtattagtctttgccccaaagggcacaccctggcccctcacgtgtcacgtgtgactagattttttccagaggaacatccacccttgtttgggatgcaacgttggaacgtgtgctaacagagttgtgtttgagaactgggtttaaatgttgttagcctgtgttgctgatgggaactgagagtgttggtttttgcccaactttcatggcatgtctttgtttgattgttggctctgtt

SEQ ID NO: 217235 - DNA, 4940 bp, Zea Mays
aagtgggaccatggcctcgagcctggttaccacggacaggagatggggtgctactcctgcaaggaaatctagtatgactgttctgggaaaagtcccaaaaccgattaatttaccaagtcagaggttggaaaacaatggtcttgatcccaatctggaactggttccaaagggcacccacacctggggcagcaaagcaccatctacaacaccaaacgcatggagttcctcatcaattctgtcttccaagaacgatggaagttccacttcatctagtcacttcaatgtccggcccacctctggcggaggctcaaggccatcaacagctggaagtgaatcacttggttcacccaatgcttggggtgcaaattctcgcccatcttcagcatcaggcacatttccatcatctcatctaccaatggccacaaatcgtccccaaagtgcggaaacaagacctggaagttcacaaatttctcgatttgcggataatgcttcagataatgtgaaagcatcgataaggactattgatagatcggaatcttcatcacgtgggcctgggttcacattaagtactggtgatttcccaacgcttggctctgaagcaaacagtcaacgagggcatagttcgaaagggcgcccaacttctagtttgggtaaagaggtgtcgcaaggtgaacaagtgaagagcctagcaactggaactggtgaagtaatttcaccatccaataatcaccctgttgatatcatgaagacagagcatcatgcacacactggaggtgctcctgtcccagccacaagtgtgccaaatgaaggcttgcaacaacagccatatccaccaaattttcctatgcctcctctgcagtttgattcatggcgtgcacctcctggtcacccccctgagggaatgtggcatagaggaccagtgccaggtgggccatacagacctgttggcccccctggtagtttccctgtcgaaccctttggttattatggccagttcccacccaactccgaagctgcaggaaggcagggctcagggcatggtggatatcacactaaaaatgatgtgtatcatcctatgcctcataattcctatattatgaatcagcctgttattccagtcagaccagtttatcagggtccagtgctgtatgatgggtattatggccctcaagcaaatttcaataacaccaatgttagagatcctcattttgttggaggtcctggaatactaaatcaattcccaaatcagaatgacaggtttcaccctggacatcctcaaaacagaccaggcaaacatgaaacggtcccaagggagcagctggaatctgataagctacatgtctttcaccaagaacaccctgggagtttgcatgataatccagatcgtctaggaggttcccgtgaatttgaaaggaatgtgcagccagcaccgccacttcttccacatcctgatggaaaacagactgatatgaacatgagggcagatacaagggacacctttagtgagactgaaagaaccgtggtacttacaaaatcggtgcctaaccagagaggttcggttggtatagaccatttgtctgtttatgaaaacacacgatcccatcacagagaaacttgtgatggcactctgcgcaagaagttcaaggaggatagctcagttgtacttgaccagcatcctgtcattaagaagaatgcagctttaatagagaaaattgagagtttgaacaacaaagccagaaatgtctatgcacagaatctcccagaaccagcttcatccaaggaattcaagaagcataaaaaaactactgatgtttcatctaatgatgtcatcagtacgacatgcacatctgatcaggcagtttctgtttcacatatttctgctgtggtgcagagacgaccaaatgtgaccattgagggtacaattcttggaccggcacattcacatttaactgaatttagcaaagctgagaagcttggtgattcaattaacaatcatttacataggagagttgattcttcgagaaacagttaccatggtccttgtaaagataggccagctaataaattcggaagttgtggacgtggagaaagttacataactaattcattaccagtagctgatttggggaatgatatccatcatggccaacaacctcagattgcctcacagctgcaacctgtgattgtacctgatgatatgccagcttcactcgattatgagtctcagcgggcaaaaatgaaggagttggctgcagaacgtgcaaaaaggatgaaagctgaggaagaggaacggataaagaaccaaaaagcaaaagcactcgcaaagttggaagaattgaacaggcgatcatcagtacttcagaagaaatcaaatgatacaaaagtagaaactgatgatgcacatgataagcaacagattggacttgatgtgaatgctaaacttgacacttcaactgaacaacatgatgttgttacgcctgataggcttactgctcttctgcctcctaatgatcccaatcatactatggttcagatacaggcccagtctactgcacaatcaaatgctttagatggtggcaaagcgcatgatgctcataccacctcatctttggtcaagaacacacacagcaacatggagcatgttgtgcagaagagtatctcacagtcgcataatatcagtatggtaaagactaagcaaggctacaggaaaagacaggttgtttcagaggagaaaatttctggcgagaaggcaagtgcttcagtaaccactgattccagtgtgcagaaaaatgttgatgttcccgtcgacacagtaacggctgttgttgcaccacatgatgatcccccaactcagaacaagaagggaacccggcatttgaggagtaagaaaaaggtagatgatgcttcagttatttctaaacatccacctgtggtgtttaatgaacagaatacagtgaaaatctctaccgagccaaaaacacatactggtggtgttattatcagtagctctattgttccgattgaaggtactattgtaactgttggaagtataactgttggtggactttcacttacagctatgaatcaggagcatgttaattcagcagatggaacaaatagtactgaaagtggcctatcaagacctcagcaagcaagaaaatctggaaagcatcagcatgttcttcggcctgttgagaagccacatgggaatgatggtgtcttgtgggcaccagatatgctaccattgcataatgagcagtctgatggagccatgccgactgcagcagtagctgacgtcactcagccagctgggaaagccatcaatgatggagagaatgtgacaagaacaaagagggctgaaatggaaagatatgttcccaagcctatgtccaaagagctgcaacaacataatccaagccatgataaggaagcaattgataagcccggtgctgctaaatcacatcctgcagccgaacccaagaaaactagcaaaggacatgggggcaaatctaatccttcttggcgcaagcgggatccagatcaacctgctatggtggcaccaaattctgttgaccaagcagacaactcttatgaatcaaaggaggttcagaactgcaccgatatgaatcagcctgttgaacttggcaaggaagatacacagttaaaatccaatgtagatgctgctgctgagaatagctcagctccagctcaaactgttccactatctgccggtggtgcaaaagaacatagtgcggctaacaggcaaaggcgacagcattttaaggctcaaagaaatgaagcaagtagctactcaaatgagagcaaagttagagagggcaagaacgactctgtctatcaatcagcatcaccggtgattgattcgaactcatccaatcacaagaatgtgccaagatcagatgtgaaaaacagcggcatagtttcacattctagagcctggaagccgaaaaccaattcccatcctcagaacagctcagacggcaagattgctgttgaagggaaagtggattcccatggtggtaggcttgagctgaacatgcccaaaggatctgatacaattacccatcaagacaccagcagtaaaccgatgaaaaggagtgatggcaccgatgaggcctcacacagcaaacaggagaacctgacacaggaagatggtaaccagaagatcgagactggacaggagcaggctaatcctgcaccgcgtcgccaaggccagcccaatgcaaggtatcacaggggaggtggggcacacaggggaaggggcggttatgacactgggaggccaaaccatggcacaaacgcggagaggtggaagggtggcagccatcttgaataccagccggtcggatcccaaaacaaagctggaggcgacttccagctgagtcagggcatggaagatcgaaccgaggggcctcctgcatctggacaagcgttcggggagcgtggccacagcagggggctacgcccagcaggccgctttgtccggcgaaacactgcctctacgtctaccactaattctcaccaacatgaataatcttccgcggctgccacatccgctgagctgcaggaaaaaactcgccttcgtggtggcgtttcacaacatgtagatttggatgcacttgggtgggcggttggtgtccgtcgtcaacgacgagtctacggtggtgagcattaggatcatgtaacggtattagtctttgccccaaagggcacaccctggcccctcacgtgtcacgtgtgactagattttttccagaggaacatccacccttgtttgggatgcaacgttggaacgtgtgctaacagagttgtgtttgagaactgggtttaaatgttgttagcctgtgttgctgatgggaactgagagtgttggtttttgcccaactttcatggcatgtctttgtttgattgttggctctgtt

SEQ ID NO: 217236 - DNA, 4554 bp, Zea Mays
caggactttgccaaacgcccaaacagactcgactgtgttcatcggttcattcctgcgttctcttctcgagttcacgagtgctccctctctctctctcgttacgatgattgggtgaccgccgccgccgccgttgccccacgccaggtgcccaggtcttcgtcaggccctttgccgccgacgagcatcaaccctatactaaggttattttggctgtgcatatcacgttgtagagttctgggtttttgctctgaagaacaaaatggacaatgctcagagtgacaaccgaactgataccaagcaagatgatgatgcgcgccaaagcaaacaggatgatgaggaggcccgccttgaagaatataaaaagatcattgatcaaaagatttccctccgccggagcaaccaaaaccctgaaaggcctgatgcaaactacctgagaaccctggactctagtattaagcgcaatacaaccgttataaagaagttgaagacaataaatgatgaacagaaggatgtgataatggatgagttaaaaagtgtgaatttgagtaaatttgtcagcgaagcagtttcttacatttgtgaggccaaacttcgctccgctgatatacaagctgctgttcaggtttgctcgctccttcatcaaagatacaaggacttctctccttgtcttatagaaggtctactgaagatcttctttcctggaaaatctggagatgatttggatgcagataaaaattcgagagccatgaagaagagaagcacattgaaacttttgattgaactatattttgttggaattgtcgaagatgctagcatatttgtaaatattataaaagatcttacatcagcagaacatttgaaggaccgtgaaggaactcaaacaaacctatctcttctatctacctttgctcgtcaagggaagttttttgtagggctacaacctcatggtcaagaagcttatgacgagttctttaaggacctaaatgttactgctgagcagaagaagttctttaagaaagccttgaactcttactatgatgctgtagctgaactactacaatcagaacatgcgtctcttcgtctaatggaggcggagaatgcaaaagttttaagtgccaaaggtgaactaagtgatgagaacacatcctcatatgagaaactcaggaagtcttttgatcagttactacgtggtgtttcctcgttggctgaatctcttgacatgcaacctccagtgatgccagatgatggaaatacaacaagagttactacaggaaccgatgcgttgccttcttctggaaaagaatcatctgcattggaacctatctgggatgatgaagataccaaagctttttatgaatctttacctgatctcagagcatttgtgccagctgtattactgggagaggttgaaccaaaatcaaatgagcaacatgttaagggccgtgagctatctggtgagtccacttcagaacaagagactgaactacatgacaatgttccaacttctgccactgaacgtcaactagaagttaaagtagatgatctagtgaaagagagtgaagacagagataaagagaaggggaaggatggagaaaaggaaaaatccaaggagaaggatctggataagaaaaatgaaagagagaaggagaaaggaagagtcttggatggcgcaagtctggataacctcctgcagaggctgccaggatgtgtcagtcgtgatctcattgatcaattgacggttgagttttgctacctaaattctaaagcaaatcgaaagaaacttgtgcgtgccttattcaatgttaataggacttcactggaactgttgccatactattctcgtttggttgcaacactctcaacctgtatgaaagatgttccaagtatgcttctgtctatgcttgaagaggagttcaactttttaataaataagaaggaccagatcaacatagaaacaaaaataaaaaatatacggtttatcggggagttgtgcaagttcaaaatggctcctccagctcttgtttttagctgtttgaaggcctgccttgatgatttcagtcatcataatattgatgtggcttgcaaccttcttgagacttgtggtcgttttttgtatcgctcacctgaaactaccattcgcatggctaacatgctggagatactgatgagattgaaaaatgtcaagaatttggattcacgccacagtacacttgtagaaaacgcctactacctttgtaaaccgcccgaaagatctgcgcggatatcgaaagttcggccaccgttgcatcaatacataagaaagttgcttttctcagatcttgacaaatcaagtgttgaacatgttttgcgccaactacgcaaattaccttgggcagagtgtcaacaataccttctgaagtgctttctaaaggttcacaaaggaaagtacagccaagttcatctgattgctcttctcactgctagtctcagccgctatcacgatgactttgctgtctcagtggtagatgaggttttagaagagataagggttggattggagttgaatgactatgggatgcaacaaaggaggcttgcccacatgcggttccttggagagctatacagctacaagcatatagattcatcagttgtttttgatacactgtaccttatcattgtgtttggtcatggaactccggaacaagatgtgctggatccaccagaagattgtttcagaatcaggttgatcattacacttctacagacctgtggtcactatttcagtaaggggtcttcaaaaaggaagctcgacaaattcttgctacactttcaaagatacattattagtaaagggcccttaccactcgacatagagtttgacattcaggatttatttggtgagctacgaccaaccatgtctaggtattcgtcaattgaggaacttgttgccgcgttagttgagtttgaagaaaatgaacgttcagccccagtagaaaaggttgaaaatgaaagacactccgacaatgaatctcagaaaagacactcgcgagatgctggtccatctgtgaatggtgaaagcgctgcaaatggaaccgaggaaaatggcaaggctcatgaagtagcagatagtgagagctattcagatactggcagcattgatggacgggaagaagaggaggatatattatctgaggataaatcaaatgatggctcagataacgaaggcgacgatgaagatgatggcattcctgttgtttctgatgaagatgaaaatgttgaggttagacagaaagtcatgaatgttgatcctaaggagcaagaagacttcgatcgagagctcaaagcccttcttcaggagagcttggagtctcgtaaatcagaggcccgttcaaggctccctttgaatatgatggtgccgatgaacgtcctcgagggttcaaaagactcaagggccacagaatctgagagtggagaagaaacagtagacgaagagggtgggaatgctgggggtagcagcaaggtgcgtgtgaaggtgctaatgaagaaaggacacaagcaacagacaagacaaatgttaattccggccgatagttcaattgtgcaaagcacgaagcagcaggaagctgctgagcttgaggagaagcagagcatcaagcggaggatccttgagtacaatgagagggaggaagaattgaatggagcatcccaaatggggaactggggccaaggagctaccagtaccagcagtatcagatcaggtggccggggcagctgggatggttcagcacggggaggtggtcgacaacggcaccacataacgggttctggtggtttctaccacagttatggcaggagaagataagttcgcctgtgtgagctatttcgccctgagccttttggcaggtagaaagcatcctagtctgacaaattgcctctagcaaatgagattagcgtttaacacagcttgatggacaattgcctctagcaccctagtctgaaaataagacaattctaccactggtcatgggagatagcaatgccttgagaaggagctgcaaatctgatggtcctaatggcttgagttgctacggtgtttggtaaagctggttgtgatggctgtacccggatacatgcgcatactgtttcgacgccatgtagggggtatctggtcaaagttcgctgtctgatgcctgttctaatttagtggagtattactggcaatgtggtacaagcatcttgtcttgaaaatcgaaaactgcacggtatgtgtgcgccattttttgtctgatgaggtgtgttccatgcgtgtatttcatatgtagctacaccaatcgcgtgtccaccgaacgatgctaacttgctatgccgatggagcatgctttctacccgcatcgcaacccgcaaatccttgtccagtcgtttgtcttccatccaggaatgataccgagttctcatgtcacgcttgacgcttctttccgtcctgctaaagaaaaatgattgctcgtcctgtgcccgtgcgaaggagcgggggaggggcggccgaatgaccagcaccggcacgcacgaggaacgatc

SEQ ID NO: 217237 - DNA, 4539 bp, Zea Mays
attcttgcccatccaaatttatacaggactttgccaaacgcccaaacagactcgactgtgttcatcggttcattcctgcgttctcttctcgagttcacgagtgctccctctctctctctcgttacgatgattgggtgaccgccgccgccgccgttgccccacgccaggtgcccaggtcttcgtcaggccctttgccgccgacgagcatcaaccctagttctgggtttttgctctgaagaacaaaatggacaatgctcagagtgacaaccgaactgataccaagcaagatgatgatgcgcgccaaagcaaacaggatgatgaggaggcccgccttgaagaatataaaaagatcattgatcaaaagatttccctccgccggagcaaccaaaaccctgaaaggcctgatgcaaactacctgagaaccctggactctagtattaagcgcaatacaaccgttataaagaagttgaagacaataaatgatgaacagaaggatgtgataatggatgagttaaaaagtgtgaatttgagtaaatttgtcagcgaagcagtttcttacatttgtgaggccaaacttcgctccgctgatatacaagctgctgttcaggtttgctcgctccttcatcaaagatacaaggacttctctccttgtcttatagaaggtctactgaagatcttctttcctggaaaatctggagatgatttggatgcagataaaaattcgagagccatgaagaagagaagcacattgaaacttttgattgaactatattttgttggaattgtcgaagatgctagcatatttgtaaatattataaaagatcttacatcagcagaacatttgaaggaccgtgaaggaactcaaacaaacctatctcttctatctacctttgctcgtcaagggaagttttttgtagggctacaacctcatggtcaagaagcttatgacgagttctttaaggacctaaatgttactgctgagcagaagaagttctttaagaaagccttgaactcttactatgatgctgtagctgaactactacaatcagaacatgcgtctcttcgtctaatggaggcggagaatgcaaaagttttaagtgccaaaggtgaactaagtgatgagaacacatcctcatatgagaaactcaggaagtcttttgatcagttactacgtggtgtttcctcgttggctgaatctcttgacatgcaacctccagtgatgccagatgatggaaatacaacaagagttactacaggaaccgatgcgttgccttcttctggaaaagaatcatctgcattggaacctatctgggatgatgaagataccaaagctttttatgaatctttacctgatctcagagcatttgtgccagctgtattactgggagaggttgaaccaaaatcaaatgagcaacatgttaagggccgtgagctatctggtgagtccacttcagaacaagagactgaactacatgacaatgttccaacttctgccactgaacgtcaactagaagttaaagtagatgatctagtgaaagagagtgaagacagagataaagagaaggggaaggatggagaaaaggaaaaatccaaggagaaggatctggataagaaaaatgaaagagagaaggagaaaggaagagtcttggatggcgcaagtctggataacctcctgcagaggctgccaggatgtgtcagtcgtgatctcattgatcaattgacggttgagttttgctacctaaattctaaagcaaatcgaaagaaacttgtgcgtgccttattcaatgttaataggacttcactggaactgttgccatactattctcgtttggttgcaacactctcaacctgtatgaaagatgttccaagtatgcttctgtctatgcttgaagaggagttcaactttttaataaataagaaggaccagatcaacatagaaacaaaaataaaaaatatacggtttatcggggagttgtgcaagttcaaaatggctcctccagctcttgtttttagctgtttgaaggcctgccttgatgatttcagtcatcataatattgatgtggcttgcaaccttcttgagacttgtggtcgttttttgtatcgctcacctgaaactaccattcgcatggctaacatgctggagatactgatgagattgaaaaatgtcaagaatttggattcacgccacagtacacttgtagaaaacgcctactacctttgtaaaccgcccgaaagatctgcgcggatatcgaaagttcggccaccgttgcatcaatacataagaaagttgcttttctcagatcttgacaaatcaagtgttgaacatgttttgcgccaactacgcaaattaccttgggcagagtgtcaacaataccttctgaagtgctttctaaaggttcacaaaggaaagtacagccaagttcatctgattgctcttctcactgctagtctcagccgctatcacgatgactttgctgtctcagtggtagatgaggttttagaagagataagggttggattggagttgaatgactatgggatgcaacaaaggaggcttgcccacatgcggttccttggagagctatacagctacaagcatatagattcatcagttgtttttgatacactgtaccttatcattgtgtttggtcatggaactccggaacaagatgtgctggatccaccagaagattgtttcagaatcaggttgatcattacacttctacagacctgtggtcactatttcagtaaggggtcttcaaaaaggaagctcgacaaattcttgctacactttcaaagatacattattagtaaagggcccttaccactcgacatagagtttgacattcaggatttatttggtgagctacgaccaaccatgtctaggtattcgtcaattgaggaacttgttgccgcgttagttgagtttgaagaaaatgaacgttcagccccagtagaaaaggttgaaaatgaaagacactccgacaatgaatctcagaaaagacactcgcgagatgctggtccatctgtgaatggtgaaagcgctgcaaatggaaccgaggaaaatggcaaggctcatgaagtagcagatagtgagagctattcagatactggcagcattgatggacgggaagaagaggaggatatattatctgaggataaatcaaatgatggctcagataacgaaggcgacgatgaagatgatggcattcctgttgtttctgatgaagatgaaaatgttgaggttagacagaaagtcatgaatgttgatcctaaggagcaagaagacttcgatcgagagctcaaagcccttcttcaggagagcttggagtctcgtaaatcagaggcccgttcaaggctccctttgaatatgatggtgccgatgaacgtcctcgagggttcaaaagactcaagggccacagaatctgagagtggagaagaaacagtagacgaagagggtgggaatgctgggggtagcagcaaggtgcgtgtgaaggtgctaatgaagaaaggacacaagcaacagacaagacaaatgttaattccggccgatagttcaattgtgcaaagcacgaagcagcaggaagctgctgagcttgaggagaagcagagcatcaagcggaggatccttgagtacaatgagagggaggaagaattgaatggagcatcccaaatggggaactggggccaaggagctaccagtaccagcagtatcagatcaggtggccggggcagctgggatggttcagcacggggaggtggtcgacaacggcaccacataacgggttctggtggtttctaccacagttatggcaggagaagataagttcgcctgtgtgagctatttcgccctgagccttttggcaggtagaaagcatcctagtctgacaaattgcctctagcaaatgagattagcgtttaacacagcttgatggacaattgcctctagcaccctagtctgaaaataagacaattctaccactggtcatgggagatagcaatgccttgagaaggagctgcaaatctgatggtcctaatggcttgagttgctacggtgtttggtaaagctggttgtgatggctgtacccggatacatgcgcatactgtttcgacgccatgtagggggtatctggtcaaagttcgctgtctgatgcctgttctaatttagtggagtattactggcaatgtggtacaagcatcttgtcttgaaaatcgaaaactgcacggtatgtgtgcgccattttttgtctgatgaggtgtgttccatgcgtgtatttcatatgtagctacaccaatcgcgtgtccaccgaacgatgctaacttgctatgccgatggagcatgctttctacccgcatcgcaacccgcaaatccttgtccagtcgtttgtcttccatccaggaatgataccgagttctcatgtcacgcttgacgcttctttccgtcctgctaaagaaaaatgattgctcgtcctgtgcccgtgcgaaggagcgggggaggggcggccgaatgaccagcaccggcacgcacgaggaacgatc

SEQ ID NO: 217238 - DNA, 4480 bp, Zea Mays
gagggcttcaggcttctgcttcaccgtgctcctcccagcccagcgccgacgccgagctccccttccttgaaccgccggccgtgccaacccgcgactcgctggagtaggcggtacgattaattcgaccagacgcggccgcggatcctaaacgatactaaggttattttggctgtgcatatcacgttgtagagttctgggtttttgctctgaagaacaaaatggacaatgctcagagtgacaaccgaactgataccaagcaagatgatgatgcgcgccaaagcaaacaggatgatgaggaggcccgccttgaagaatataaaaagatcattgatcaaaagatttccctccgccggagcaaccaaaaccctgaaaggcctgatgcaaactacctgagaaccctggactctagtattaagcgcaatacaaccgttataaagaagttgaagacaataaatgatgaacagaaggatgtgataatggatgagttaaaaagtgtgaatttgagtaaatttgtcagcgaagcagtttcttacatttgtgaggccaaacttcgctccgctgatatacaagctgctgttcaggtttgctcgctccttcatcaaagatacaaggacttctctccttgtcttatagaaggtctactgaagatcttctttcctggaaaatctggagatgatttggatgcagataaaaattcgagagccatgaagaagagaagcacattgaaacttttgattgaactatattttgttggaattgtcgaagatgctagcatatttgtaaatattataaaagatcttacatcagcagaacatttgaaggaccgtgaaggaactcaaacaaacctatctcttctatctacctttgctcgtcaagggaagttttttgtagggctacaacctcatggtcaagaagcttatgacgagaagaagttctttaagaaagccttgaactcttactatgatgctgtagctgaactactacaatcagaacatgcgtctcttcgtctaatggaggcggagaatgcaaaagttttaagtgccaaaggtgaactaagtgatgagaacacatcctcatatgagaaactcaggaagtcttttgatcagttactacgtggtgtttcctcgttggctgaatctcttgacatgcaacctccagtgatgccagatgatggaaatacaacaagagttactacaggaaccgatgcgttgccttcttctggaaaagaatcatctgcattggaacctatctgggatgatgaagataccaaagctttttatgaatctttacctgatctcagagcatttgtgccagctgtattactgggagaggttgaaccaaaatcaaatgagcaacatgttaagggccgtgagctatctggtgagtccacttcagaacaagagactgaactacatgacaatgttccaacttctgccactgaacgtcaactagaagttaaagtagatgatctagtgaaagagagtgaagacagagataaagagaaggggaaggatggagaaaaggaaaaatccaaggagaaggatctggataagaaaaatgaaagagagaaggagaaaggaagagtcttggatggcgcaagtctggataacctcctgcagaggctgccaggatgtgtcagtcgtgatctcattgatcaattgacggttgagttttgctacctaaattctaaagcaaatcgaaagaaacttgtgcgtgccttattcaatgttaataggacttcactggaactgttgccatactattctcgtttggttgcaacactctcaacctgtatgaaagatgttccaagtatgcttctgtctatgcttgaagaggagttcaactttttaataaataagaaggaccagatcaacatagaaacaaaaataaaaaatatacggtttatcggggagttgtgcaagttcaaaatggctcctccagctcttgtttttagctgtttgaaggcctgccttgatgatttcagtcatcataatattgatgtggcttgcaaccttcttgagacttgtggtcgttttttgtatcgctcacctgaaactaccattcgcatggctaacatgctggagatactgatgagattgaaaaatgtcaagaatttggattcacgccacagtacacttgtagaaaacgcctactacctttgtaaaccgcccgaaagatctgcgcggatatcgaaagttcggccaccgttgcatcaatacataagaaagttgcttttctcagatcttgacaaatcaagtgttgaacatgttttgcgccaactacgcaaattaccttgggcagagtgtcaacaataccttctgaagtgctttctaaaggttcacaaaggaaagtacagccaagttcatctgattgctcttctcactgctagtctcagccgctatcacgatgactttgctgtctcagtggtagatgaggttttagaagagataagggttggattggagttgaatgactatgggatgcaacaaaggaggcttgcccacatgcggttccttggagagctatacagctacaagcatatagattcatcagttgtttttgatacactgtaccttatcattgtgtttggtcatggaactccggaacaagatgtgctggatccaccagaagattgtttcagaatcaggttgatcattacacttctacagacctgtggtcactatttcagtaaggggtcttcaaaaaggaagctcgacaaattcttgctacactttcaaagatacattattagtaaagggcccttaccactcgacatagagtttgacattcaggatttatttggtgagctacgaccaaccatgtctaggtattcgtcaattgaggaacttgttgccgcgttagttgagtttgaagaaaatgaacgttcagccccagtagaaaaggttgaaaatgaaagacactccgacaatgaatctcagaaaagacactcgcgagatgctggtccatctgtgaatggtgaaagcgctgcaaatggaaccgaggaaaatggcaaggctcatgaagtagcagatagtgagagctattcagatactggcagcattgatggacgggaagaagaggaggatatattatctgaggataaatcaaatgatggctcagataacgaaggcgacgatgaagatgatggcattcctgttgtttctgatgaagatgaaaatgttgaggttagacagaaagtcatgaatgttgatcctaaggagcaagaagacttcgatcgagagctcaaagcccttcttcaggagagcttggagtctcgtaaatcagaggcccgttcaaggctccctttgaatatgatggtgccgatgaacgtcctcgagggttcaaaagactcaagggccacagaatctgagagtggagaagaaacagtagacgaagagggtgggaatgctgggggtagcagcaaggtgcgtgtgaaggtgctaatgaagaaaggacacaagcaacagacaagacaaatgttaattccggccgatagttcaattgtgcaaagcacgaagcagcaggaagctgctgagcttgaggagaagcagagcatcaagcggaggatccttgagtacaatgagagggaggaagaattgaatggagcatcccaaatggggaactggggccaaggagctaccagtaccagcagtatcagatcaggtggccggggcagctgggatggttcagcacggggaggtggtcgacaacggcaccacataacgggttctggtggtttctaccacagttatggcaggagaagataagttcgcctgtgtgagctatttcgccctgagccttttggcaggtagaaagcatcctagtctgacaaattgcctctagcaaatgagattagcgtttaacacagcttgatggacaattgcctctagcaccctagtctgaaaataagacaattctaccactggtcatgggagatagcaatgccttgagaaggagctgcaaatctgatggtcctaatggcttgagttgctacggtgtttggtaaagctggttgtgatggctgtacccggatacatgcgcatactgtttcgacgccatgtagggggtatctggtcaaagttcgctgtctgatgcctgttctaatttagtggagtattactggcaatgtggtacaagcatcttgtcttgaaaatcgaaaactgcacggtatgtgtgcgccattttttgtctgatgaggtgtgttccatgcgtgtatttcatatgtagctacaccaatcgcgtgtccaccgaacgatgctaacttgctatgccgatggagcatgctttctacccgcatcgcaacccgcaaatccttgtccagtcgtttgtcttccatccaggaatgataccgagttctcatgtcacgcttgacgcttctttccgtcctgctaaagaaaaatgattgctcgtcctgtgcccgtgcgaaggagcgggggaggggcggccgaatgaccagcaccggcacgcacgaggaacgatc

SEQ ID NO: 217239 - DNA, 2263 bp, Zea Mays
caaactgcgttgtcgagagggcttcaggcttctgcttcaccgtgctcctcccagcccagcgccgacgccgagctccccttccttgaaccgccggccgtgccaacccgcgactcgctggagtaggcggtacgattaattcgaccagacgcggccgcggatcctaaacgagttctgggtttttgctctgaagaacaaaatggacaatgctcagagtgacaaccgaactgataccaagcaagatgatgatgcgcgccaaagcaaacaggatgatgaggaggcttgcccacatgcggttccttggagagctatacagctacaagcatatagattcatcagttgtttttgatacactgtaccttatcattgtgtttggtcatggaactccggaacaagatgtgctggatccaccagaagattgtttcagaatcaggttgatcattacacttctacagacctgtggtcactatttcagtaaggggtcttcaaaaaggaagctcgacaaattcttgctacactttcaaagatacattattagtaaagggcccttaccactcgacatagagtttgacattcaggatttatttggtgagctacgaccaaccatgtctaggtattcgtcaattgaggaacttgttgccgcgttagttgagtttgaagaaaatgaacgttcagccccagtagaaaaggttgaaaatgaaagacactccgacaatgaatctcagaaaagacactcgcgagatgctggtccatctgtgaatggtgaaagcgctgcaaatggaaccgaggaaaatggcaaggctcatgaagtagcagatagtgagagctattcagatactggcagcattgatggacgggaagaagaggaggatatattatctgaggataaatcaaatgatggctcagataacgaaggcgacgatgaagatgatggcattcctgttgtttctgatgaagatgaaaatgttgaggttagacagaaagtcatgaatgttgatcctaaggagcaagaagacttcgatcgagagctcaaagcccttcttcaggagagcttggagtctcgtaaatcagaggcccgttcaaggctccctttgaatatgatggtgccgatgaacgtcctcgagggttcaaaagactcaagggccacagaatctgagagtggagaagaaacagtagacgaagagggtgggaatgctgggggtagcagcaaggtgcgtgtgaaggtgctaatgaagaaaggacacaagcaacagacaagacaaatgttaattccggccgatagttcaattgtgcaaagcacgaagcagcaggaagctgctgagcttgaggagaagcagagcatcaagcggaggatccttgagtacaatgagagggaggaagaattgaatggagcatcccaaatggggaactggggccaaggagctaccagtaccagcagtatcagatcaggtggccggggcagctgggatggttcagcacggggaggtggtcgacaacggcaccacataacgggttctggtggtttctaccacagttatggcaggagaagataagttcgcctgtgtgagctatttcgccctgagccttttggcaggtagaaagcatcctagtctgacaaattgcctctagcaaatgagattagcgtttaacacagcttgatggacaattgcctctagcaccctagtctgaaaataagacaattctaccactggtcatgggagatagcaatgccttgagaaggagctgcaaatctgatggtcctaatggcttgagttgctacggtgtttggtaaagctggttgtgatggctgtacccggatacatgcgcatactgtttcgacgccatgtagggggtatctggtcaaagttcgctgtctgatgcctgttctaatttagtggagtattactggcaatgtggtacaagcatcttgtcttgaaaatcgaaaactgcacggtatgtgtgcgccattttttgtctgatgaggtgtgttccatgcgtgtatttcatatgtagctacaccaatcgcgtgtccaccgaacgatgctaacttgctatgccgatggagcatgctttctacccgcatcgcaacccgcaaatccttgtccagtcgtttgtcttccatccaggaatgataccgagttctcatgtcacgcttgacgcttctttccgtcctgctaaagaaaaatgattgctcgtcctgtgcccgtgcgaaggagcgggggaggggcggccgaatgaccagcaccggcacgcacgaggaacgatc

SEQ ID NO: 217240 - DNA, 4531 bp, Zea Mays
agcaaactgcgttgtcgagagggcttcaggcttctgcttcaccgtgctcctcccagcccagcgccgacgccgagctccccttccttgaaccgccggccgtgccaacccgcgactcgctggagtaggcggtacgattaattcgaccagacgcggccgcggatcctaaacgatactaaggttattttggctgtgcatatcacgttgtagagttctgggtttttgctctgaagaacaaaatggacaatgctcagagtgacaaccgaactgataccaagcaagatgatgatgcgcgccaaagcaaacaggatgatgaggaggcccgccttgaagaatataaaaagatcattgatcaaaagatttccctccgccggagcaaccaaaaccctgaaaggcctgatgcaaactacctgagaaccctggactctagtattaagcgcaatacaaccgttataaagaagttgaagacaataaatgatgaacagaaggatgtgataatggatgagttaaaaagtgtgaatttgagtaaatttgtcagcgaagcagtttcttacatttgtgaggccaaacttcgctccgctgatatacaagctgctgttcaggtttgctcgctccttcatcaaagatacaaggacttctctccttgtcttatagaaggtctactgaagatcttctttcctggaaaatctggagatgatttggatgcagataaaaattcgagagccatgaagaagagaagcacattgaaacttttgattgaactatattttgttggaattgtcgaagatgctagcatatttgtaaatattataaaagatcttacatcagcagaacatttgaaggaccgtgaaggaactcaaacaaacctatctcttctatctacctttgctcgtcaagggaagttttttgtagggctacaacctcatggtcaagaagcttatgacgagttctttaaggacctaaatgttactgctgagcagaagaagttctttaagaaagccttgaactcttactatgatgctgtagctgaactactacaatcagaacatgcgtctcttcgtctaatggaggcggagaatgcaaaagttttaagtgccaaaggtgaactaagtgatgagaacacatcctcatatgagaaactcaggaagtcttttgatcagttactacgtggtgtttcctcgttggctgaatctcttgacatgcaacctccagtgatgccagatgatggaaatacaacaagagttactacaggaaccgatgcgttgccttcttctggaaaagaatcatctgcattggaacctatctgggatgatgaagataccaaagctttttatgaatctttacctgatctcagagcatttgtgccagctgtattactgggagaggttgaaccaaaatcaaatgagcaacatgttaagggccgtgagctatctggtgagtccacttcagaacaagagactgaactacatgacaatgttccaacttctgccactgaacgtcaactagaagttaaagtagatgatctagtgaaagagagtgaagacagagataaagagaaggggaaggatggagaaaaggaaaaatccaaggagaaggatctggataagaaaaatgaaagagagaaggagaaaggaagagtcttggatggcgcaagtctggataacctcctgcagaggctgccaggatgtgtcagtcgtgatctcattgatcaattgacggttgagttttgctacctaaattctaaagcaaatcgaaagaaacttgtgcgtgccttattcaatgttaataggacttcactggaactgttgccatactattctcgtttggttgcaacactctcaacctgtatgaaagatgttccaagtatgcttctgtctatgcttgaagaggagttcaactttttaataaataagaaggaccagatcaacatagaaacaaaaataaaaaatatacggtttatcggggagttgtgcaagttcaaaatggctcctccagctcttgtttttagctgtttgaaggcctgccttgatgatttcagtcatcataatattgatgtggcttgcaaccttcttgagacttgtggtcgttttttgtatcgctcacctgaaactaccattcgcatggctaacatgctggagatactgatgagattgaaaaatgtcaagaatttggattcacgccacagtacacttgtagaaaacgcctactacctttgtaaaccgcccgaaagatctgcgcggatatcgaaagttcggccaccgttgcatcaatacataagaaagttgcttttctcagatcttgacaaatcaagtgttgaacatgttttgcgccaactacgcaaattaccttgggcagagtgtcaacaataccttctgaagtgctttctaaaggttcacaaaggaaagtacagccaagttcatctgattgctcttctcactgctagtctcagccgctatcacgatgactttgctgtctcagtggtagatgaggttttagaagagataagggttggattggagttgaatgactatgggatgcaacaaaggaggcttgcccacatgcggttccttggagagctatacagctacaagcatatagattcatcagttgtttttgatacactgtaccttatcattgtgtttggtcatggaactccggaacaagatgtgctggatccaccagaagattgtttcagaatcaggttgatcattacacttctacagacctgtggtcactatttcagtaaggggtcttcaaaaaggaagctcgacaaattcttgctacactttcaaagatacattattagtaaagggcccttaccactcgacatagagtttgacattcaggatttatttggtgagctacgaccaaccatgtctaggtattcgtcaattgaggaacttgttgccgcgttagttgagtttgaagaaaatgaacgttcagccccagtagaaaaggttgaaaatgaaagacactccgacaatgaatctcagaaaagacactcgcgagatgctggtccatctgtgaatggtgaaagcgctgcaaatggaaccgaggaaaatggcaaggctcatgaagtagcagatagtgagagctattcagatactggcagcattgatggacgggaagaagaggaggatatattatctgaggataaatcaaatgatggctcagataacgaaggcgacgatgaagatgatggcattcctgttgtttctgatgaagatgaaaatgttgaggttagacagaaagtcatgaatgttgatcctaaggagcaagaagacttcgatcgagagctcaaagcccttcttcaggagagcttggagtctcgtaaatcagaggcccgttcaaggctccctttgaatatgatggtgccgatgaacgtcctcgagggttcaaaagactcaagggccacagaatctgagagtggagaagaaacagtagacgaagagggtgggaatgctgggggtagcagcaaggtgcgtgtgaaggtgctaatgaagaaaggacacaagcaacagacaagacaaatgttaattccggccgatagttcaattgtgcaaagcacgaagcagcaggaagctgctgagcttgaggagaagcagagcatcaagcggaggatccttgagtacaatgagagggaggaagaattgaatggagcatcccaaatggggaactggggccaaggagctaccagtaccagcagtatcagatcaggtggccggggcagctgggatggttcagcacggggaggtggtcgacaacggcaccacataacgggttctggtggtttctaccacagttatggcaggagaagataagttcgcctgtgtgagctatttcgccctgagccttttggcaggtagaaagcatcctagtctgacaaattgcctctagcaaatgagattagcgtttaacacagcttgatggacaattgcctctagcaccctagtctgaaaataagacaattctaccactggtcatgggagatagcaatgccttgagaaggagctgcaaatctgatggtcctaatggcttgagttgctacggtgtttggtaaagctggttgtgatggctgtacccggatacatgcgcatactgtttcgacgccatgtagggggtatctggtcaaagttcgctgtctgatgcctgttctaatttagtggagtattactggcaatgtggtacaagcatcttgtcttgaaaatcgaaaactgcacggtatgtgtgcgccattttttgtctgatgaggtgtgttccatgcgtgtatttcatatgtagctacaccaatcgcgtgtccaccgaacgatgctaacttgctatgccgatggagcatgctttctacccgcatcgcaacccgcaaatccttgtccagtcgtttgtcttccatccaggaatgataccgagttctcatgtcacgcttgacgcttctttccgtcctgctaaagaaaaatgattgctcgtcctgtgcccgtgcgaaggagcgggggaggggcggccgaatgaccagcaccggcacgcacgaggaacgatc

SEQ ID NO: 217241 - DNA, 4514 bp, Zea Mays
aaggcttcggaattccatgttagcaaactgcgttgtcgagagggcttcaggcttctgcttcaccgtgctcctcccagcccagcgccgacgccgagctccccttccttgaaccgccggccgtgccaacccgcgactcgctggagtaggcggtacgattaattcgaccagacgcggccgcggatcctaaacgagttctgggtttttgctctgaagaacaaaatggacaatgctcagagtgacaaccgaactgataccaagcaagatgatgatgcgcgccaaagcaaacaggatgatgaggaggcccgccttgaagaatataaaaagatcattgatcaaaagatttccctccgccggagcaaccaaaaccctgaaaggcctgatgcaaactacctgagaaccctggactctagtattaagcgcaatacaaccgttataaagaagttgaagacaataaatgatgaacagaaggatgtgataatggatgagttaaaaagtgtgaatttgagtaaatttgtcagcgaagcagtttcttacatttgtgaggccaaacttcgctccgctgatatacaagctgctgttcaggtttgctcgctccttcatcaaagatacaaggacttctctccttgtcttatagaaggtctactgaagatcttctttcctggaaaatctggagatgatttggatgcagataaaaattcgagagccatgaagaagagaagcacattgaaacttttgattgaactatattttgttggaattgtcgaagatgctagcatatttgtaaatattataaaagatcttacatcagcagaacatttgaaggaccgtgaaggaactcaaacaaacctatctcttctatctacctttgctcgtcaagggaagttttttgtagggctacaacctcatggtcaagaagcttatgacgagttctttaaggacctaaatgttactgctgagcagaagaagttctttaagaaagccttgaactcttactatgatgctgtagctgaactactacaatcagaacatgcgtctcttcgtctaatggaggcggagaatgcaaaagttttaagtgccaaaggtgaactaagtgatgagaacacatcctcatatgagaaactcaggaagtcttttgatcagttactacgtggtgtttcctcgttggctgaatctcttgacatgcaacctccagtgatgccagatgatggaaatacaacaagagttactacaggaaccgatgcgttgccttcttctggaaaagaatcatctgcattggaacctatctgggatgatgaagataccaaagctttttatgaatctttacctgatctcagagcatttgtgccagctgtattactgggagaggttgaaccaaaatcaaatgagcaacatgttaagggccgtgagctatctggtgagtccacttcagaacaagagactgaactacatgacaatgttccaacttctgccactgaacgtcaactagaagttaaagtagatgatctagtgaaagagagtgaagacagagataaagagaaggggaaggatggagaaaaggaaaaatccaaggagaaggatctggataagaaaaatgaaagagagaaggagaaaggaagagtcttggatggcgcaagtctggataacctcctgcagaggctgccaggatgtgtcagtcgtgatctcattgatcaattgacggttgagttttgctacctaaattctaaagcaaatcgaaagaaacttgtgcgtgccttattcaatgttaataggacttcactggaactgttgccatactattctcgtttggttgcaacactctcaacctgtatgaaagatgttccaagtatgcttctgtctatgcttgaagaggagttcaactttttaataaataagaaggaccagatcaacatagaaacaaaaataaaaaatatacggtttatcggggagttgtgcaagttcaaaatggctcctccagctcttgtttttagctgtttgaaggcctgccttgatgatttcagtcatcataatattgatgtggcttgcaaccttcttgagacttgtggtcgttttttgtatcgctcacctgaaactaccattcgcatggctaacatgctggagatactgatgagattgaaaaatgtcaagaatttggattcacgccacagtacacttgtagaaaacgcctactacctttgtaaaccgcccgaaagatctgcgcggatatcgaaagttcggccaccgttgcatcaatacataagaaagttgcttttctcagatcttgacaaatcaagtgttgaacatgttttgcgccaactacgcaaattaccttgggcagagtgtcaacaataccttctgaagtgctttctaaaggttcacaaaggaaagtacagccaagttcatctgattgctcttctcactgctagtctcagccgctatcacgatgactttgctgtctcagtggtagatgaggttttagaagagataagggttggattggagttgaatgactatgggatgcaacaaaggaggcttgcccacatgcggttccttggagagctatacagctacaagcatatagattcatcagttgtttttgatacactgtaccttatcattgtgtttggtcatggaactccggaacaagatgtgctggatccaccagaagattgtttcagaatcaggttgatcattacacttctacagacctgtggtcactatttcagtaaggggtcttcaaaaaggaagctcgacaaattcttgctacactttcaaagatacattattagtaaagggcccttaccactcgacatagagtttgacattcaggatttatttggtgagctacgaccaaccatgtctaggtattcgtcaattgaggaacttgttgccgcgttagttgagtttgaagaaaatgaacgttcagccccagtagaaaaggttgaaaatgaaagacactccgacaatgaatctcagaaaagacactcgcgagatgctggtccatctgtgaatggtgaaagcgctgcaaatggaaccgaggaaaatggcaaggctcatgaagtagcagatagtgagagctattcagatactggcagcattgatggacgggaagaagaggaggatatattatctgaggataaatcaaatgatggctcagataacgaaggcgacgatgaagatgatggcattcctgttgtttctgatgaagatgaaaatgttgaggttagacagaaagtcatgaatgttgatcctaaggagcaagaagacttcgatcgagagctcaaagcccttcttcaggagagcttggagtctcgtaaatcagaggcccgttcaaggctccctttgaatatgatggtgccgatgaacgtcctcgagggttcaaaagactcaagggccacagaatctgagagtggagaagaaacagtagacgaagagggtgggaatgctgggggtagcagcaaggtgcgtgtgaaggtgctaatgaagaaaggacacaagcaacagacaagacaaatgttaattccggccgatagttcaattgtgcaaagcacgaagcagcaggaagctgctgagcttgaggagaagcagagcatcaagcggaggatccttgagtacaatgagagggaggaagaattgaatggagcatcccaaatggggaactggggccaaggagctaccagtaccagcagtatcagatcaggtggccggggcagctgggatggttcagcacggggaggtggtcgacaacggcaccacataacgggttctggtggtttctaccacagttatggcaggagaagataagttcgcctgtgtgagctatttcgccctgagccttttggcaggtagaaagcatcctagtctgacaaattgcctctagcaaatgagattagcgtttaacacagcttgatggacaattgcctctagcaccctagtctgaaaataagacaattctaccactggtcatgggagatagcaatgccttgagaaggagctgcaaatctgatggtcctaatggcttgagttgctacggtgtttggtaaagctggttgtgatggctgtacccggatacatgcgcatactgtttcgacgccatgtagggggtatctggtcaaagttcgctgtctgatgcctgttctaatttagtggagtattactggcaatgtggtacaagcatcttgtcttgaaaatcgaaaactgcacggtatgtgtgcgccattttttgtctgatgaggtgtgttccatgcgtgtatttcatatgtagctacaccaatcgcgtgtccaccgaacgatgctaacttgctatgccgatggagcatgctttctacccgcatcgcaacccgcaaatccttgtccagtcgtttgtcttccatccaggaatgataccgagttctcatgtcacgcttgacgcttctttccgtcctgctaaagaaaaatgattgctcgtcctgtgcccgtgcgaaggagcgggggaggggcggccgaatgaccagcaccggcacgcacgaggaacgatc

SEQ ID NO: 217242 - DNA, 2912 bp, Zea Mays
tccctctcgctttctccagctcctgttcggtatcccgtttctcgcttggaggctgccctgcagcggccagcagccatggcgactcgcgccggacgactgcccaccactccggcgcccgctcttctgctcctcctcgccttcccgtttctgctgcagggagttcttccgtcgcgagccggggacaccgtcgccgccggccgcccgctgtccggcggacagagcctcgtgtccaagcgtggcaagttcaggctcggattcttccgcccagacaactcgagccagcgctggtacctgggcatctggtacaaccagctctcggtgcacaccacggtgtgggtggcgaaccgggggacgcccatctccgacccggagtcctcgcagctatctatctccaaggacggcaacatggtcgtcctcgaccacagcaggtcgtctaccgccgtctggtccaccaacgtcaccaccggcgtctcctccacgtccacggtcggcgtcatccgcgacaacggcaacctcgtcctggcggacgcgtccaacacttccgcggtgctgtggcagagcttcgaccactcgggcgacacgtggctccccggcgggaagctgggccggaacaagcgcacgggcgaggtcacgcgcctcgtggcgtggaaggggcgcgacgacccgacgccgagcctgttcgcgctggagctggacccgcgcggctccagccagtacctgctcaactggaacgacagcgagcggtactggaccagcggcaactggacggggacggcgttcgctgccgtgccggagatgacgtccaccggcgcgtcgcccgtgtccgactacaccttcggctacgtcgacggcgccaacgagagctacttcacctacgacgtcgcggacgagtcggtggtgacgcggttccaggtggacgtgacggggcagatccagttcctcacgtgggtggcggccgccgcccagtgggtgctcttctggtcggagcccaagcggcagtgcgacgtgtacgcggtgtgcgggcccttcggcctgtgcaccgagaacgcgctgccgtcctgcacctgcccccgggggttccgggagcgcgacctggccgagtggatgcaggacgaccacaccgcgggatgcgccaggaacaccgcactccagccttgcggcgccggcgccgccgctcgagacgggcagaagcgccgcagggacgacgataggttctacacgatgcccgacgtgaggctgccgagcgacgcgcggagcgcggcggccgcgagcgctcacgactgcgagctcgcgtgcctccgcaactgctcttgcaccgcttactcctacagcggcggctgctcgctgtggtatggggacctcatcaaccttcaggacacgacgagcgctggcagtggcaccggaggcggcagcatctcgatccgcctcgctgcctccgagttctctagcaacgggaacaccaagaaactggtcatcgggctcgtcgtcgcgggctcctccttcgtcgccgcagtcaccgccatcgttctggctaccgtcctcgttctaaggaaccgaaggatcaagtcgttgaggacggtccaaggatccctggtggcgttcacgtaccgcgacctgcagctggtgaccaacaacttctcggagaagctcggcggcggcgccttcgggtccgtgttcaaaggggtgctgcctgacgcaacgctcgtggcggtcaagaagctggaaggcgttcggcagggggagaaacagttccgcgccgaggtgagcacgatcggcacgatccagcacgtgaacctgatcaggctgctcgggttctgctccgaggggtcgaggcggctcctcgtctacgagcacatgccaagcggctctctggacaggcatctgttcgatcgggaccagcagccgggtgtcctgagctgggacgccaggtaccagatcgctctcggggtcgcgagggggctggactacctgcacgagaaatgcagggactgcatcatccactgtgacatcaagcccgagaacatcctcctggacgacgcgttcgtccccagagtcgccgacttcgggctcgccaagctcatgggtcgcgacttcagccgcgtgctcaccaccatgcggggcacggtggggtacctggcgcccgagtggatcgccggcacggccgtcaccaccaaggcggacgtgttcagctacggcatgatgctgttcgagatcatctcgggccggaggaatgtcggccagcgggcggacggcacggtggacttcttcccgtccacggccgtcaaccggctcctcgacggcgacgtgaggagcgcggtggacagccagctcggcggcaacgcggacgtggccgaggtggagcgggcctgcaaggtggcgtgctggtgcgtgcaggacgcggagagcttgcgcccgagtatggggatggtggtgcaggttctggaggggctggtcgacgtcaatgccccgcccgtcccgaggtcgctcatggtgctcgccgatccgtccaagtacgccgttgagttcttctcaggtttgccgtcgacctgagattgggccgctgcctctgcctgttaggggcatcaactttgatcagtagtgcatggtgtatatacgagctaatgagttcgtcaagaacttactcgtgccacgaaccctgtggcggtatagaacttctgcacgtagccaagaagatttcggatctgttagggcttgttcggttacctctcaatccatgtggattgagagtgggattagatggttttaatcccaaacaagtcaaacttcttctcaattttttccaatctcatccaatccatgtgtattaggaataaccgaacaagcccttaaggtgccaaaaaacgtcacatatttcttgccacacgtgcatgaggttatatgctttggagaat

SEQ ID NO: 217243 - DNA, 2129 bp, Zea Mays
cttcgcacaccggccgatgaccttgcgttatcccatcatggctgagacaaatgatgccagcccttcgtcgaaactccatacaagattgagactctgggagtttcctgactgttatgtatttgaaccaattgatggccttgctgacttgtacctatcagttagccggaccagcggaacaatgaatctagttcaagacttgccatcacgtggatccactacaaaacataaagttcaaacagtatatggtgtgataggagtactcaaacttgcagttggatcatattttgtggtgatcacggatcgtgattgtgtgggatcctactttggacacgcaatttttaaagtgacaggactaaaaattcttccctgcaataatgcacataacaccacctctactgatcagaaaaaaatggaaacaaaattctcggagctcctggattctgcagagaggactattggccttcacttttcctatgatatcaacctaacactttctgcacagaggctacatgatctcggcgatgaatatagagctcttcctctttggagacaggcagaaccaagatttctatggaatggctacttgttagaacctctaattgagaacaagctgaaccagtacttattgccagtaattcaaggcagttttcaaaatatccaagcagaagttggatcagagatggtaaatgtgaccctgattgcacgtaggtgcacacgaaggataggtactcgaatgtggagacgaggagctgatgcagagggttatgctgcaaacttcgttgaatcggagcagataatgcagtcaaaagggtttacagcatcctatgtacaagtccgaggttctatgccattcttgtgggagcagattgttgatttgacatacaaacctagttttgacattgttagacaagaggaagcgcctcgtgtacttgagaggcacttccatgatttgcaaaagaaatatggagctgtcttagccgttgatcttgtcaatacaggtggcggtgagggccgcctccgtgaaagatatgcaaaatctattgaacctattcttagtgaagatctaagatatgtgcacttcgacttccaccgaatttgtggccatattcactttgagcgtctgtctcagctgtatgatcagatcaaggactaccttcagaaacataagtacttccttataaatgataaaggagagaaaattgaggagcagactggcactacaagaacaaattgtatagattgtttggatcgcaccaatgtaactcagagcatgattggtcgaaaaattctggaaagccaacttcaacgtataggagttcttggtgctggtgatacaataagcaaacatccaacctttgatacaaactacaaaattttgtgggccaatcatggagatgcaataagcattcagtactctggaactcctgctctgaagggagattttgttcggtatgggaagcgaactactcaaggaattctgaatgatttgaggaatgcacttggtagatactacctgaataacttcgttgatgggactaagcaggatgccatggatcttcttcaaggacattacatgacatctgttagtagagatatggcagtgccaagcaaagcaggacttctgcagagttatgcgtccttccgccttgcttttgcattggttatgggagctctaatgttcatgttgatgtcactgagacagggcagcaaacatttgctctctgtttttctatccaacataatttacggtttaaataaagtaactatttcttaaaagtcttccatttagtttcatcctttgaaaacaacttcgctactaatatgcggcctttgttattttgttggggcaaataaagaagattgtgcattgagtaaataaaagaacaacggattccacttgcacaaatgtttattccttctcttatcttttcttgggtcaatgaagagttgtgtctggttcaacttgtgtacgtgcttttaatgtttgtcgtcagctctttgtctactctatcaacttttttctctcaaacgcgcaggagagctacgcacaggggcgaagctacgtatagaggagagggtgcacatgaaccaacgaaaattcgaaaaagcagtggtttagaccaaatttt

SEQ ID NO: 217244 - DNA, 442 bp, Zea Mays
acgggcacagctgcccgctgtccaatcgccgcttcgtattgtgtatagacggcggggcgctgggctggcgcctggccgacacgggagcaggtgtcaacggcttgatgcaggggctccatccagagcccgcttggaccacaaaggttatttgatggccctcggtacaaaagaacgatatggaggcagactttcaggtggaggtatgagcctataaggcattgttgaggtctcaagtgtccgtgccggagggcaaagggtgataaaaagatggaacggtgtccagcatcacagcatggcagcatccttctcaactccatgacagccggtgagagaatcctgtcctcatcggtctgggcagacattcgacggtgagctgatgatgtaggttgaacaaccaaggttccttcaattcggagtcaaacagcactgaaagaactcccct

SEQ ID NO: 217245 - DNA, 993 bp, Zea Mays
caagcattgaccatttatgatgaaaatcatcctatgctttctaaagaatatgaacgtgttagggctggcaaacctccttttatgctagatatgtctcgctatggtttggagccacctccaatgaacaagaggaatgatgttggcgcttggaggcaggctctacggaatgctcagagccagttgcagcatcaaattataaggatagagaatctcgagcttatgctgaaatatggcgtagatgtttggaagctccagaacagacaaatggaatcagttctgtctaggatgcaaaagatggctgtagaatacaatgaaaggatagaaaatgtcaatcgcgagaggaagttccaccagcaaaatactggaggacagctgcatgccctgaaaatggaatggcaggagctgtgtcaaaaaaatatagctattcaggctgcttgtgttgacctgcagaatcatattgatcagcttaaacttgaagcaaaagaactgggaatgcccatggacgacaactcaggaaccgacccacaagcatcatgaggatttgagatacagaggtggcaaggaagaagctacgcttcatttgagtctggcagctggacgtttcattagccattgtgattacctgtcctgcaattgtcatatgggacagtctgtttgatattgaaaacaatgtggactgtgcctagcaatcccatgacctgtgctcctgaaaacacctcgcagaggaagaatctaaattcgtgtattgttgtccgttgaagtgccctaacttgtggcaagagaaatgcagctgatgtatgcagactctccagttgacattgagttcttacatgaagcttttctgtttgattttctgcttgtttctgaaaataccttgtgctttgccctcttctgaacacgcttacaagtgtttgcagacagtgcatttcaaaaacccgggttttttttaaatctgtatgtttgaaagcacttgatgtgtccattttagatcca

SEQ ID NO: 217246 - DNA, 1321 bp, Zea Mays
gaaccgtgctcaatccaaaacgccaaacggcccacgtgcgccgcgtttcctccatctccatccggccatcccacctccgcttcctcctccgcgccggcctacgcgactgcttccctctctctctcgagtctcgactctcgactgcgccgctacagcctgacgcgatggcctcgtcggcgacgagagaggttctcatgcttgaggcgcctccgccgtccgaccccgctgcggggccctggcgcgcggtgccggacgcggaggccattgacgcgctgccctacatcgacggcgactacggcgatgcggcggtgaagcgggaggtcgatcgcctcgtcgaggaggagatgcgccgagggaagcgcaagcctgcagacttcctccgggacctgccccctgttcccaccgccggattcgagatatgtctcgctatggtttggagccacctccaatgaacaagaggaatgatgttggcgcttggaggcaggctctacggaatgctcagagccagttgcagcatcaaattataaggatagagaatctcgagcttatgctgaaatatggcgtagatgtttggaagctccagaacagacaaatggaatcagttctgtctaggatgcaaaagatggctgtagaatacaatgaaaggatagaaaatgtcaatcgcgagaggaagttccaccagcaaaatactggaggacagctgcatgccctgaaaatggaatggcaggagctgtgtcaaaaaaatatagctattcaggctgcttgtgttgacctgcagaatcatattgatcagcttaaacttgaagcaaaagaactgggaatgcccatggacgacaactcaggaaccgacccacaagcatcatgaggatttgagatacagaggtggcaaggaagaagctacgcttcatttgagtctggcagctggacgtttcattagccattgtgattacctgtcctgcaattgtcatatgggacagtctgtttgatattgaaaacaatgtggactgtgcctagcaatcccatgacctgtgctcctgaaaacacctcgcagaggaagaatctaaattcgtgtattgttgtccgttgaagtgccctaacttgtggcaagagaaatgcagctgatgtatgcagactctccagttgacattgagttcttacatgaagcttttctgtttgattttctgcttgtttctgaaaataccttgtgctttgccctcttctgaacacgcttacaagtgtttgcagacagtgcatttcaaaaacccgggttttttttaaatctgtatgtttgaaagcacttgatgtgtccattttagatcca

SEQ ID NO: 217247 - DNA, 1923 bp, Zea Mays
agtggatatttgaagcacacggtcttgtctcgctcacccgggcaatccgcgcgaggtgcggcgcacatagccaggacccagaggcgattaggcgaacgggcggcgcggcacgagtcgagttttgaccgtgcggcgcgccgcgcgcgtatcaggcaacaatggagacgccgcgccttgtagtcgggcggcgtcgcggggccactcctcggttccggcggcggcgcctgccgcatccgcgcggcggggcacattgcttccccttcgcccgcgctcgaccacccgtgcttataacccggtgcttctacttcccctcttccagttgcgttcgaatcccacacccagcaccactccgtgcggccacgctctcacaattgctgcgcacgcgcgtgcgtgtatgcgtggctgttcctcagctgttccggtcctcccattcgtgtttcagggtggggaacacggcgattctcgaagctccagtaacgtcaggtgctggggattttgtaggttggacggcgtcgaagcacatagtgatcaggtaccaggtttgcttgatgagcaacgtgagggtgatgttggggagctctttagcctggctcaatggaatatcctgtgcattaacaagcagcggcttatggccatgggggagccgaagaaactgcaggatgaaaataatttgcttctcgaggaaatacgagtactacaaacagaaataaaaggaaacatcttcatattgtgtatatctacagtaaaatttactcaataacatcatgtggatcattatcaacctatgttgtcagtttttatcttgtgagattcaaaaatgggtaatttggtggaggtgatactacccaagtatgcaacttctcttcactaactaaacctttcgtatataatacttgatagactgtttggacaccttaagcttttatgttgtagcggtaccattagtcatatgaatggggaagtttcttttgagttgatttaatgtaaaaaatgatgagcaatataaatttataacatgcttctaagcttccttttagttattactatgtacgagtaaactcctgaaatttgaatattaatatccaggcgagacatttttttgctcattctagatggatgctctaaactggacattcttctgaaggtacatcagcataaacgtggatgtaattcatgatgtaaggagagctgaggcagagtatgaatcttatattttgctggtctttgccataataacaaaatatggactgggtaaagatacactcctagtgtgcaaaaagacgtaacagatgaaggcaataaagtatggatctgtgccagtacagataagctttcccagcgatgaatcaagggagtcggaggagcatgattggcacaatacagcactgtctcagtacatcatctcaacctatggagatccgtctctttctcaagtacttgatgactttgtaagttcacaatctcatgggagaatagctatcttgtcacaagctgttcactgtgcacaatcagttatctcttaatagatcaaataatgttctgaacatcagcattggtcgatcaaagttgcaatcaaaaggcccaggaagctgattgcgtgaaactatcttattttctgaagttacatgccttttgaggtttgaatttagcatagtttacttaattacttcccaatgtgcagaacaatgacccattgcattgtcagacctcgccggagaagcaacctcctgttgccggcgagctcaccctgctggtcacagaaaagactcacgcacacacacgaacacaagtgggcacactctgatttggtgctgtgaacaaccaacagcttttctgactctatttctctgtatataaagagacgtgtacagaccatgagcttacaacctgacagtttaccgcttaaagaaaggaaaaagaaat

SEQ ID NO: 217248 - DNA, 2975 bp, Zea Mays
agtggatatttgaagcacacggtcttgtctcgctcacccgggcaatccgcgcgaggtgcggcgcacatagccaggacccagaggcgattaggcgaacgggcggcgcggcacgagtcgagttttgaccgtgcggcgcgccgcgcgcgtatcaggcaacaatggagacgccgcgccttgtagtcgggcggcgtcgcggggccactcctcggttccggcggcggcgcctgccgcatccgcgcggcggggcacattgcttccccttcgcccgcgctcgaccacccgtgcttataacccggtgcttctacttcccctcttccagttgcgttcgaatcccacacccagcaccactccgtgcggccacgctctcacaattgctgcgcacgcgcgtgcgtgtatgcgtggctgttcctcagctgttccggtcctcccattcgtgtttcagggtggggaacacggcgattctcgaagctccagtaacgtcaggtaccaggtttgcttgatgagcaacgtgagggtgatgttggggagctctttagcctggctcaatggagtaattcactcttcccttgctttacctaatatatcctgtgcattaacaagcagcggcttatggccatgggggagccgaagaaactgcaggatgaaaataatttgcttctcgaggaaatacgagtactacaaacagaaataaaaggagagcttcatgtcatttcattaagaagagggattaatctcagattgtactcaatatttgaagaactaaaatgctattgtatttttcaaaacactagaagaattcctgaatcctaattttctgagcctgctgagccaatcacctgcgactgtgttagattctggttcccacacctgtgtcctggtaacactattcctgcctatgttggactcctatatggctatatccacgtgagtgagcttgaagatactcacaaacatggcaacttgtatatgcttcccactgatgtttcacccagtataactgcaattactttataatagtcaagtggcatatttgatttgagtcttttgatgtcatatttgttgatgctatatttgagactatgttcaatgcaggaaacatcttcatattgtgtatatctacagtaaaatttactcaataacatcatgtggatcattatcaacctatgttgtcagtttttatcttgtgagattcaaaaatgggtaatttggtggaggtgatactacccaagtatgcaacttctcttcactaactaaacctttcgtatataatacttgatagactgtttggacaccttaagcttttatgttgtagcggtaccattagtcatatgaatggggaagtttcttttgagttgatttaatgtaaaaaatgatgagcaatataaatttataacatgcttctaagcttccttttagttattactatgtacgagtaaactcctgaaatttgaatattaatatccaggcgagacatttttttgctcattctagatggatgctctaaactggacattcttctgaaggtttgaatttgattgtcaacttttagttttgatgacatagttcttaactgtgttttttattccatcaggacagcacgtcccaaatgattttgtgttaactagcaaacagttcgagataacttatgttttgcagtattgtcatattggtatatagtctacaattttcttctcttctcgttcttgctcacatgtgttacatttgaaattcgttataaaccttattaatatggactgtttttggcttgtgccacatttacatcttgcttattgcacgcaaagctatcatgctcaccgcattggtacggcacaaaataggtacatcagcataaacgtggatgtaattcatgatgtaaggagagctgaggcagagtatgaatcttatattttgctggtctttgccataataacaaaatatggactgggtaaagatacactcctagtgtgcaaaaagacgtaacaggtcctattatcttatctcgctattctcttattttagctgatgcttctgtatttgtgtagttctacaggcattttactcctaattttgcctcttttatgcagtacatcaactggtggtggtctttactattagaaccatctcagctctcctatttcagtcgttatatgttgttatatgttacatggctaccctgacgactttgagcgatatgtaggagtattagatttggggactattgtctcccccgttgaccttccaaatatatatttcaggacacaaaacataaagggaaatataaaagtctgttgtggttattttctagcccactgctgtgtctcttatttctctttgtgtgcagatgaaggcaataaagtatggatctgtgccagtacagataagctttcccagcgatgaatcaagggagtcggaggagcatgattggcacaatacagcactgtctcagtacatcatctcaacctatggagatccgtctctttctcaagtacttgatgactttgtaagttcacaatctcatgggagaatagctatcttgtcacaagctgttcactgtgcacaatcagttatctcttaatagatcaaataatgttctgaacatcagcattggtcgatcaaagttgcaatcaaaaggcccaggaagctgattgcgtgaaactatcttattttctgaagttacatgccttttgaggtttgaatttagcatagtttacttaattacttcccaatgtgcagaacaatgacccattgcattgtcagacctcgccggagaagcaacctcctgttgccggcgagctcaccctgctggtcacagaaaagactcacgcacacacacgaacacaagtgggcacactctgatttggtgctgtgaacaaccaacagcttttctgactctatttctctgtatataaagagacgtgtacagaccatgagcttacaacctgacagtttaccgcttaaagaaaggaaaaagaaat

SEQ ID NO: 217249 - DNA, 2945 bp, Zea Mays
agtggatatttgaagcacacggtcttgtctcgctcacccgggcaatccgcgcgaggtgcggcgcacatagccaggacccagaggcgattaggcgaacgggcggcgcggcacgagtcgagttttgaccgtgcggcgcgccgcgcgcgtatcaggcaacaatggagacgccgcgccttgtagtcgggcggcgtcgcggggccactcctcggttccggcggcggcgcctgccgcatccgcgcggcggggcacattgcttccccttcgcccgcgctcgaccacccgtgcttataacccggtgcttctacttcccctcttccagttgcgttcgaatcccacacccagcaccactccgtgcggccacgctctcacaattgctgcgcacgcgcgtgcgtgtatgcgtggctgttcctcagctgttccggtcctcccattcgtgtttcagggtggggaacacggcgattctcgaagctccagtaacgtcaggtaccaggtttgcttgatgagcaacgtgagggtgatgttggggagctctttagcctggctcaatggaatatcctgtgcattaacaagcagcggcttatggccatgggggagccgaagaaactgcaggatgaaaataatttgcttctcgaggaaatacgagtactacaaacagaaataaaaggagagcttcatgtcatttcattaagaagagggattaatctcagattgtactcaatatttgaagaactaaaatgctattgtatttttcaaaacactagaagaattcctgaatcctaattttctgagcctgctgagccaatcacctgcgactgtgttagattctggttcccacacctgtgtcctggtaacactattcctgcctatgttggactcctatatggctatatccacgtgagtgagcttgaagatactcacaaacatggcaacttgtatatgcttcccactgatgtttcacccagtataactgcaattactttataatagtcaagtggcatatttgatttgagtcttttgatgtcatatttgttgatgctatatttgagactatgttcaatgcaggaaacatcttcatattgtgtatatctacagtaaaatttactcaataacatcatgtggatcattatcaacctatgttgtcagtttttatcttgtgagattcaaaaatgggtaatttggtggaggtgatactacccaagtatgcaacttctcttcactaactaaacctttcgtatataatacttgatagactgtttggacaccttaagcttttatgttgtagcggtaccattagtcatatgaatggggaagtttcttttgagttgatttaatgtaaaaaatgatgagcaatataaatttataacatgcttctaagcttccttttagttattactatgtacgagtaaactcctgaaatttgaatattaatatccaggcgagacatttttttgctcattctagatggatgctctaaactggacattcttctgaaggtttgaatttgattgtcaacttttagttttgatgacatagttcttaactgtgttttttattccatcaggacagcacgtcccaaatgattttgtgttaactagcaaacagttcgagataacttatgttttgcagtattgtcatattggtatatagtctacaattttcttctcttctcgttcttgctcacatgtgttacatttgaaattcgttataaaccttattaatatggactgtttttggcttgtgccacatttacatcttgcttattgcacgcaaagctatcatgctcaccgcattggtacggcacaaaataggtacatcagcataaacgtggatgtaattcatgatgtaaggagagctgaggcagagtatgaatcttatattttgctggtctttgccataataacaaaatatggactgggtaaagatacactcctagtgtgcaaaaagacgtaacaggtcctattatcttatctcgctattctcttattttagctgatgcttctgtatttgtgtagttctacaggcattttactcctaattttgcctcttttatgcagtacatcaactggtggtggtctttactattagaaccatctcagctctcctatttcagtcgttatatgttgttatatgttacatggctaccctgacgactttgagcgatatgtaggagtattagatttggggactattgtctcccccgttgaccttccaaatatatatttcaggacacaaaacataaagggaaatataaaagtctgttgtggttattttctagcccactgctgtgtctcttatttctctttgtgtgcagatgaaggcaataaagtatggatctgtgccagtacagataagctttcccagcgatgaatcaagggagtcggaggagcatgattggcacaatacagcactgtctcagtacatcatctcaacctatggagatccgtctctttctcaagtacttgatgactttgtaagttcacaatctcatgggagaatagctatcttgtcacaagctgttcactgtgcacaatcagttatctcttaatagatcaaataatgttctgaacatcagcattggtcgatcaaagttgcaatcaaaaggcccaggaagctgattgcgtgaaactatcttattttctgaagttacatgccttttgaggtttgaatttagcatagtttacttaattacttcccaatgtgcagaacaatgacccattgcattgtcagacctcgccggagaagcaacctcctgttgccggcgagctcaccctgctggtcacagaaaagactcacgcacacacacgaacacaagtgggcacactctgatttggtgctgtgaacaaccaacagcttttctgactctatttctctgtatataaagagacgtgtacagaccatgagcttacaacctgacagtttaccgcttaaagaaaggaaaaagaaat

SEQ ID NO: 217250 - DNA, 3144 bp, Zea Mays
agtggatatttgaagcacacggtcttgtctcgctcacccgggcaatccgcgcgaggtgcggcgcacatagccaggacccagaggcgattaggcgaacgggcggcgcggcacgagtcgagttttgaccgtgcggcgcgccgcgcgcgtatcaggcaacaatggagacgccgcgccttgtagtcgggcggcgtcgcggggccactcctcggttccggcggcggcgcctgccgcatccgcgcggcggggcacattgcttccccttcgcccgcgctcgaccacccgtgcttataacccggtgcttctacttcccctcttccagttgcgttcgaatcccacacccagcaccactccgtgcggccacgctctcacaattgctgcgcacgcgcgtgcgtgtatgcgtggctgttcctcagctgttccggtcctcccattcgtgtttcagggtggggaacacggcgattctcgaagctccagtaacgtcaggttggacggcgtcgaagcacatagtgatcaggtaccaggtttgcttgatgagcaacgtgagggtgatgttggggagctctttagcctggctcaatggaatatcctgtgcattaacaagcagcggcttatggccatgggggagccgaagaaactgcaggatgaaaataatttgcttctcgaggaaatacgagtactacaaacagaaataaaaggtgcagtctcggttaccaacattttcaggattaggttatgtggatgataatgtgaaatttcttaaacttcagcaatcctatgctgcttgttgatatgattgttttactttccatttcttgttcttaactatagtggtaagctgcatgcatcaaatacctttcagtatgcttttacacattccatcttctcatggcattttttcaggtattcccctagaatcaacacaattcagtgagttacccctgcagatagatacaatagtcgtttctggaatgatcagcatatcagaagcatctgattttatagagaaagttgtcactaatagaagcataatacaaagtgccttttctgattttcatcataaaccaaatactgaatccatcacttattaagggaagctaaccagacgagaagtttgcatctcagaggtgcccaaatcttccaaatcttttcagctggctcaaaatttattgatccagcaaggaagcgatcataagccgactttgctgaatattcccctgcgattgatggcagccaatgcacatccaagtccccccatcttaagctgaacttctcgagttaataaatcacagaccaggaaaaaaaatcaggaggaattccgcaggcagactgtcagatagatcagtcacccacctattattctgcagtgcttcctgaactgttctgattttctaaagtctcctaggaatgcggctcaggagagctggtgcaatataacaacagactgaccatgtatccaacgatcagtctatccatgagaggggaaaaatggcagacgacaaggataggcacgtgaccatagagagagaatcactttaaatgctggttttgacggttgttctatgcacaaacagtagctaatctagaacttttactgtaatcctaggacctttccttttggtaaaacacacaagtaaatctttagcgtccttttagtttgttttataggcaatgggattaatcttggatttttttttcggacaacgcaggagagcttcatgtcatttcattaagaagagggattaatctcagattgtactcaatatttgaagaactaaaatgctattgtatttttcaaaacactagaagaattcctgaatcctaattttctgagcctgctgagccaatcacctgcgactgtgttagattctggttcccacacctgtgtcctggtaacactattcctgcctatgttggactcctatatggctatatccacgtgagtgagcttgaagatactcacaaacatggcaacttgtatatgcttcccactgatgtttcacccagtataactgcaattactttataatagtcaagtggcatatttgatttgagtcttttgatgtcatatttgttgatgctatatttgagactatgttcaatgcaggaaacatcttcatattgtgtatatctacagtaaaatttactcaataacatcatgtggatcattatcaacctatgttgtcagtttttatcttgtgagattcaaaaatgggtaatttggtggaggtgatactacccaagtacatcagcataaacgtggatgtaattcatgatgtaaggagagctgaggcagagtatgaatcttatattttgctggtctttgccataataacaaaatatggactgggtaaagatacactcctagtgtgcaaaaagacgtaacaggtcctattatcttatctcgctattctcttattttagctgatgcttctgtatttgtgtagttctacaggcattttactcctaattttgcctcttttatgcagtacatcaactggtggtggtctttactattagaaccatctcagctctcctatttcagtcgttatatgttgttatatgttacatggctaccctgacgactttgagcgatatgtaggagtattagatttggggactattgtctcccccgttgaccttccaaatatatatttcaggacacaaaacataaagggaaatataaaagtctgttgtggttattttctagcccactgctgtgtctcttatttctctttgtgtgcagatgaaggcaataaagtatggatctgtgccagtacagataagctttcccagcgatgaatcaagggagtcggaggagcatgattggcacaatacagcactgtctcagtacatcatctcaacctatggagatccgtctctttctcaagtacttgatgactttaacaatgacccattgcattgtcagacctcgccggagaagcaacctcctgttgccggcgagctcaccctgctggtcacagaaaagactcacgcacacacacgaacacaagtgggcacactctgatttggtgctgtgaacaaccaacagcttttctgactctatttctctgtatataaagagacgtgtacagaccatgagcttacaacctgacagtttaccgcttaaagaaaggaaaaagaaat

SEQ ID NO: 217251 - DNA, 2523 bp, Zea Mays
caaatccctccccgtcctctctcttcgcccacccccacattattctctccccaaatctgaccttccctcgtgcgaggcctcacctcttccgacgcgacgcgatacgcaccacacgcggagaccaagccgagcccatctagggttagcgtcccactgcggcggccatggacgaggcagcgacagcggccctggcggcggcgagggggcggtggacgcagtgggaggaggtggtggtgtccaacgaccgcggcagccgcctcgtgcactactacctccgcggcaacagcgaggagaagcagctggcggtggttgggcgggagcggagcccgcgtcacatgtcgtacgccgtgcaggggcggttcctccgcgcgctcgcggctgccgccggggcggtcgccgtcgcgccgtcgccatcacggtcgcctctgccggctgctggggcggacggcggcgctccgaggaggtggcggtccagacgggaggtcgtggactggctgtcctccctcgtttctggtcataattatggttcctcctcaatggcaactaggtgcagtagggattcatatgatgacagtgttaacaactgcacacaagttactgcttcgaaggatgtttcttctagggaaccttcaaatgtcttcacatggttaggagctccatgttattgcccacaacgtttgaagcactacaaatctttctgccgtagaggaattactatctcggtgcatagttttgtattcatcatgagtgaagagatgaagagacttattgcttatgtggaagatctctacgaggatacaaactcatgcaacatggtcaaggtacaatggttcgacaaagttgatgagtcctgagtgtccagcactacgagaagttcaaggctgcaaggctactggagccaggaagtacttaggaccatgttcaatgcaacttcctctctgaaggttttatggtgagaacatccaacaattgtgtcctggttgccatgtggaagtactctctcaagatagtggtataaggggatgttggtttagatgtttgattctgaagaggcataaagataaaatcaaggtgcgctacctagaacttcaggatgctgatgagactggaaacttggaggagtgggttatgctaacacgagttgccaaacctgatcaactgggtgtacgtttccttggaaggccaatggttcgtccacagcgcgtggaacaaagcaaggcctcatgctttgatgttggagccattgttgatgcgtggtggcatggtggctggtgggagggaatcgtgctgtaccaggtgggcagtgggcgtctacaagtttattttccaggagaaaagcgaacagctgaatttggtgaagatgagctgaggtgttcccttgagtgggttggtaacaaatggaatcctttgaagggaagaaaagatgtcacaagcaagctgacctccactgcagattgtggaagtgaatatttgattgcgaaacaagatccactgaattttcatgtgcctaaaaattcagaacctcaactagagggacatcaatatgacaagaggggtattgagaaatcttcagtcagcacaatttcacgagatcagaaacgtgtccttgccgacctgactaatgatttgaagttagataacttgaggtggaggccaagaaagaggagcagaagatctggctcaagaaagcagtcggacacaagcagtggaagcagcagcggggacatggacctgttcagccccagccccagtggaagctttggtcaacataatttagtgcctgacgaggagacatgcaagagcagtggagagcagacttttatgggtgtgcctgtgcaggttcccaatcttgtgatgtccaggtgaaagccatcttagcaccggttgaagattaacatgttagcttctggagttacaccgaccttggcgagatgtggttttgtgcatccccaggttatttttgccagcacaacccagatccagttttctgcagtttttttggaggctcatcagctgtgatcagttagatgtgaaaatgtctcaccaagaaccagtatacagtttgtatgtagggagagaagaaaatgctcggtttggttttggttttagagctttcagttttttttcttttcttttcaatcctagtctttgttgtttgaaggacaggtcctagatttgacatagcctctttacatcggttattctttcccatagttgtcagtacttggtagtccttgttttttatttgtccatgcagtcttgtagcagtcgcgcgccttacgtaaaattatcctgaactgaactcagtgaaatgtcacaaaatagtgcttattgcctatttctgtgttcttttaaatgtcagttagggtactagttgggttacattttctcacagtggtgaactttattgggcctgcttctttctgcaccacagcctacggaatggttgtgaattgtgtgttagcaaatggcatgctgttgttgtgaattggttggtgcgaagaatcactaacgttgaaaaat

SEQ ID NO: 217252 - DNA, 2629 bp, Zea Mays
tctcttcgcccacccccacattattctctccccaaatctgaccttccctcgtgcgaggcctcacctcttccgacgcgacgcgatacgcaccacacgcggagaccaagccgagcccatctagggttagcgtcccactgcggcggccatggacgaggcagcgacagcggccctggcggcggcgagggggcggtggacgcagtgggaggaggtggtggtgtccaacgaccgcggcagccgcctcgtgcactactacctccgcggcaacagcgaggagaagcagctggcggtggttgggcgggagcggagcccgcgtcacatgtcgtacgccgtgcaggggcggttcctccgcgcgctcgcggctgccgccggggcggtcgccgtcgcgccgtcgccatcacggtcgcctctgccggctgctggggcggacggcggcgctccgaggaggtggcggtccagacgggaggtcgtggactggctgtcctccctcgtttctggaatatggagaatacaggtgtgccccagtggaagcagctgctggcttcctttgggccaattgcataaccttggcatttgggaatagagataagcgaagcagcagcatgaatgtatgctccatcaggtcataattatggttcctcctcaatggcaactaggtgcagtagggattcatatgatgacagtgttaacaactgcacacaagttactgcttcgaaggatgtttcttctagggaaccttcaaatgtcttcacatggttaggagctccatgttattgcccacaacgtttgaagcactacaaatctttctgccgtagaggaattactatctcggtgcatagttttgtattcatcatgagtgaagagatgaagagacttattgcttatgtggaagatctctacgaggatacaaactcatgcaacatggtcaaggtacaatggttcgacaaagttgatgagtcctgagtgtccagcactacgagaagttcaaggctgcaaggctactggagccaggaagtacttaggaccatgttcaatgcaacttcctctctgaaggttttatggtgagaacatccaacaattgtgtcctggttgccatgtggaagtactctctcaagatagtggtataaggggatgttggtttagatgtttgattctgaagaggcataaagataaaatcaaggtgcgctacctagaacttcaggatgctgatgagactggaaacttggaggagtgggttatgctaacacgagttgccaaacctgatcaactgggtgtacgtttccttggaaggccaatggttcgtccacagcgcgtggaacaaagcaaggcctcatgctttgatgttggagccattgttgatgcgtggtggcatggtggctggtgggagggaatcgtgctgtaccaggtgggcagtgggcgtctacaagtttattttccaggagaaaagcgaacagctgaatttggtgaagatgagctgaggtgttcccttgagtgggttggtaacaaatggaatcctttgaagggaagaaaagatgtcacaagcaagctgacctccactgcagattgtggaagtgaatatttgattgcgaaacaagatccactgaattttcatgtgcctaaaaattcagaacctcaactagagggacatcaatatgacaagaggggtattgagaaatcttcagtcagcacaatttcacgagatcagaaacgtgtccttgccgacctgactaatgatttgaagttagataacttgaggtggaggccaagaaagaggagcagaagatctggctcaagaaagcagtcggacacaagcagtggaagcagcagcggggacatggacctgttcagccccagccccagtggaagctttggtcaacataatttagtgcctgacgaggagacatgcaagagcagtggagagcagacttttatgggtgtgcctgtgcaggttcccaatcttgtgatgtccaggtgaaagccatcttagcaccggttgaagattaacatgttagcttctggagttacaccgaccttggcgagatgtggttttgtgcatccccaggttatttttgccagcacaacccagatccagttttctgcagtttttttggaggctcatcagctgtgatcagttagatgtgaaaatgtctcaccaagaaccagtatacagtttgtatgtagggagagaagaaaatgctcggtttggttttggttttagagctttcagttttttttcttttcttttcaatcctagtctttgttgtttgaaggacaggtcctagatttgacatagcctctttacatcggttattctttcccatagttgtcagtacttggtagtccttgttttttatttgtccatgcagtcttgtagcagtcgcgcgccttacgtaaaattatcctgaactgaactcagtgaaatgtcacaaaatagtgcttattgcctatttctgtgttcttttaaatgtcagttagggtactagttgggttacattttctcacagtggtgaactttattgggcctgcttctttctgcaccacagcctacggaatggttgtgaattgtgtgttagcaaatggcatgctgttgttgtgaattggttggtgcgaagaatcactaacgttgaaaaat

SEQ ID NO: 217253 - DNA, 2505 bp, Zea Mays
ggaaagcacaccatcatctgtctccataaacaaggcctgcagcgatgtgctccactgcagtgctgctagttcgcacatgcgttgtgcttgtgtgtttggccgccttggcgcgagcgccggccaaggtccatgctgccgccggcaccggggatgggctccttgctatccctaccaacgcctccctgtcgcactgcccctctcgctgcggggatgtccaaatctcgtacccgttcgggatagggccgggctgcttccggcaaggcttcgagctcagctgcgatcgcacaactccttctcccaggctcttcttcgtgtcggggaacagctcgatccaggtgacttcactatatgtccgcaacagtgtggtttgggtttcagctgttgggttcaacgtcaccatgagcgcaggcgtggacacctacaccaagtcttgggaggcccctactgccacgggtgtttgtttttatccagattataataatctgtacactgttggatgtggtgtctacgtctatgtgttcggtgataatatgacagatatcattggttcttgcacaagtatttgcacagataacagagagatcatggagagcgcaaacactggttctggtgcctgtgaagggttaggctgctgcagcattccaatacgtggcggccaaggcttcactctcaaactaggtcgcctcaatagtaccattccacagttcggtgaagcgctctccaatgtcaagattatcttttcgcaaaactatgacttcgttacagatgatgtttacgcaagttgggtggtgaatacaagcaatgttcacgccatgctacttaacattgcaatcacggatcaaccaagctgcgcgagtgcccagtcccaagagaacaaggatacctacgcatgcagtagtgaaagcatctgctacgactatctaccaccatcagtatctcaaagaggctacacttgcttctgccctggtcaaatagagggcaacccctatattgaagatggctgcatagcatattacaacccagaggcgcccaataggaactgtatgagattatgtggaaacataagcgttccatttccttttgggattcaagaaggctgttacgcaaatgataacctacgactcgactgcacaagtaacgacactcttattcttgatcgagggtacgcacagtatcgcgtgaccaatttgtcacttgatgatgggcttctgatggttacaaacatgttgaatgacacaagctccaacaatgtggggaggataatcatcactagtaacaatgacaaataccaggaggttatggatggtaattatgatttctctcaggaggacgtggcaataaaatgggttatatcaaacataacttgtcagaaagcaatgcaaaataatgctacatatgcgtgcgtaagtgacaacagtatatgcaaagatgtcatgcgaggaaatatacgtgacgggtaccgctgcaagtgttccgatggcttccaaggaaacccataccttcataataactgtacagatattgatgagtgccttattccaaataaatgcaatggagtatgccacaattttgatggaggcttcaattgtacaagttgccctcatgggaaagaggattgtaattgggcttgtttgtggtcttggatccataagttttgcacttggtgcaattgtactcaccggtaagtggaaaaaaggtatccaaaggagaattcgaagagagtacttcaagaaaaatcaaggtctactcttggagcaactaatatcaaatgaaaatgctacaaacaaaacaaagatattcactttggatgaactagaggaagcaaccaacaagtttgatgctactcgtgttctaggtcatggtgggcatggcactgtttacaaagggattttgtctgatcagcgtgtcgtggctataaaaaaatctaaaatagtggagcaaatagagatagatcagttcatcgatgaggttgctattttatctcaaatcattcaccgcaatgtggtgaagctttttggttgttgcctagaagatgaggtacccttgctagtctatgagttcatatcgaatggcactttgtatgacattcttcatgaaaatattgcaacaaaatgcttgttgtcatgggatgatcgaattaggattgcaacagaagcatcaggagcacttgcttatctacactcagctgctgcaataccaattttccatagagatgtgaagtcttctaatatactcttggacgacaacttcactgtaaaggtttcagattttggtgcttcaagatctctatcccttgatgaaacacatgtggtgacaattgtccaaggaacattcggttatttagatccagagtattattatactggttctctaactgagaagagtgatgtgtatagttttggagtgatacttgtggaacttttgacaagaaagaaaccaatttttatcaatgaatcgggtgccaaacaaaacttatctcattactttattgaaggactacagtaa

SEQ ID NO: 217254 - DNA, 2008 bp, Zea Mays
aagaagcagtttgctcaaagctgaataggaccctggccattcaatctccatccagtggccagaacatggggtgctggaagagatttttttaccagaataatattgtatagacagatcctttgatttactagtgttgacgagttacaggtgaagttcattttaggctctcacaatgagatgtaactggatttttagcatctgtttatgacaattacagttttggatagataacttggcagctagattagccttttggttttgtgttgggtgtgggtgggtggtaatggaggatcatggtaggctctgccaaaaggttttaactgtatatttagtaggcttgcaggcagggcgggttttttatgggaacccgcatatccaccccacaaaatcatgctttgtggcagatgcagaccagctgcagcagtttttcggcatcatgtctgttgtttcattaagcccatcggtacccttttgtttctacttatgacaaatacatgacacagctttcgtcatgttcaacagatacacaacctcacatctcttctacacaatatgtcaattcatctaaaatggccaatacaaccattccattgatgaatgacactattggcgaaagttcctttttttttccttatatgaattcttgcaaaaatcaagctttattattttgattccgtgtggaatgaacaaaagggtcttagataccaaactactgataagcagtatggaaaatggagtaaccctgatgacaaggcaacagtggggaactatttcctcaattcttgtggagagatccaccttaatccggagcatttagggaatgagagactaatgtggggatcttctgaaatgaaacatgatctaggaagttttagttccaaggtttcttcggctgagtctagatttattcagacttgtgaaggttcatctgagtttcctgatgtcaataacactagtgttgattcgccttgttggaagggcacaccagcctcgtaccagtgttcgtttgggattatggaaaataacggtgttcctcctgtggcgataagaacagcaggctacatcaattcacataaaaaccagaagccccctgagttgggttctgggtatccatggcgattctgtgaacaccaagtagcattgagttctgagattgacccttttaaggtgttcaagttgcccgaaagatgtaaaatctccaaagatcataaagaagttccaccaattgatgtcaaggttcttaatgacatgactactcatgcttgttgtttgcctgacaaacagcattccgcaacacagaaatgctatgattctagagaagattctcagaatgtgataacttcaagtcaacgggaaagtttgtgtcctgccagcaagccaaaacttttagttgtggagaaggaagaaagcactcacacaagaggtgaagacccttctcaatgttatccaggtgttgaggggaatatgatgaatatggcttctgaatccagctctagcactcgggcaatatttctgaaactaatgcacaacctatcagtagtgcttctattgacatgcaagggtggttctttgttgcacgaagatgaagaggaccttctgcaatcagtgattcaaaatcttacagctgccagttccaaaagaagcaaggttgaacaaaaaaactggtgatgggttgagcaactccagtcaaatgaaattaaaaaatattaactgtgcgaggaacaacttttggcggtcaatgcatgaagactcagtacgggagaatgctgattcagaatttaaggccactgtttcacagtatatcactgcgggtagccttactaatcaccaggaggataagatgcttgacaacactaaagtttctcaagcgtcaatctatagaaacttgtggattgaagcagaagcttcagcttgtaaactcaaatatgagcttcaacatgctcacctgggcttgagacagcaaaaggcctcaatgtcacagtagaaggagcaattatggacatcagcg

SEQ ID NO: 217255 - DNA, 1458 bp, Zea Mays
ggcagtaccgcagtagagctcgggaagaagcagtttgctcaaagctgaataggaccctggccattcaatctccatccagtggccagaacatggggtgctggaagagatttttttaccagaataatattgtatagacagatcctttgatttactagtgttgacgagttacaggtgaagttcattttaggctctcacaatgagatgtaactggatttttagcatctgtttatgacaattacagttttggatagataacttggcagctagattagccttttggttttgtgttgggtgtgggtgggtggtaatggaggatcatggtaggctctgccaaaaggttttaactgtatatttagtaggcttgcaggcagggcgggttttttatgggaacccgcatatccaccccacaaaatcatgctttgtggcagatgcagaccagctgcagcagtttttcggcatcatgtctgttgtttcattaagcccatcgttgtggagaaggaagaaagcactcacacaagaggtgaagacccttctcaatgttatccaggtgttgaggggaatatgatgaatatggcttctgaatccagctctagcactcgggcaatatttctgaaactaatgcacaacctatcagtagtgcttctattgacatgcaagggtggttctttgttgcacgaagatgaagaggaccttctgcaatcagtgattcaaaatcttacagctgccagttccaaaagaagcaaggttgaacaaaaaaactggtgatgggttgagcaactccagtcaaatgaaattaaaaaatattaactgtgcgaggaacaacttttggcggtcaatgcatgaagactcagtacgggagaatgctgattcagaatttaaggccactgtttcacagtatatcactgcgggtagccttactaatcaccaggaggataagatgcttgacaacactaaagtttctcaagcgtcaatctatagaaacttgtggattgaagcagaagcttcagcttgtaaactcaaatatgagcttcaacatgctcacctgggcttgagacagcaaaaggcctcaatgtcacagtagaagttgaccagtatggcggttcacctacaaaatgggagcatgttctgaaggagaatttcttccatccaggcaaataggtgaaatctgaaccataaaccagaaagctatggtttcagctcatgttgcttcaaaatgttgatgcttcttgtaaatatgatatatacatcctctcctccccaacctttatcagtatgttcaataatctgcatatcggtgatcatgtaacccctcatggtgctatacggaagtaatctggtttttctgcttgggtctatgccaaagtttgtctataaacgacactatggtctggactggaccgagagttcgcctgcttgttgtcaaccttacatatctgttagggcatgtttgtttaggat

SEQ ID NO: 217256 - DNA, 1603 bp, Zea Mays
ctcccgcgagctacatggccccgccgccacgccaccgagttataaagttgtggagaaggaagaaagcactcacacaagaggtgaagacccttctcaatgttatccagggtggttctttgttgcacgaagatgaagaggaccttctgcaatcagtgattcaaaatcttacagctgccagttccaaaagaagcaagccatttcttccggagaatgtaccttagtaccttacgttgcacctttcgtttcaggttcttaggctatccgcactcattctactctaaatttctactctaaaagaaatattctatcctcatcatcaagattctctaccctatatcataatctactgcagtcatatttactccatacatcaactctataccaatcaccacatatattatatatcttttttttgtcccctactgccacaccggctgatggcgctcggcaccgtacctgctgcatggacgtgtggactgatagagtaaaaaagcatcgatagagtaaaaaagcatcgacgctgtaaataacgttttgtttgccccccataagtttacagctacctatagagtactccactgcagtaaaattttactctatacctagccttatattggtggcgtcttctttacagtatatcactgcgggtagccttactaatcaccaggaggataagatgcttgacaacactaaagtttctcaagcgtcaatctatagaaacttgtggattgaagcagaagcttcagcttgtaaactcaaatatgagcttcaacatgctcacctgggcttgagacagcaaaaggcctcaatgtcacagtagaaggtactccctcgcttcacaaatgtaagcatttctagcatttttgggccatttaggaggaagggaaatgactgtgatatccctcaatcaatcaccaagattacagagactcagttaatgccttgctttcgtatagatgccataaacgccaagtgctaattaaaactttaaacaccaagattgtattgatgctaaacatgcttgacaccaaaataaaactgcttccaaatattaatggtgagggagtgtcaggggttgattatgccagaaatgtttacgttcgtggacaattttgaatgctgaagttacatgtacctgtagaaggaagctggagggagtagcaagatggatatataaattaatattttcacataagagtctcaggaaccgtgcctaatctcctctccagttgaccagtatggcggttcacctacaaaatgggagcatgttctgaaggagaatttcttccatccaggcaaataggtgaaatctgaaccataaaccagaaagctatggtttcagctcatgttgcttcaaaatgttgatgcttcttgtaaatatgatatatacatcctctcctccccaacctttatcagtatgttcaataatctgcatatcggtgatcatgtaacccctcatggtgctatacggaagtaatctggtttttctgcttgggtctatgccaaagtttgtctataaacgacactatggtctggactggaccgagagttcgcctgcttgttgtcaaccttacatatctgttagggcatgtttgtttaggat

SEQ ID NO: 217257 - DNA, 4130 bp, Zea Mays
cgtggaccgccactggcgatgatgccgtactccggcgaccacgagcgctctctgccatcgctgtcaccgccacgagttgtgttctcctcctccctcgccccatccgccgcgcccttccccgccgttgacccggtgggcccgggccaaggcctcggccgtgatctgcccaccgccccgacgccccgtccgtctacgcagcgggcggagactggcgcgctgcgtcgtggatggagcctcccgcgagctacatggccccgccgccacgccaccgagttataaagagcaacgagagggacgaacattccccacctgagaaacttaaactaataagggagggacaagaaagaaaaaaaaggcgaaggttacacattgccgaaggagttgcacacgatatgttagccttttgcaccattaatctagctggggagtcgcatctgctattgccttctatttcatgtcctgtgtgcaattcatgtgattgttaggtgagacgaaccagccaccaccgtatcagagcgagtatgcttttcaaaccagtttgggatgggtaactgaaacttcccagctagctagattaatggattttcacctttacacacgttgatggataactgaaacttcccaactagattaatggattttcatctttacacccctaggatagataagggtgtccccaacgggttcaccaaatcgccagtgaagttgaaagctgaaaataataataaaaagaagtgaagagcgtaggtatgcagactgcagagcaacggagctgagagagggagcttactgtggcagcagcagcactagctcattgctctatctcctattcgcccaatagaatttcacaagagctggcaatttaagcactgttggttacgcccttataatcttggggctagattggacgtttggtttggactttggagaatgctagggtgtttcgtctggtggcagttggcacccagttgtatttggcaaataaacgaatggcacaaccttgtcctccccaaatctggtgagatctctattgagattatactattagagtttggtgtttggtctttggggttgggttttggggatggacaatgggagtttcttgcctgacggcttttgctgggctggcagcgaggcaaagcagcaatgacaccactagcccagcaggaggatttctgtctagtggagttgaggcttggggaacaccggcggtggagtgagggataaggaggtggttgccgcatgcgggttaatttcttgctggagttccatgctggcttcagcaaaaccctagcctgctgcggcagggtgaaggcgcatgggatggcagtggcattggggcagtaccgcagtagagctcgggaagaagcagtttgctcaaagctgaataggaccctggccattcaatctccatccagtggccagaacatggggtgctggaagagatttttttaccagaataatattgtatagacagatcctttgatttactagtgttgacgagttacaggtgaagttcattttaggctctcacaatgagatgtaactggatttttagcatctgtttatgacaattacagttttggatagataacttggcagctagattagccttttggttttgtgttgggtgtgggtgggtggtaatggaggatcatggtaggctctgccaaaaggttttaactgtatatttagtaggcttgcaggcagggcgggttttttatgggaacccgcatatccaccccacaaaatcatgctttgtggcagatgcagaccagctgcagcagtttttcggcatcatgtctgttgtttcattaagcccatcggtacccttttgtttctacttatgacaaatacatgacacagctttcgtcatgttcaacagatacacaacctcacatctcttctacacaatatgtcaattcatctaaaatggccaatacaaccattccattgatgaatgacactattggcgaaagttcctttttttttccttatatgaattcttgcaaaaatcaagctttattattttgattccgtgtggaatgaacaaaagggtcttagataccaaactactgataagcagtatggaaaatggagtaaccctgatgacaaggcaacagtggggaactatttcctcaattcttgtggagagatccaccttaatccggagcatttagggaatgagagactaatgtggggatcttctgaaatgaaacatgatctaggaagttttagttccaaggtttcttcggctgagtctagatttattcagacttgtgaaggttcatctgagtttcctgatgtcaataacactagtgttgattcgccttgttggaagggcacaccagcctcgtaccagtgttcgtttgggattatggaaaataacggtgttcctcctgtggcgataagaacagcaggctacatcaattcacataaaaaccagaagccccctgagttgggttctgggtatccatggcgattctgtgaacaccaagtagcattgagttctgagattgacccttttaaggtgttcaagttgcccgaaagatgtaaaatctccaaagatcataaagaagttccaccaattgatgtcaaggttcttaatgacatgactactcatgcttgttgtttgcctgacaaacagcattccgcaacacagaaatgctatgattctagagaagattctcagaatgtgataacttcaagtcaacgggaaagtttgtgtcctgccagcaagccaaaacttttagttgtggagaaggaagaaagcactcacacaagaggtgaagacccttctcaatgttatccaggtgttgaggggaatatgatgaatatggcttctgaatccagctctagcactcgggcaatatttctgaaactaatgcacaacctatcagtagtgcttctattgacatgcaagggtggttctttgttgcacgaagatgaagaggaccttctgcaatcagtgattcaaaatcttacagctgccagttccaaaagaagcaaggttgaacaaaaaaactggtgatgggttgagcaactccagtcaaatgaaattaaaaaatattaactgtgcgaggaacaacttttggcggtcaatgcatgaagactcagtacgggagaatgctgattcagaatttaaggccactgtttcacagtatatcactgcgggtagccttactaatcaccaggaggataagatgcttgacaacactaaagtttctcaagcgtcaatctatagaaacttgtggattgaagcagaagcttcagcttgtaaactcaaatatgagcttcaacatgctcacctgggcttgagacagcaaaaggcctcaatgtcacagtagaaggtactccctcgcttcacaaatgtaagcatttctagcatttttgggccatttaggaggaagggaaatgactgtgatatccctcaatcaatcaccaagattacagagactcagttaatgccttgctttcgtatagatgccataaacgccaagtgctaattaaaactttaaacaccaagattgtattgatgctaaacatgcttgacaccaaaataaaactgcttccaaatattaatggtgagggagtgtcaggggttgattatgccagaaatgtttacgttcgtggacaattttgaatgctgaagttacatgtacctgtagaaggaagctggagggagtagcaagatggatatataaattaatattttcacataagagtctcaggaaccgtgcctaatctcctctccagttgaccagtatggcggttcacctacaaaatgggagcatgttctgaaggagaatttcttccatccaggcaaataggtgaaatctgaaccataaaccagaaagctatggtttcagctcatgttgcttcaaaatgttgatgcttcttgtaaatatgatatatacatcctctcctccccaacctttatcagtatgttcaataatctgcatatcggtgatcatgtaacccctcatggtgctatacggaagtaatctggtttttctgcttgggtctatgccaaagtttgtctataaacgacactatggtctggactggaccgagagttcgcctgcttgttgtcaaccttacatatctgttagggcatgtttgtttaggat

SEQ ID NO: 217258 - DNA, 3301 bp, Zea Mays
cgtggaccgccactggcgatgatgccgtactccggcgaccacgagcgctctctgccatcgctgtcaccgccacgagttgtgttctcctcctccctcgccccatccgccgcgcccttccccgccgttgacccggtgggcccgggccaaggcctcggccgtgatctgcccaccgccccgacgccccgtccgtctacgcagcgggcggagactggcgcgctgcgtcgtggatggagcctcccgcgagctacatggccccgccgccacgccaccgagttataaagagcaacgagagggacgaacattccccacctgagaaacttaaactaataagggagggacaagaaagaaaaaaaaggcgaaggttacacattgccgaaggagttgcacacgatatgttagccttttgcaccattaatctagctggggagtcgcatctgctattgccttctatttcatgtcctgtgtgcaattcatgtgattgttaggtgagacgaaccagccaccaccgtatcagagcgagtatgcttttcaaaccagtttgggatgggtaactgaaacttcccagctagctagattaatggattttcacctttacacacgttgatggataactgaaacttcccaactagattaatggattttcatctttacacccctaggatagataagggtgtccccaacgggttcaccaaatcgccagtgaagttgaaagctgaaaataataataaaaagaagtgaagagcgtaggtatgcagactgcagagcaacggagctgagagagggagcttactgtggcagcagcagcactagctcattgctctatctcctattcgcccaatagaatttcacaagagctggcaatttaagcactgttggttacgcccttataatcttggggctagattggacgtttggtttggactttggagaatgctagggtgtttcgtctggtggcagttggcacccagttgtatttggcaaataaacgaatggcacaaccttgtcctccccaaatctggtgagatctctattgagattatactattagagtttggtgtttggtctttggggttgggttttggggatggacaatgggagtttcttgcctgacggcttttgctgggctggcagcgaggcaaagcagcaatgacaccactagcccagcaggaggatttctgtctagtggagttgaggcttggggaacaccggcgctttattattttgattccgtgtggaatgaacaaaagggtcttagataccaaactactgataagcagtatggaaaatggagtaaccctgatgacaaggcaacagtggggaactatttcctcaattcttgtggagagatccaccttaatccggagcatttagggaatgagagactaatgtggggatcttctgaaatgaaacatgatctaggaagttttagttccaaggtttcttcggctgagtctagatttattcagacttgtgaaggttcatctgagtttcctgatgtcaataacactagtgttgattcgccttgttggaagggcacaccagcctcgtaccagtgttcgtttgggattatggaaaataacggtgttcctcctgtggcgataagaacagcaggctacatcaattcacataaaaaccagaagccccctgagttgggttctgggtatccatggcgattctgtgaacaccaagtagcattgagttctgagattgacccttttaaggtgttcaagttgcccgaaagatgtaaaatctccaaagatcataaagaagttccaccaattgatgtcaaggttcttaatgacatgactactcatgcttgttgtttgcctgacaaacagcattccgcaacacagaaatgctatgattctagagaagattctcagaatgtgataacttcaagtcaacgggaaagtttgtgtcctgccagcaagccaaaacttttagttgtggagaaggaagaaagcactcacacaagaggtgaagacccttctcaatgttatccagggtggttctttgttgcacgaagatgaagaggaccttctgcaatcagtgattcaaaatcttacagctgccagttccaaaagaagcaaggttgaacaaaaaaactggtgatgggttgagcaactccagtcaaatgaaattaaaaaatattaactgtgcgaggaacaacttttggcggtcaatgcatgaagactcagtacgggagaatgctgattcagaatttaaggccactgtttcacaggtagctttagtcattatttggaacatcatgcttctgcttaatttgaattaatacagccatttcttccggagaatgtaccttagtaccttacgttgcacctttcgtttcaggttcttaggctatccgcactcattctactctaaatttctactctaaaagaaatattctatcctcatcatcaagattctctaccctatatcataatctactgcagtcatatttactccatacatcaactctataccaatcaccacatatattatatatcttttttttgtcccctactgccacaccggctgatggcgctcggcaccgtacctgctgcatggacgtgtggactgatagagtaaaaaagcatcgatagagtaaaaaagcatcgacgctgtaaataacgttttgtttgccccccataagtttacagctacctatagagtactccactgcagtaaaattttactctatacctagccttatattggtggcgtcttctttacagtatatcactgcgggtagccttactaatcaccaggaggataagatgcttgacaacactaaagtttctcaagcgtcaatctatagaaacttgtggattgaagcagaagcttcagcttgtaaactcaaatatgagcttcaacatgctcacctgggcttgagacagcaaaaggcctcaatgtcacagtagaagttgaccagtatggcggttcacctacaaaatgggagcatgttctgaaggagaatttcttccatccaggcaaataggtgaaatctgaaccataaaccagaaagctatggtttcagctcatgttgcttcaaaatgttgatgcttcttgtaaatatgatatatacatcctctcctccccaacctttatcagtatgttcaataatctgcatatcggtgatcatgtaacccctcatggtgctatacggaagtaatctggtttttctgcttgggtctatgccaaagtttgtctataaacgacactatggtctggactggaccgagagttcgcctgcttgttgtcaaccttacatatctgttagggcatgtttgtttaggat

SEQ ID NO: 217259 - DNA, 2423 bp, Zea Mays
gggcgccctgagctccccttcccgctcgtttcattctccggctctcccaccttctccctcccctgcgtatcgaatagaatcaacccgatctcctctccgtcttatcgcctcgaaccgagactccgagagcgctcgagctcgcccgcccgcccactatggaccgcatagagcaatcgcaactagcctgctgcagccccttgtcccggccgggctcagctctgaccgacgtgaaccggggcggcgagacgggctcctcgtcgcagtcgcaatgctccgacgatgatcagtcgtcgagaatcaacttgcttctccaagacagcgagagcctcaccagggatcagatcaacgtggtcgaactctctatcgcggtgcttcaccaggacatcgtccgggcgaggaagttggcaaaaaagctggaaggcattgacatcgacgaactgtggcgagaggtagcacaaatcgaagcatctaagagccccgaggtcgaaatgcttgccggaccgcttcaccacgccgcgcagagtgcgtacaagcccatgtgcaagctccttatcacgcagtgcagatgtgacgtcaatgcttcaacgattgattcctgtatgacacccctgatgtttgcattacatcatgagggaaacaaagccattgttaagtatcttatcaacaaccacgctgatccaaacaaaggagccaactctggaattgctccactccacattgcggcaactgaaggttactatgaaattgtagagtacttgttgtcaagaggagctgatgttgaccccttaagtcaagatggcgaatcaccgttgttctgtgctgttttccacggacatgaaagaatagtgacactccttttgaagcatggtgcagattataacagagtttcaaatctaatggtaacaccactcctcgtgtcccttcatggttcttcattagattgcttagagatactaattgaggctggtgctgatataaatggggctggctgttctgtacctccagtagcgctagctgcttataaaggcttagatggttgcatccagtgtttgttgagaaatggtgctaatcccaacgtgcctgatgaagacaataatatcccaatacaaattgctgcattcaaaggatgggagaaatgcgtggagattcttctccctcacgcaccccatttgccacaatatgaaggcctgagcatctctgaaataatccactgggaaagaaccgagcgcttccgcagaagcagtagtgcaattgaacagggagatgttgcgtactggaaaaaagaacatgatattgcgttgagattctacaatgaagctgctcaggttggtcacgaggtcgcaaccttgtatgcaaagaagagtctttgctatctgcatctgcgtgatccagcaaaatttatcgatgaagcaattaactacataaatatggtgcagccagatttatcgacacttaaccctgagtctgatgctaagaaattggtgctggaatttggtagaacctggaaagcaccggggtctagttcgaggcaggattctggaagtagcccgactaacaaaactggcgaaacatccagcagggagcatcagtgaacatgtggtgttgataagtgctaccgttaggagatcagcacgtgcattgaagtggtaacaagctgggcttccacggaacccttgtggcattgataagtgctaccgttaggagatcagcacatatgctaggagtataggtccagacttggcatcctttgtttttggaggcgagacttattgaactcagttctcttcatttcacgcttttgggcccttttctttcgaggttggttttgcattcaaccagaaagaaccctagtgcttgcaaatacgtttatgtctgagattttggcgaggggatcgcgattcaccactacactggactcaaaatcgtcatccatccatgacccggaacatctgaaaggggtgacgtctatccacttctctctccagggaaaacaaaaggaaaaatatctctacattatcttgcattttcgagcctctgacagagcttcttccccttatcccagccacaaccagcatatgctcaggttggcatataaggtggcatcaagcgggcctttctgtctgtgcttcctgccattaaccatcagagagagctcaatatctcttgatttcctggggttgagctaactggttgtgtggagcatgacactatcatcttgcattagcttaagtgaaacattaacttttcttcttctcttctttaaaagaatgagttgttggttggttggttctatacaggaggaatttctgttgtgtatgcaatatattctctatggacagttgtgcttattggtttctacaagtctttactgaataattagaaaattgtagaactgtgagcaatggctctttgctcaagtttat

SEQ ID NO: 217260 - DNA, 821 bp, Zea Mays
aaccaacccctatccgccccccgtcttttcccttttctctaccctctatctacccaccgttcccgtctctccgccgcttccttggaagacgaagaaaccctcctccaccaccaacccgatccagctacatccgttgagggccaggagcagctagccgtcttcgttcgatccgttcgcaccccccaacgcggcaggaaggagcgtgatggccaagacgagctcgttcaagctggagcaccccctcgagaagaggcaatctgaggctaaccgtatcagagagaagtaccctgacagaattccagtgattgttgagaaggctgagaggagtgatattcctgacatcgacaagaaaaagtacctcgtccctgcagatcttacagtcgggcaattcgtgtatgttgttaggaagagaatcaagctcagtgctgagaaggctatcttcatatttgtgaaaaacacccttccaccaacagctgctctgatgtcttcaatctatgaagagaacaaggacgaggatgggttcctctacatgacttacagtggtgagaacaccttcggactgctctagatggcccgcaatggggtcgccttgcccttgcccatgcctcctgtaaataagacctgccaagcaactgtgtatattctggtttcgtcgtcgcaagtggttgcgctctactgctaaagcctacctatcagttgtggagttgtcgtcgatgttatggacacacttaatcaagtttattaattgactggacctgaatcttgggtcagtaatgtgacatctcctatgtcgtttacggttactggccattgtactccag

SEQ ID NO: 217261 - DNA, 825 bp, Zea Mays
aaccaacccctatccgccccccgtcttttcccttttctctaccctctatctacccaccgttcccgtctctccgccgcttccttggaagacgaagaaaccctcctccaccaccaacccgatccagctacatccgttgaggcccggccaggagcagctagccgtcttcgttcgatccgttcgcaccccccaacgcggcaggaaggagcgtgatggccaagacgagctcgttcaagctggagcaccccctcgagaagaggcaatctgaggctaaccgtatcagagagaagtaccctgacagaattccagtgattgttgagaaggctgagaggagtgatattcctgacatcgacaagaaaaagtacctcgtccctgcagatcttacagtcgggcaattcgtgtatgttgttaggaagagaatcaagctcagtgctgagaaggctatcttcatatttgtgaaaaacacccttccaccaacagctgctctgatgtcttcaatctatgaagagaacaaggacgaggatgggttcctctacatgacttacagtggtgagaacaccttcggactgctctagatggcccgcaatggggtcgccttgcccttgcccatgcctcctgtaaataagacctgccaagcaactgtgtatattctggtttcgtcgtcgcaagtggttgcgctctactgctaaagcctacctatcagttgtggagttgtcgtcgatgttatggacacacttaatcaagtttattaattgactggacctgaatcttgggtcagtaatgtgacatctcctatgtcgtttacggttactggccattgtactccag

SEQ ID NO: 217262 - DNA, 834 bp, Zea Mays
aaccaacccctatccgccccccgtcttttcccttttctctaccctctatctacccaccgttcccgtctctccgccgcttccttggaagacgaagaaaccctcctccaccaccaacccgatccagctacatccgttgaggcccggccaggagcagctagccgtcttcgttcgatccgttcgcaccccccaacgcggttcgatttgcaggaaggagcgtgatggccaagacgagctcgttcaagctggagcaccccctcgagaagaggcaatctgaggctaaccgtatcagagagaagtaccctgacagaattccagtgattgttgagaaggctgagaggagtgatattcctgacatcgacaagaaaaagtacctcgtccctgcagatcttacagtcgggcaattcgtgtatgttgttaggaagagaatcaagctcagtgctgagaaggctatcttcatatttgtgaaaaacacccttccaccaacagctgctctgatgtcttcaatctatgaagagaacaaggacgaggatgggttcctctacatgacttacagtggtgagaacaccttcggactgctctagatggcccgcaatggggtcgccttgcccttgcccatgcctcctgtaaataagacctgccaagcaactgtgtatattctggtttcgtcgtcgcaagtggttgcgctctactgctaaagcctacctatcagttgtggagttgtcgtcgatgttatggacacacttaatcaagtttattaattgactggacctgaatcttgggtcagtaatgtgacatctcctatgtcgtttacggttactggccattgtactccag

SEQ ID NO: 217263 - DNA, 1303 bp, Zea Mays
aaaaggttttggtgcacggttctgcccaggatcctcgtacgcgatacaatgcaagtttgccgaggccgccatcaacgccatcctcccgcaatccccgccgactgccttgcctaccccttccatcctcctccccacccatccgccgactgccttgcctgcctcttccatcctcctccccacccctccttccatcctcgccccgcgcgctccgcacgcgttccatccatgctagcctacagcaacagatgaaattaaaagactttcatgattggtggttctgacaaccctcacttgccacacaaccatgaaacggatcaagttgtgtacactggaacatttgataacgatacagatatgattgccttctcatgttgtgtatatgatggtggtgatgaggagaaggaaatggatgcagccagagaaataggttggagagggaaatttactaagagaggacgtgtaataagaccaggaattattagaatgagtggaaaatgtcctcttacacctttggaggttgggttaatgcttcgtggaatggatttcagcaataagactgcaatctttttggcatctggaaagatttacaaagcagagaagaacatggcttctcttcttgaaatgtttcctctcctacagacaaaagagacactggcatcagaagaggaacttgctccattcaagatggctgctgttgactatagtatttgtgcccaaagtgaagtttttgtgaccacacaaggtggaaatcccgcattttttatgggtcacaggagatacttgtatggtgggcattcaaaaacaattaaaccagacaaaagaaggcttgctgtactcttcaataatccacgtatagggtggacggcattgaagcggcacttgcttaatatgagagcatacagtgatgtcaaggggatcgaaatgaaaagaccaaacgaatctatatataccttcccgtgtcctgactgcatgtgccgcttgaacagaacagaacactcgaaatccaaacagagtagatagtatatttcgtatgtagaccaaatggctaaaaccatccaatattttcatagactgaaaatgcagagaaagcaacaaaggtgtatcaatacagtcgtacaagcttagtatcggatggtttttaatttgtatagcaaagcacgggcacatacctatatatcttttaatgtatgtaaatattcttaacctttaaaagatactaacaagcaggtataacgataattaatgtttctatatcttaatatattttatcattatatgttgattccgtagcaacgcacggtca

SEQ ID NO: 217264 - DNA, 3515 bp, Zea Mays
ccccgttcgacatcagcgctcctccccccgaccaccgtcgatttggtgtctgagccctcgctagatctcgcaccctcaccgaagccctcattggattcgacgccctcactggaggttgcaccgcgatgggatctaggaaccgtagatggcctcgaccacccacgtgggttgttgcctctgcggatgagacgcagcgccaaggggccagaggaaacgacgtgatggacctcatatcacagctcatgtcatggttcatgcctctcatcgcctcccgccgtggttcgccgaggccgccccatgctgcacgccatgggcagcgatgtcgccttcacgaagctcggcatggagtgctaccccaaggaggccaccgctgttggggtcaagggattccccgacatggaaaaataaccgacgacgagatcaatgccgcctccgtcacttgctgccgcatctacctcaggtccgagtctgaacctgattgcagagctgagaacaccttgaagctaggagatgtcatccagtaccatgaatgtggttaccgcattctctataagaagcgggcaccgatccatgtgtagtaccagcaaacttcccattttctatgactccaaggccttatgtcatccagcaatggcagttgccgttcagtttggactatagaattcaattatgagttcagtttgttgatattaaaggaaagatacaggattcatacttaaatacttaacaaggtaagagctctaaatttatgttagtatagtagaagttttttttgttgttgtaaatatcacttgcatatacgccagctagatgctcactatttgtcctctctcaaggtctgaatctgtctgatgttttattcaactgattaactatcatcataaacctgaataacattttgctttgttcatgttcaggattcatacttaaatttatctgatgcaatttttcaactgaacgtgaacttggcaggggtgagtacggagtagtgtacaagcgagttctgcattgagctgtcgtagagagcgtagacagacactctagccaacgttgttggctgggattggaacacaaaagcgagacaagggatgagaagcacaggaggagccaggtgaggtgaggtggcgacacacaggagtcgggcaagctcagctcatctcatctcatgctctactaaaaaggattagcccatctcaagagaaaagagtaacattgtcagcccactgcaataaccacactattaccagtcttgaaattcactttttgtttgtttgtcatagaaccagggattcatgacaggaaatgatctccttctcaagataagaaaattgcatttaagttactaatcagtgtatggtttactagtttggcggaggcctcaatccgggtctagaccaaggtcatggtggcgacgaaggtggaggccgaggtggagggtgatgcttccactctcagtcttggggtggggtcgtggggatgacatatgagagtggggtgcagtggtggctcgtcgacatcagccattggcacccttcccctgcccagttcgatgatgcaccctccctcctactacttcacgatggcaccaccatctccaggtaccgtgccgatggaggaaaggagaaacaaggtattttgaagattaagagtgatgccacatacttagcgatggggtgcttgatatcctagatattgtactagcttcagacctcgccgaattgacaccttcgaagaaatgaagtcgccagattggtaggctttgagtgtttcaccagaggaagtatgtagtgcagttaaggaaggaaatgaacttccatcagacttgatagacacactactaaagtggatcccaagcaatgatgaggagcttaggcttcgactgtcctcccatagcaccgccacaccgcatgcgtccgcggcggcgtccgcctcggcgccggtctcgcacaccgctccctagctggggaagttcatcgcctccgagcccttcaacgtggggggattcgattgggcgatctacttctaccccgatgggaagagcggcgaggatggcgttgtctacgtctcgctcttcatagccctggccagcgaaggcaccgatgtgcgcgcgctgttcgaggtcacgctcgtcgaccagagcggcaaggggcaagacaaggtgcatacccactttgggaggtctctcgagagcgacccatacaccctcaagtaccgcgacagcatgtgatgagtctatgtacaggttgtttcctacggtatgcttatctatggtggaaagaaaaagtgattgactcatacttgaaaagaaaagatggcctttgcccattgacgcctgagacaaccagaaatttgccatgacctcgttcctgaccaagaaaaactgtcaagcacagaatcacagttgatatattgggattccaaggtatcagaggctgatatggatgcaatgtggaaacatcctgatgtgtataaggagtggataaaatctggtgagagacgtggaaatgtacgattctcccatgatgcaaagaacatgccttacctttctcgcgtcgaggtgaaggatatgattgccttctcatgttgtgtatatgatggtggtgatgaggagaaggaaatggatgcagccagagaaataggttggagagggaaatttactaagagaggacgtgtaataagaccaggaattattagaatgagtggaaaatgtcctcttacacctttggaggttgggttaatgcttcgtggaatggatttcagcaataagactgcaatctttttggcatctggaaagatttacaaagcagagaagaacatggcttctcttcttgaaatgtttcctctcctacagacaaaagagacactggcatcagaagaggaacttgctccattcaagatggctgctgttgactatagtatttgtgcccaaagtgaagtttttgtgaccacacaaggtggaaatcccgcattttttatgggtcacaggagatacttgtatggtgggcattcaaaaacaattaaaccagacaaaagaaggcttgctgtactcttcaataatccacgtatagggtggacggcattgaagcggcacttgcttaatatgagagcatacagtgatgtcaaggggatcgaaatgaaaagaccaaacgaatctatatataccttcccgtgtcctgactgcatgtgccgcttgaacagaacagaacactcgaaatccaaacagagtagatagtatatttcgtatgtagaccaaatggctaaaaccatccaatattttcatagactgaaaatgcagagaaagcaacaaaggtgtatcaatacagtcgtacaagcttagtatcggatggtttttaatttgtatagcaaagcacgggcacatacctatatatcttttaatgtatgtaaatattcttaacctttaaaagatactaacaagcaggtataacgataattaatgtttctatatcttaatatattttatcattatatgttgattccgtagcaacgcacggtca

SEQ ID NO: 217265 - DNA, 3676 bp, Zea Mays
ccccgttcgacatcagcgctcctccccccgaccaccgtcgatttggtgtctgagccctcgctagatctcgcaccctcaccgaagccctcattggattcgacgccctcactggaggttgcaccgcgatgggatctaggaaccgtagatggcctcgaccacccacgtgggttgttgcctctgcggatgagacgcagcgccaaggggccagaggaaacgacgtgatggacctcatatcacagctcatgtcatggttcatgcctctcatcgcctcccgccgtggttcgccgaggccgccccatgctgcacgccatgggcagcgatgtcgccttcacgaagctcggcatggagtgctaccccaaggaggccaccgctgttggggtcaagggattccccgacatggaaaaataaccgacgacgagatcaatgccgcctccgtcacttgctgccgcatctacctcaggtccgagtctgaacctgattgcagagctgagaacaccttgaagctaggagatgtcatccagtaccatgaatgtggttaccgcattctctataagaagcgggcaccgatccatgtgtagtaccagcaaacttcccattttctatgactccaaggccttatgtcatccagcaatggcagttgccgttcagtttggactatagaattcaattatgagttcagtttgttgatattaaaggaaagatacaggtcagcctcttttacttaacaaggtaagagctctaaatttatgttagtatagtagaagtttttttgttgtaaatatcacttgcatatacgccagctagatgctcactatttgtcctctctcaaggtctcaatctgtctgatgtttattcaaccgattagctatcatcataaacctgaataacattttgctttgttcatgttcaggattcatacttaaatacttaacaaggtaagagctctaaatttatgttagtatagtagaagttttttttgttgttgtaaatatcacttgcatatacgccagctagatgctcactatttgtcctctctcaaggtctgaatctgtctgatgttttattcaactgattaactatcatcataaacctgaataacattttgctttgttcatgttcaggattcatacttaaatttatctgatgcaatttttcaactgaacgtgaacttggcaggggtgagtacggagtagtgtacaagcgagttctgcattgagctgtcgtagagagcgtagacagacactctagccaacgttgttggctgggattggaacacaaaagcgagacaagggatgagaagcacaggaggagccaggtgaggtgaggtggcgacacacaggagtcgggcaagctcagctcatctcatctcatgctctactaaaaaggattagcccatctcaagagaaaagagtaacattgtcagcccactgcaataaccacactattaccagtcttgaaattcactttttgtttgtttgtcatagaaccagggattcatgacaggaaatgatctccttctcaagataagaaaattgcatttaagttactaatcagtgtatggtttactagtttggcggaggcctcaatccgggtctagaccaaggtcatggtggcgacgaaggtggaggccgaggtggagggtgatgcttccactctcagtcttggggtggggtcgtggggatgacatatgagagtggggtgcagtggtggctcgtcgacatcagccattggcacccttcccctgcccagttcgatgatgcaccctccctcctactacttcacgatggcaccaccatctccagattaagagtgatgccacatacttagcgatggggtgcttgatatcctagatattgtactagcttcagacctcgccgaattgacaccttcgaagaaatgaagtcgccagattggtaggctttgagtgtttcaccagaggaagtatgtagtgcagttaaggaaggaaatgaacttccatcagacttgatagacacactactaaagtggatcccaagcaatgatgaggagcttaggcttcgactgtcctcccatagcaccgccacaccgcatgcgtccgcggcggcgtccgcctcggcgccggtctcgcacaccgctccctagctggggaagttcatcgcctccgagcccttcaacgtggggggattcgattgggcgatctacttctaccccgatgggaagagcggcgaggatggcgttgtctacgtctcgctcttcatagccctggccagcgaaggcaccgatgtgcgcgcgctgttcgaggtcacgctcgtcgaccagagcggcaaggggcaagacaaggtgcatacccactttgggaggtctctcgagagcgacccatacaccctcaagtaccgcgacagcatgtgatgagtctatgtacaggttgtttcctacggtatgcttatctatggtggaaagaaaaagtgattgactcatacttgaaaagaaaagatggcctttgcccattgacgcctgagacaaccagaaatttgccatgacctcgttcctgaccaagaaaaactgtcaagcacagaatcacagttgatatattgggattccaaggtatcagaggctgatatggatgcaatgtggaaacatcctgatgtgtataaggagtggataaaatctggtgagagacgtggaaatgtacgattctcccatgatgcaaagaacatgccttacctttctcgcgtcgaggtgaaggatatgattgccttctcatgttgtgtatatgatggtggtgatgaggagaaggaaatggatgcagccagagaaataggttggagagggaaatttactaagagaggacgtgtaataagaccaggaattattagaatgagtggaaaatgtcctcttacacctttggaggttgggttaatgcttcgtggaatggatttcagcaataagactgcaatctttttggcatctggaaagatttacaaagcagagaagaacatggcttctcttcttgaaatgtttcctctcctacagacaaaagagacactggcatcagaagaggaacttgctccattcaagatggctgctgttgactatagtatttgtgcccaaagtgaagtttttgtgaccacacaaggtggaaatcccgcattttttatgggtcacaggagatacttgtatggtgggcattcaaaaacaattaaaccagacaaaagaaggcttgctgtactcttcaataatccacgtatagggtggacggcattgaagcggcacttgcttaatatgagagcatacagtgatgtcaaggggatcgaaatgaaaagaccaaacgaatctatatataccttcccgtgtcctgactgcatgtgccgcttgaacagaacagaacactcgaaatccaaacagagtagatagtatatttcgtatgtagaccaaatggctaaaaccatccaatattttcatagactgaaaatgcagagaaagcaacaaaggtgtatcaatacagtcgtacaagcttagtatcggatggtttttaatttgtatagcaaagcacgggcacatacctatatatcttttaatgtatgtaaatattcttaacctttaaaagatactaacaagcaggtataacgataattaatgtttctatatcttaatatattttatcattatatgttgattccgtagcaacgcacggtca

SEQ ID NO: 217266 - DNA, 3454 bp, Zea Mays
ccccgttcgacatcagcgctcctccccccgaccaccgtcgatttggtgtctgagccctcgctagatctcgcaccctcaccgaagccctcattggattcgacgccctcactggaggttgcaccgcgatgggatctaggaaccgtagatggcctcgaccacccacgtgggttgttgcctctgcggatgagacgcagcgccaaggggccagaggaaacgacgtgatggacctcatatcacagctcatgtcatggttcatgcctctcatcgcctcccgccgtggttcgccgaggccgccccatgctgcacgccatgggcagcgatgtcgccttcacgaagctcggcatggagtgctaccccaaggaggccaccgctgttggggtcaagggattccccgacatggaaaaataaccgacgacgagatcaatgccgcctccgtcacttgctgccgcatctacctcaggtccgagtctgaacctgattgcagagctgagaacaccttgaagctaggagatgtcatccagtaccatgaatgtggttaccgcattctctataagaagcgggcaccgatccatgtgtagtaccagcaaacttcccattttctatgactccaagcaatggcagttgccgttcagtttggactatagaattcaattatgagttcagtttgttgatattaaaggaaagatacaggtcagcctcttttacttaacaaggtaagagctctaaatttatgttagtatagtagaagtttttttgttgtaaatatcacttgcatatacgccagctagatgctcactatttgtcctctctcaaggtctcaatctgtctgatgtttattcaaccgattagctatcatcataaacctgaataacattttgctttgttcatgttcaggattcatacttaaatacttaacaaggtaagagctctaaatttatgttagtatagtagaagttttttttgttgttgtaaatatcacttgcatatacgccagctagatgctcactatttgtcctctctcaaggtctgaatctgtctgatgttttattcaactgattaactatcatcataaacctgaataacattttgctttgttcatgttcaggattcatacttaaatttatctgatgcaatttttcaactgaacgtgaacttggcaggggtgagtacggagtagtgtacaagcgagttctgcattgagctgtcgtagagagcgtagacagacactctagccaacgttgttggctgggattggaacacaaaagcgagacaagggatgagaagcacaggaggagccaggtgagtttggcggaggcctcaatccgggtctagaccaaggtcatggtggcgacgaaggtggaggccgaggtggagggtgatgcttccactctcagtcttggggtggggtcgtggggatgacatatgagagtggggtgcagtggtggctcgtcgacatcagccattggcacccttcccctgcccagttcgatgatgcaccctccctcctactacttcacgatggcaccaccatctccaggtaccgtgccgatggaggaaaggagaaacaaggtattttgaagattaagagtgatgccacatacttagcgatggggtgcttgatatcctagatattgtactagcttcagacctcgccgaattgacaccttcgaagaaatgaagtcgccagattggtaggctttgagtgtttcaccagaggaagtatgtagtgcagttaaggaaggaaatgaacttccatcagacttgatagacacactactaaagtggatcccaagcaatgatgaggagcttaggcttcgactgtcctcccatagcaccgccacaccgcatgcgtccgcggcggcgtccgcctcggcgccggtctcgcacaccgctccctagctggggaagttcatcgcctccgagcccttcaacgtggggggattcgattgggcgatctacttctaccccgatgggaagagcggcgaggatggcgttgtctacgtctcgctcttcatagccctggccagcgaaggcaccgatgtgcgcgcgctgttcgaggtcacgctcgtcgaccagagcggcaaggggcaagacaaggtgcatacccactttgggaggtctctcgagagcgacccatacaccctcaagtaccgcgacagcatgtgatgagtctatgtacaggttgtttcctacggtatgcttatctatggtggaaagaaaaagtgattgactcatacttgaaaagaaaagatggcctttgcccattgacgcctgagacaaccagaaatttgccatgacctcgttcctgaccaagaaaaactgtcaagcacagaatcacagttgatatattgggattccaaggtatcagaggctgatatggatgcaatgtggaaacatcctgatgtgtataaggagtggataaaatctggtgagagacgtggaaatgtacgattctcccatgatgcaaagaacatgccttacctttctcgcgtcgaggtgaaggatatgattgccttctcatgttgtgtatatgatggtggtgatgaggagaaggaaatggatgcagccagagaaataggttggagagggaaatttactaagagaggacgtgtaataagaccaggaattattagaatgagtggaaaatgtcctcttacacctttggaggttgggttaatgcttcgtggaatggatttcagcaataagactgcaatctttttggcatctggaaagatttacaaagcagagaagaacatggcttctcttcttgaaatgtttcctctcctacagacaaaagagacactggcatcagaagaggaacttgctccattcaagatggctgctgttgactatagtatttgtgcccaaagtgaagtttttgtgaccacacaaggtggaaatcccgcattttttatgggtcacaggagatacttgtatggtgggcattcaaaaacaattaaaccagacaaaagaaggcttgctgtactcttcaataatccacgtatagggtggacggcattgaagcggcacttgcttaatatgagagcatacagtgatgtcaaggggatcgaaatgaaaagaccaaacgaatctatatataccttcccgtgtcctgactgcatgtgccgcttgaacagaacagaacactcgaaatccaaacagagtagatagtatatttcgtatgtagaccaaatggctaaaaccatccaatattttcatagactgaaaatgcagagaaagcaacaaaggtgtatcaatacagtcgtacaagcttagtatcggatggtttttaatttgtatagcaaagcacgggcacatacctatatatcttttaatgtatgtaaatattcttaacctttaaaagatactaacaagcaggtataacgataattaatgtttctatatcttaatatattttatcattatatgttgattccgtagcaacgcacggtca

SEQ ID NO: 217267 - DNA, 3164 bp, Zea Mays
cgtccacagggggcgacacccgtgaccctgcccccgttcgacatcagcgctcctccccccgaccaccgtcgatttggtgtctgagccctcgctagatctcgcaccctcaccgaagccctcattggattcgacgccctcactggaggttgcaccgcgatgggatctaggaaccgtagatggcctcgaccacccacgtgggttgttgcctctgcggatgagacgcagcgccaaggggccagaggaaacgacgtgatggacctcatatcacagctcatgtcatggttcatgcctctcatcgcctcccgccgtggttcgccgaggccgccccatgctgcacgccatgggcagcgatgtcgccttcacgaagctcggcatggagtgctaccccaaggaggccaccgctgttggggtcaagggattccccgacatggaaaaataaccgacgacgagatcaatgccgcctccgtcacttgctgccgcatctacctcaggtccgagtctgaacctggtatatcgcaagttcttcggcgggtactgcaactgctcataccatgattgcagagctgagaacaccttgaagctaggagatgtcatccagtaccatgaatgtggttaccgcattctctataagaagcgggcaccgatccatgtgtagtaccagcaaacttcccattttctatgactccaagcaatggcagttgccgttcagtttggactatagaattcaattatgagttcagtttgttgatattaaaggaaagatacaggtcagcctcttttacttaacaaggattcatacttaaatacttaacaaggattcatacttaaatttatctgatgcaatttttcaactgaacgtgaacttggcaggggtgagtacggagtagtgtacaagcgagttctgcattgagctgtcgtagagagcgtagacagacactctagccaacgttgttggctgggattggaacacaaaagcgagacaagggatgagaagcacaggaggagccaggtgagtttggcggaggcctcaatccgggtctagaccaaggtcatggtggcgacgaaggtggaggccgaggtggagggtgatgcttccactctcagtcttggggtggggtcgtggggatgacatatgagagtggggtgcagtggtggctcgtcgacatcagccattggcacccttcccctgcccagttcgatgatgcaccctccctcctactacttcacgatggcaccaccatctccaggtaccgtgccgatggaggaaaggagaaacaaggtattttgaagattaagagtgatgccacatacttagcgatggggtgcttgatatcctagatattgtactagcttcagacctcgccgaattgacaccttcgaagaaatgaagtcgccagattggtaggctttgagtgtttcaccagaggaagtatgtagtgcagttaaggaaggaaatgaacttccatcagacttgatagacacactactaaagtggatcccaagcaatgatgaggagcttaggcttcgactgtcctcccatagcaccgccacaccgcatgcgtccgcggcggcgtccgcctcggcgccggtctcgcacaccgctccctagctggggaagttcatcgcctccgagcccttcaacgtggggggattcgattgggcgatctacttctaccccgatgggaagagcggcgaggatggcgttgtctacgtctcgctcttcatagccctggccagcgaaggcaccgatgtgcgcgcgctgttcgaggtcacgctcgtcgaccagagcggcaaggggcaagacaaggtgcatacccactttgggaggtctctcgagagcgacccatacaccctcaagtaccgcgacagcatgtgatgagtctatgtacaggttgtttcctacggtatgcttatctatggtggaaagaaaaagtgattgactcatacttgaaaagaaaagatggcctttgcccattgacgcctgagacaaccagaaatttgccatgacctcgttcctgaccaagaaaaactgtcaagcacagaatcacagttgatatattgggattccaaggtatcagaggctgatatggatgcaatgtggaaacatcctgatgtgtataaggagtggataaaatctggtgagagacgtggaaatgtacgattctcccatgatgcaaagaacatgccttacctttctcgcgtcgaggtgaaggatatgattgccttctcatgttgtgtatatgatggtggtgatgaggagaaggaaatggatgcagccagagaaataggttggagagggaaatttactaagagaggacgtgtaataagaccaggaattattagaatgagtggaaaatgtcctcttacacctttggaggttgggttaatgcttcgtggaatggatttcagcaataagactgcaatctttttggcatctggaaagatttacaaagcagagaagaacatggcttctcttcttgaaatgtttcctctcctacagacaaaagagacactggcatcagaagaggaacttgctccattcaagatggctgctgttgactatagtatttgtgcccaaagtgaagtttttgtgaccacacaaggtggaaatcccgcattttttatgggtcacaggagatacttgtatggtgggcattcaaaaacaattaaaccagacaaaagaaggcttgctgtactcttcaataatccacgtatagggtggacggcattgaagcggcacttgcttaatatgagagcatacagtgatgtcaaggggatcgaaatgaaaagaccaaacgaatctatatataccttcccgtgtcctgactgcatgtgccgcttgaacagaacagaacactcgaaatccaaacagagtagatagtatatttcgtatgtagaccaaatggctaaaaccatccaatattttcatagactgaaaatgcagagaaagcaacaaaggtgtatcaatacagtcgtacaagcttagtatcggatggtttttaatttgtatagcaaagcacgggcacatacctatatatcttttaatgtatgtaaatattcttaacctttaaaagatactaacaagcaggtataacgataattaatgtttctatatcttaatatattttatcattatatgttgattccgtagcaacgcacggtca

SEQ ID NO: 217268 - DNA, 3549 bp, Zea Mays
ggcgtccacagggggcgacacccgtgaccctgcccccgttcgacatcagcgctcctccccccgaccaccgtcgatttggtgtctgagccctcgctagatctcgcaccctcaccgaagccctcattggattcgacgccctcactggaggttgcaccgcgatgggatctaggaaccgtagatggcctcgaccacccacgtgggttgttgcctctgcggatgagacgcagcgccaaggggccagaggaaacgacgtgatggacctcatatcacagctcatgtcatggttcatgcctctcatcgcctcccgccgtggttcgccgaggccgccccatgctgcacgccatgggcagcgatgtcgccttcacgaagctcggcatggagtgctaccccaaggaggccaccgctgttggggtcaagggattccccgacatggaaaaataaccgacgacgagatcaatgccgcctccgtcacttgctgccgcatctacctcaggtccgagtctgaacctggtatatcgcaagttcttcggcgggtactgcaactgctcataccatgattgcagagctgagaacaccttgaagctaggagatgtcatccagtaccatgaatgtggttaccgcattctctataagaagcgggcaccgatccatgtgtagtaccagcaaacttcccattttctatgactccaaggccttatgtcatccagcaatggcagttgccgttcagtttggactatagaattcaattatgagttcagtttgttgatattaaaggaaagatacaggtcagcctcttttacttaacaaggtaagagctctaaatttatgttagtatagtagaagtttttttgttgtaaatatcacttgcatatacgccagctagatgctcactatttgtcctctctcaaggtctcaatctgtctgatgtttattcaaccgattagctatcatcataaacctgaataacattttgctttgttcatgttcaggattcatacttaaatacttaacaaggtaagagctctaaatttatgttagtatagtagaagttttttttgttgttgtaaatatcacttgcatatacgccagctagatgctcactatttgtcctctctcaaggtctgaatctgtctgatgttttattcaactgattaactatcatcataaacctgaataacattttgctttgttcatgttcaggattcatacttaaatttatctgatgcaatttttcaactgaacgtgaacttggcaggggtgagtacggagtagtgtacaagcgagttctgcattgagctgtcgtagagagcgtagacagacactctagccaacgttgttggctgggattggaacacaaaagcgagacaagggatgagaagcacaggaggagccaggtgagtttggcggaggcctcaatccgggtctagaccaaggtcatggtggcgacgaaggtggaggccgaggtggagggtgatgcttccactctcagtcttggggtggggtcgtggggatgacatatgagagtggggtgcagtggtggctcgtcgacatcagccattggcacccttcccctgcccagttcgatgatgcaccctccctcctactacttcacgatggcaccaccatctccaggtaccgtgccgatggaggaaaggagaaacaaggtattttgaagattaagagtgatgccacatacttagcgatggggtgcttgatatcctagatattgtactagcttcagacctcgccgaattgacaccttcgaagaaatgaagtcgccagattggtaggctttgagtgtttcaccagaggaagtatgtagtgcagttaaggaaggaaatgaacttccatcagacttgatagacacactactaaagtggatcccaagcaatgatgaggagcttaggcttcgactgtcctcccatagcaccgccacaccgcatgcgtccgcggcggcgtccgcctcggcgccggtctcgcacaccgctccctagctggggaagttcatcgcctccgagcccttcaacgtggggggattcgattgggcgatctacttctaccccgatgggaagagcggcgaggatggcgttgtctacgtctcgctcttcatagccctggccagcgaaggcaccgatgtgcgcgcgctgttcgaggtcacgctcgtcgaccagagcggcaaggggcaagacaaggtgcatacccactttgggaggtctctcgagagcgacccatacaccctcaagtaccgcgacagcatgtgatgagtctatgtacaggttgtttcctacggtatgcttatctatggtggaaagaaaaagtgattgactcatacttgaaaagaaaagatggcctttgcccattgacgcctgagacaaccagaaatttgccatgacctcgttcctgaccaagaaaaactgtcaagcacagaatcacagttgatatattgggattccaaggtatcagaggctgatatggatgcaatgtggaaacatcctgatgtgtataaggagtggataaaatctggtgagagacgtggaaatgtacgattctcccatgatgcaaagaacatgccttacctttctcgcgtcgaggtgaaggatatgattgccttctcatgttgtgtatatgatggtggtgatgaggagaaggaaatggatgcagccagagaaataggttggagagggaaatttactaagagaggacgtgtaataagaccaggaattattagaatgagtggaaaatgtcctcttacacctttggaggttgggttaatgcttcgtggaatggatttcagcaataagactgcaatctttttggcatctggaaagatttacaaagcagagaagaacatggcttctcttcttgaaatgtttcctctcctacagacaaaagagacactggcatcagaagaggaacttgctccattcaagatggctgctgttgactatagtatttgtgcccaaagtgaagtttttgtgaccacacaaggtggaaatcccgcattttttatgggtcacaggagatacttgtatggtgggcattcaaaaacaattaaaccagacaaaagaaggcttgctgtactcttcaataatccacgtatagggtggacggcattgaagcggcacttgcttaatatgagagcatacagtgatgtcaaggggatcgaaatgaaaagaccaaacgaatctatatataccttcccgtgtcctgactgcatgtgccgcttgaacagaacagaacactcgaaatccaaacagagtagatagtatatttcgtatgtagaccaaatggctaaaaccatccaatattttcatagactgaaaatgcagagaaagcaacaaaggtgtatcaatacagtcgtacaagcttagtatcggatggtttttaatttgtatagcaaagcacgggcacatacctatatatcttttaatgtatgtaaatattcttaacctttaaaagatactaacaagcaggtataacgataattaatgtttctatatcttaatatattttatcattatatgttgattccgtagcaacgcacggtca

SEQ ID NO: 217269 - DNA, 3373 bp, Zea Mays
tggaggcgtccacagggggcgacacccgtgaccctgcccccgttcgacatcagcgctcctccccccgaccaccgtcgatttggtgtctgagccctcgctagatctcgcaccctcaccgaagccctcattggattcgacgccctcactggaggttgcaccgcgatgggatctaggaaccgtagatggcctcgaccacccacgtgggttgttgcctctgcggatgagacgcagcgccaaggggccagaggaaacgacgtgatggacctcatatcacagctcatgtcatggttcatgcctctcatcgcctcccgccgtggttcgccgaggccgccccatgctgcacgccatgggcagcgatgtcgccttcacgaagctcggcatggagtgctaccccaaggaggccaccgctgttggggtcaagggattccccgacatggaaaaataaccgacgacgagatcaatgccgcctccgtcacttgctgccgcatctacctcaggtccgagtctgaacctgattgcagagctgagaacaccttgaagctaggagatgtcatccagtaccatgaatgtggttaccgcattctctataagaagcgggcaccgatccatgtgtagtaccagcaaacttcccattttctatgactccaagcaatggcagttgccgttcagtttggactatagaattcaattatgagttcagtttgttgatattaaaggaaagatacaggtcagcctcttttacttaacaaggattcatacttaaatacttaacaaggattcatacttaaatttatctgatgcaatttttcaactgaacgtgaacttggcaggggtgagtacggagtagtgtacaagcgagttctgcattgagctgtcgtagagagcgtagacagacactctagccaacgttgttggctgggattggaacacaaaagcgagacaagggatgagaagcacaggaggagccaggtgaggtgaggtggcgacacacaggagtcgggcaagctcagctcatctcatctcatgctctactaaaaaggattagcccatctcaagagaaaagagtaacattgtcagcccactgcaataaccacactattaccagtcttgaaattcactttttgtttgtttgtcatagaaccagggattcatgacaggaaatgatctccttctcaagataagaaaattgcatttaagttactaatcagtgtatggtttactagtttggcggaggcctcaatccgggtctagaccaaggtcatggtggcgacgaaggtggaggccgaggtggagggtgatgcttccactctcagtcttggggtggggtcgtggggatgacatatgagagtggggtgcagtggtggctcgtcgacatcagccattggcacccttcccctgcccagttcgatgatgcaccctccctcctactacttcacgatggcaccaccatctccaggtaccgtgccgatggaggaaaggagaaacaaggtattttgaagattaagagtgatgccacatacttagcgatggggtgcttgatatcctagatattgtactagcttcagacctcgccgaattgacaccttcgaagaaatgaagtcgccagattggtaggctttgagtgtttcaccagaggaagtatgtagtgcagttaaggaaggaaatgaacttccatcagacttgatagacacactactaaagtggatcccaagcaatgatgaggagcttaggcttcgactgtcctcccatagcaccgccacaccgcatgcgtccgcggcggcgtccgcctcggcgccggtctcgcacaccgctccctagctggggaagttcatcgcctccgagcccttcaacgtggggggattcgattgggcgatctacttctaccccgatgggaagagcggcgaggatggcgttgtctacgtctcgctcttcatagccctggccagcgaaggcaccgatgtgcgcgcgctgttcgaggtcacgctcgtcgaccagagcggcaaggggcaagacaaggtgcatacccactttgggaggtctctcgagagcgacccatacaccctcaagtaccgcgacagcatgtgatgagtctatgtacaggttgtttcctacggtatgcttatctatggtggaaagaaaaagtgattgactcatacttgaaaagaaaagatggcctttgcccattgacgcctgagacaaccagaaatttgccatgacctcgttcctgaccaagaaaaactgtcaagcacagaatcacagttgatatattgggattccaaggtatcagaggctgatatggatgcaatgtggaaacatcctgatgtgtataaggagtggataaaatctggtgagagacgtggaaatgtacgattctcccatgatgcaaagaacatgccttacctttctcgcgtcgaggtgaaggatatgattgccttctcatgttgtgtatatgatggtggtgatgaggagaaggaaatggatgcagccagagaaataggttggagagggaaatttactaagagaggacgtgtaataagaccaggaattattagaatgagtggaaaatgtcctcttacacctttggaggttgggttaatgcttcgtggaatggatttcagcaataagactgcaatctttttggcatctggaaagatttacaaagcagagaagaacatggcttctcttcttgaaatgtttcctctcctacagacaaaagagacactggcatcagaagaggaacttgctccattcaagatggctgctgttgactatagtatttgtgcccaaagtgaagtttttgtgaccacacaaggtggaaatcccgcattttttatgggtcacaggagatacttgtatggtgggcattcaaaaacaattaaaccagacaaaagaaggcttgctgtactcttcaataatccacgtatagggtggacggcattgaagcggcacttgcttaatatgagagcatacagtgatgtcaaggggatcgaaatgaaaagaccaaacgaatctatatataccttcccgtgtcctgactgcatgtgccgcttgaacagaacagaacactcgaaatccaaacagagtagatagtatatttcgtatgtagaccaaatggctaaaaccatccaatattttcatagactgaaaatgcagagaaagcaacaaaggtgtatcaatacagtcgtacaagcttagtatcggatggtttttaatttgtatagcaaagcacgggcacatacctatatatcttttaatgtatgtaaatattcttaacctttaaaagatactaacaagcaggtataacgataattaatgtttctatatcttaatatattttatcattatatgttgattccgtagcaacgcacggtca

SEQ ID NO: 217270 - DNA, 3437 bp, Zea Mays
gctggaggcgtccacagggggcgacacccgtgaccctgcccccgttcgacatcagcgctcctccccccgaccaccgtcgatttggtgtctgagccctcgctagatctcgcaccctcaccgaagccctcattggattcgacgccctcactggaggttgcaccgcgatgggatctaggaaccgtagatggcctcgaccacccacgtgggttgttgcctctgcggatgagacgcagcgccaaggggccagaggaaacgacgtgatggacctcatatcacagctcatgtcatggttcatgcctctcatcgcctcccgccgtggttcgccgaggccgccccatgctgcacgccatgggcagcgatgtcgccttcacgaagctcggcatggagtgctaccccaaggaggccaccgctgttggggtcaagggattccccgacatggaaaaataaccgacgacgagatcaatgccgcctccgtcacttgctgccgcatctacctcaggtccgagtctgaacctggtatatcgcaagttcttcggcgggtactgcaactgctcataccatgattgcagagctgagaacaccttgaagctaggagatgtcatccagtaccatgaatgtggttaccgcattctctataagaagcgggcaccgatccatgtgtagtaccagcaaacttcccattttctatgactccaaggccttatgtcatccagcaatggcagttgccgttcagtttggactatagaattcaattatgagttcagtttgttgatattaaaggaaagatacaggtcagcctcttttacttaacaaggattcatacttaaatacttaacaaggattcatacttaaatttatctgatgcaatttttcaactgaacgtgaacttggcaggggtgagtacggagtagtgtacaagcgagttctgcattgagctgtcgtagagagcgtagacagacactctagccaacgttgttggctgggattggaacacaaaagcgagacaagggatgagaagcacaggaggagccaggtgaggtgaggtggcgacacacaggagtcgggcaagctcagctcatctcatctcatgctctactaaaaaggattagcccatctcaagagaaaagagtaacattgtcagcccactgcaataaccacactattaccagtcttgaaattcactttttgtttgtttgtcatagaaccagggattcatgacaggaaatgatctccttctcaagataagaaaattgcatttaagttactaatcagtgtatggtttactagtttggcggaggcctcaatccgggtctagaccaaggtcatggtggcgacgaaggtggaggccgaggtggagggtgatgcttccactctcagtcttggggtggggtcgtggggatgacatatgagagtggggtgcagtggtggctcgtcgacatcagccattggcacccttcccctgcccagttcgatgatgcaccctccctcctactacttcacgatggcaccaccatctccaggtaccgtgccgatggaggaaaggagaaacaaggtattttgaagattaagagtgatgccacatacttagcgatggggtgcttgatatcctagatattgtactagcttcagacctcgccgaattgacaccttcgaagaaatgaagtcgccagattggtaggctttgagtgtttcaccagaggaagtatgtagtgcagttaaggaaggaaatgaacttccatcagacttgatagacacactactaaagtggatcccaagcaatgatgaggagcttaggcttcgactgtcctcccatagcaccgccacaccgcatgcgtccgcggcggcgtccgcctcggcgccggtctcgcacaccgctccctagctggggaagttcatcgcctccgagcccttcaacgtggggggattcgattgggcgatctacttctaccccgatgggaagagcggcgaggatggcgttgtctacgtctcgctcttcatagccctggccagcgaaggcaccgatgtgcgcgcgctgttcgaggtcacgctcgtcgaccagagcggcaaggggcaagacaaggtgcatacccactttgggaggtctctcgagagcgacccatacaccctcaagtaccgcgacagcatgtgatgagtctatgtacaggttgtttcctacggtatgcttatctatggtggaaagaaaaagtgattgactcatacttgaaaagaaaagatggcctttgcccattgacgcctgagacaaccagaaatttgccatgacctcgttcctgaccaagaaaaactgtcaagcacagaatcacagttgatatattgggattccaaggtatcagaggctgatatggatgcaatgtggaaacatcctgatgtgtataaggagtggataaaatctggtgagagacgtggaaatgtacgattctcccatgatgcaaagaacatgccttacctttctcgcgtcgaggtgaaggatatgattgccttctcatgttgtgtatatgatggtggtgatgaggagaaggaaatggatgcagccagagaaataggttggagagggaaatttactaagagaggacgtgtaataagaccaggaattattagaatgagtggaaaatgtcctcttacacctttggaggttgggttaatgcttcgtggaatggatttcagcaataagactgcaatctttttggcatctggaaagatttacaaagcagagaagaacatggcttctcttcttgaaatgtttcctctcctacagacaaaagagacactggcatcagaagaggaacttgctccattcaagatggctgctgttgactatagtatttgtgcccaaagtgaagtttttgtgaccacacaaggtggaaatcccgcattttttatgggtcacaggagatacttgtatggtgggcattcaaaaacaattaaaccagacaaaagaaggcttgctgtactcttcaataatccacgtatagggtggacggcattgaagcggcacttgcttaatatgagagcatacagtgatgtcaaggggatcgaaatgaaaagaccaaacgaatctatatataccttcccgtgtcctgactgcatgtgccgcttgaacagaacagaacactcgaaatccaaacagagtagatagtatatttcgtatgtagaccaaatggctaaaaccatccaatattttcatagactgaaaatgcagagaaagcaacaaaggtgtatcaatacagtcgtacaagcttagtatcggatggtttttaatttgtatagcaaagcacgggcacatacctatatatcttttaatgtatgtaaatattcttaacctttaaaagatactaacaagcaggtataacgataattaatgtttctatatcttaatatattttatcattatatgttgattccgtagcaacgcacggtca

SEQ ID NO: 217271 - DNA, 3425 bp, Zea Mays
aggcgctggaggcgtccacagggggcgacacccgtgaccctgcccccgttcgacatcagcgctcctccccccgaccaccgtcgatttggtgtctgagccctcgctagatctcgcaccctcaccgaagccctcattggattcgacgccctcactggaggttgcaccgcgatgggatctaggaaccgtagatggcctcgaccacccacgtgggttgttgcctctgcggatgagacgcagcgccaaggggccagaggaaacgacgtgatggacctcatatcacagctcatgtcatggttcatgcctctcatcgcctcccgccgtggttcgccgaggccgccccatgctgcacgccatgggcagcgatgtcgccttcacgaagctcggcatggagtgctaccccaaggaggccaccgctgttggggtcaagggattccccgacatggaaaaataaccgacgacgagatcaatgccgcctccgtcacttgctgccgcatctacctcaggtccgagtctgaacctggtatatcgcaagttcttcggcgggtactgcaactgctcataccatgattgcagagctgagaacaccttgaagctaggagatgtcatccagtaccatgaatgtggttaccgcattctctataagaagcgggcaccgatccatgtgtagtaccagcaaacttcccattttctatgactccaagcaatggcagttgccgttcagtttggactatagaattcaattatgagttcagtttgttgatattaaaggaaagatacaggtcagcctcttttacttaacaaggattcatacttaaatacttaacaaggattcatacttaaatttatctgatgcaatttttcaactgaacgtgaacttggcaggggtgagtacggagtagtgtacaagcgagttctgcattgagctgtcgtagagagcgtagacagacactctagccaacgttgttggctgggattggaacacaaaagcgagacaagggatgagaagcacaggaggagccaggtgaggtgaggtggcgacacacaggagtcgggcaagctcagctcatctcatctcatgctctactaaaaaggattagcccatctcaagagaaaagagtaacattgtcagcccactgcaataaccacactattaccagtcttgaaattcactttttgtttgtttgtcatagaaccagggattcatgacaggaaatgatctccttctcaagataagaaaattgcatttaagttactaatcagtgtatggtttactagtttggcggaggcctcaatccgggtctagaccaaggtcatggtggcgacgaaggtggaggccgaggtggagggtgatgcttccactctcagtcttggggtggggtcgtggggatgacatatgagagtggggtgcagtggtggctcgtcgacatcagccattggcacccttcccctgcccagttcgatgatgcaccctccctcctactacttcacgatggcaccaccatctccaggtaccgtgccgatggaggaaaggagaaacaaggtattttgaagattaagagtgatgccacatacttagcgatggggtgcttgatatcctagatattgtactagcttcagacctcgccgaattgacaccttcgaagaaatgaagtcgccagattggtaggctttgagtgtttcaccagaggaagtatgtagtgcagttaaggaaggaaatgaacttccatcagacttgatagacacactactaaagtggatcccaagcaatgatgaggagcttaggcttcgactgtcctcccatagcaccgccacaccgcatgcgtccgcggcggcgtccgcctcggcgccggtctcgcacaccgctccctagctggggaagttcatcgcctccgagcccttcaacgtggggggattcgattgggcgatctacttctaccccgatgggaagagcggcgaggatggcgttgtctacgtctcgctcttcatagccctggccagcgaaggcaccgatgtgcgcgcgctgttcgaggtcacgctcgtcgaccagagcggcaaggggcaagacaaggtgcatacccactttgggaggtctctcgagagcgacccatacaccctcaagtaccgcgacagcatgtgatgagtctatgtacaggttgtttcctacggtatgcttatctatggtggaaagaaaaagtgattgactcatacttgaaaagaaaagatggcctttgcccattgacgcctgagacaaccagaaatttgccatgacctcgttcctgaccaagaaaaactgtcaagcacagaatcacagttgatatattgggattccaaggtatcagaggctgatatggatgcaatgtggaaacatcctgatgtgtataaggagtggataaaatctggtgagagacgtggaaatgtacgattctcccatgatgcaaagaacatgccttacctttctcgcgtcgaggtgaaggatatgattgccttctcatgttgtgtatatgatggtggtgatgaggagaaggaaatggatgcagccagagaaataggttggagagggaaatttactaagagaggacgtgtaataagaccaggaattattagaatgagtggaaaatgtcctcttacacctttggaggttgggttaatgcttcgtggaatggatttcagcaataagactgcaatctttttggcatctggaaagatttacaaagcagagaagaacatggcttctcttcttgaaatgtttcctctcctacagacaaaagagacactggcatcagaagaggaacttgctccattcaagatggctgctgttgactatagtatttgtgcccaaagtgaagtttttgtgaccacacaaggtggaaatcccgcattttttatgggtcacaggagatacttgtatggtgggcattcaaaaacaattaaaccagacaaaagaaggcttgctgtactcttcaataatccacgtatagggtggacggcattgaagcggcacttgcttaatatgagagcatacagtgatgtcaaggggatcgaaatgaaaagaccaaacgaatctatatataccttcccgtgtcctgactgcatgtgccgcttgaacagaacagaacactcgaaatccaaacagagtagatagtatatttcgtatgtagaccaaatggctaaaaccatccaatattttcatagactgaaaatgcagagaaagcaacaaaggtgtatcaatacagtcgtacaagcttagtatcggatggtttttaatttgtatagcaaagcacgggcacatacctatatatcttttaatgtatgtaaatattcttaacctttaaaagatactaacaagcaggtataacgataattaatgtttctatatcttaatatattttatcattatatgttgattccgtagcaacgcacggtca

SEQ ID NO: 217272 - DNA, 3673 bp, Zea Mays
caggcgctggaggcgtccacagggggcgacacccgtgaccctgcccccgttcgacatcagcgctcctccccccgaccaccgtcgatttggtgtctgagccctcgctagatctcgcaccctcaccgaagccctcattggattcgacgccctcactggaggttgcaccgcgatgggatctaggaaccgtagatggcctcgaccacccacgtgggttgttgcctctgcggatgagacgcagcgccaaggggccagaggaaacgacgtgatggacctcatatcacagctcatgtcatggttcatgcctctcatcgcctcccgccgtggttcgccgaggccgccccatgctgcacgccatgggcagcgatgtcgccttcacgaagctcggcatggagtgctaccccaaggaggccaccgctgttggggtcaagggattccccgacatggaaaaataaccgacgacgagatcaatgccgcctccgtcacttgctgccgcatctacctcaggtccgagtctgaacctggtatatcgcaagttcttcggcgggtactgcaactgctcataccatgattgcagagctgagaacaccttgaagctaggagatgtcatccagtaccatgaatgtggttaccgcattctctataagaagcgggcaccgatccatgtgtagtaccagcaaacttcccattttctatgactccaaggccttatgtcatccagcaatggcagttgccgttcagtttggactatagaattcaattatgagttcagtttgttgatattaaaggaaagatacaggtcagcctcttttacttaacaaggtaagagctctaaatttatgttagtatagtagaagtttttttgttgtaaatatcacttgcatatacgccagctagatgctcactatttgtcctctctcaaggtctcaatctgtctgatgtttattcaaccgattagctatcatcataaacctgaataacattttgctttgttcatgttcaggattcatacttaaatacttaacaaggtaagagctctaaatttatgttagtatagtagaagttttttttgttgttgtaaatatcacttgcatatacgccagctagatgctcactatttgtcctctctcaaggtctgaatctgtctgatgttttattcaactgattaactatcatcataaacctgaataacattttgctttgttcatgttcaggattcatacttaaatttatctgatgcaatttttcaactgaacgtgaacttggcaggggtgagtacggagtagtgtacaagcgagttctgcattgagctgtcgtagagagcgtagacagacactctagccaacgttgttggctgggattggaacacaaaagcgagacaagggatgagaagcacaggaggagccaggtgaggtgaggtggcgacacacaggagtcgggcaagctcagctcatctcatctcatgctctactaaaaaggattagcccatctcaagagaaaagagtaacatttttggcggaggcctcaatccgggtctagaccaaggtcatggtggcgacgaaggtggaggccgaggtggagggtgatgcttccactctcagtcttggggtggggtcgtggggatgacatatgagagtggggtgcagtggtggctcgtcgacatcagccattggcacccttcccctgcccagttcgatgatgcaccctccctcctactacttcacgatggcaccaccatctccaggtaccgtgccgatggaggaaaggagaaacaaggtattttgaagattaagagtgatgccacatacttagcgatggggtgcttgatatcctagatattgtactagcttcagacctcgccgaattgacaccttcgaagaaatgaagtcgccagattggtaggctttgagtgtttcaccagaggaagtatgtagtgcagttaaggaaggaaatgaacttccatcagacttgatagacacactactaaagtggatcccaagcaatgatgaggagcttaggcttcgactgtcctcccatagcaccgccacaccgcatgcgtccgcggcggcgtccgcctcggcgccggtctcgcacaccgctccctagctggggaagttcatcgcctccgagcccttcaacgtggggggattcgattgggcgatctacttctaccccgatgggaagagcggcgaggatggcgttgtctacgtctcgctcttcatagccctggccagcgaaggcaccgatgtgcgcgcgctgttcgaggtcacgctcgtcgaccagagcggcaaggggcaagacaaggtgcatacccactttgggaggtctctcgagagcgacccatacaccctcaagtaccgcgacagcatgtgatgagtctatgtacaggttgtttcctacggtatgcttatctatggtggaaagaaaaagtgattgactcatacttgaaaagaaaagatggcctttgcccattgacgcctgagacaaccagaaatttgccatgacctcgttcctgaccaagaaaaactgtcaagcacagaatcacagttgatatattgggattccaaggtatcagaggctgatatggatgcaatgtggaaacatcctgatgtgtataaggagtggataaaatctggtgagagacgtggaaatgtacgattctcccatgatgcaaagaacatgccttacctttctcgcgtcgaggtgaaggatatgattgccttctcatgttgtgtatatgatggtggtgatgaggagaaggaaatggatgcagccagagaaataggttggagagggaaatttactaagagaggacgtgtaataagaccaggaattattagaatgagtggaaaatgtcctcttacacctttggaggttgggttaatgcttcgtggaatggatttcagcaataagactgcaatctttttggcatctggaaagatttacaaagcagagaagaacatggcttctcttcttgaaatgtttcctctcctacagacaaaagagacactggcatcagaagaggaacttgctccattcaagaatttctccttctagatggctgctgttgactatagtatttgtgcccaaagtgaagtttttgtgaccacacaaggtggaaatcccgcattttttatgggtcacaggagatacttgtatggtgggcattcaaaaacaattaaaccagacaaaagaaggcttgctgtactcttcaataatccacgtatagggtggacggcattgaagcggcacttgcttaatatgagagcatacagtgatgtcaaggggatcgaaatgaaaagaccaaacgaatctatatataccttcccgtgtcctgactgcatgtgccgcttgaacagaacagaacactcgaaatccaaacagagtagatagtatatttcgtatgtagaccaaatggctaaaaccatccaatattttcatagactgaaaatgcagagaaagcaacaaaggtgtatcaatacagtcgtacaagcttagtatcggatggtttttaatttgtatagcaaagcacgggcacatacctatatatcttttaatgtatgtaaatattcttaacctttaaaagatactaacaagcaggtataacgataattaatgtttctatatcttaatatattttatcattatatgttgattccgtagcaacgcacggtca

SEQ ID NO: 217273 - DNA, 3533 bp, Zea Mays
gtggcgcaggcgctggaggcgtccacagggggcgacacccgtgaccctgcccccgttcgacatcagcgctcctccccccgaccaccgtcgatttggtgtctgagccctcgctagatctcgcaccctcaccgaagccctcattggattcgacgccctcactggaggttgcaccgcgatgggatctaggaaccgtagatggcctcgaccacccacgtgggttgttgcctctgcggatgagacgcagcgccaaggggccagaggaaacgacgtgatggacctcatatcacagctcatgtcatggttcatgcctctcatcgcctcccgccgtggttcgccgaggccgccccatgctgcacgccatgggcagcgatgtcgccttcacgaagctcggcatggagtgctaccccaaggaggccaccgctgttggggtcaagggattccccgacatggaaaaataaccgacgacgagatcaatgccgcctccgtcacttgctgccgcatctacctcaggtatatcgcaagttcttcggcgggtactgcaactgctcataccatgattgcagagctgagaacaccttgaagctaggagatgtcatccagtaccatgaatgtggttaccgcattctctataagaagcgggcaccgatccatgtgtagtaccagcaaacttcccattttctatgactccaagcaatggcagttgccgttcagtttggactatagaattcaattatgagttcagtttgttgatattaaaggaaagatacaggtcagcctcttttacttaacaaggtaagagctctaaatttatgttagtatagtagaagtttttttgttgtaaatatcacttgcatatacgccagctagatgctcactatttgtcctctctcaaggtctcaatctgtctgatgtttattcaaccgattagctatcatcataaacctgaataacattttgctttgttcatgttcaggattcatacttaaatacttaacaaggtaagagctctaaatttatgttagtatagtagaagttttttttgttgttgtaaatatcacttgcatatacgccagctagatgctcactatttgtcctctctcaaggtctgaatctgtctgatgttttattcaactgattaactatcatcataaacctgaataacattttgctttgttcatgttcaggattcatacttaaatttatctgatgcaatttttcaactgaacgtgaacttggcaggggtgagtacggagtagtgtacaagcgagttctgcattgagctgtcgtagagagcgtagacagacactctagccaacgttgttggctgggattggaacacaaaagcgagacaagggatgagaagcacaggaggagccaggtgagtttggcggaggcctcaatccgggtctagaccaaggtcatggtggcgacgaaggtggaggccgaggtggagggtgatgcttccactctcagtcttggggtggggtcgtggggatgacatatgagagtggggtgcagtggtggctcgtcgacatcagccattggcacccttcccctgcccagttcgatgatgcaccctccctcctactacttcacgatggcaccaccatctccaggtaccgtgccgatggaggaaaggagaaacaaggtattttgaagattaagagtgatgccacatacttagcgatggggtgcttgatatcctagatattgtactagcttcagacctcgccgaattgacaccttcgaagaaatgaagtcgccagattggtaggctttgagtgtttcaccagaggaagtatgtagtgcagttaaggaaggaaatgaacttccatcagacttgatagacacactactaaagtggatcccaagcaatgatgaggagcttaggcttcgactgtcctcccatagcaccgccacaccgcatgcgtccgcggcggcgtccgcctcggcgccggtctcgcacaccgctccctagctggggaagttcatcgcctccgagcccttcaacgtggggggattcgattgggcgatctacttctaccccgatgggaagagcggcgaggatggcgttgtctacgtctcgctcttcatagccctggccagcgaaggcaccgatgtgcgcgcgctgttcgaggtcacgctcgtcgaccagagcggcaaggggcaagacaaggtgcatacccactttgggaggtctctcgagagcgacccatacaccctcaagtaccgcgacagcatgtgatgagtctatgtacaggttgtttcctacggtatgcttatctatggtggaaagaaaaagtgattgactcatacttgaaaagaaaagatggcctttgcccattgacgcctgagacaaccagaaatttgccatgacctcgttcctgaccaagaaaaactgtcaagcacagaatcacagttgatatattgggattccaaggtatcagaggctgatatggatgcaatgtggaaacatcctgatgtgtataaggagtggataaaatctggtgagagacgtggaaatgtacgattctcccatgatgcaaagaacatgccttacctttctcgcgtcgaggtgaaggatatgattgccttctcatgttgtgtatatgatggtggtgatgaggagaaggaaatggatgcagccagagaaataggttggagagggaaatttactaagagaggacgtgtaataagaccaggaattattagaatgagtggaaaatgtcctcttacacctttggaggttgggttaatgcttcgtggaatggatttcagcaataagactgcaatctttttggcatctggaaagatttacaaagcagagaagaacatggcttctcttcttgaaatgtttcctctcctacagacaaaagagacactggcatcagaagaggaacttgctccattcaagatggctgctgttgactatagtatttgtgcccaaagtgaagtttttgtgaccacacaaggtggaaatcccgcattttttatgggtcacaggagatacttgtatggtgggcattcaaaaacaattaaaccagacaaaagaaggcttgctgtactcttcaataatccacgtatagggtggacggcattgaagcggcacttgcttaatatgagagcatacagtgatgtcaaggggatcgaaatgaaaagaccaaacgaatctatatataccttcccgtgtcctgactgcatgtgccgcttgaacagaacagaacactcgaaatccaaacagagtagatagtatatttcgtatgtagaccaaatggctaaaaccatccaatattttcatagactgaaaatgcagagaaagcaacaaaggtgtatcaatacagtcgtacaagcttagtatcggatggtttttaatttgtatagcaaagcacgggcacatacctatatatcttttaatgtatgtaaatattcttaacctttaaaagatactaacaagcaggtataacgataattaatgtttctatatcttaatatattttatcattatatgttgattccgtagcaacgcacggtca

SEQ ID NO: 217274 - DNA, 2237 bp, Zea Mays
ccccgttcgacatcagcgctcctccccccgaccaccgtcgatttggtgtctgagccctcgctagatctcgcaccctcaccgaagccctcattggattcgacgccctcactggaggttgcaccgcgatgggatctaggaaccgtagatggcctcgaccacccacgtgggttgttgcctctgcggatgagacgcagcgccaaggggccagaggaaacgacgtgatggacctcatatcacagctcatgtcatggttcatgcctctcatcgcctcccgccgtggttcgccgaggccgccccatgctgcacgccatgggcagcgatgtcgccttcacgaagctcggcatggagtgctaccccaaggaggccaccgctgttggggtcaagggattccccgacatggaaaaataaccgacgacgagatcaatgccgcctccgtcacttgctgccgcatctacctcagattgcagagctgagaacaccttgaagctaggagatgtcatccagtaccatgaatgtggttaccgcattctctataagaagcgggcaccgatccatgtgtagtaccagcaaacttcccattttctatgactccaaggtccgctcaactgcattgcctgttgtgacatgtttaatgcatgcacattctttctatttctctatcaaaggaattgctttgtatcatctccatagatctgttaagcatgctccaaaaggatttgatcttttaatcaattatcttctaatgaaggccttatgtcatccagcaatggcagttgccgttcagtttggactatagaattcaattatgagttcagtttgttgatattaaaggaaagatacaggtcagcctcttttacttaacaaggtaagagctctaaatttatgttagtatagtagaagtttttttgttgtaaatatcacttgcatatacgccagctagatgctcactatttgtcctctctcaaggtctcaatctgtctgatgtttattcaaccgattagctatcatcataaacctgaataacattttgctttgttcatgttcaggattcatacttaaatacttaacaaggtaagagctctaaatttatgttagtatagtagaagttttttttgttgttgtaaatatcacttgcatatacgccagctagatgctcactatttgtcctctctcaaggtctgaatctgtctgatgttttattcaactgattaactatcatcataaacctgaataacattttgctttgttcatgttcaggattcatacttaaatttatctgatgcaatttttcaactgaacgtgaacttggcaggggtgagtacggagtagtgtacaagcgagttctgcattgagctgtcgtagagagcgtagacagacactctagccaacgttgttggctgggattggaacacaaaagcgagacaagggatgagaagcacaggaggagccaggtgaggtgaggtggcgacacacaggagtcgggcaagctcagctcatctcatctcatgctctactaaaaaggattagcccatctcaagagaaaagagtaacattgtcagcccactgcaataaccacactattaccagtcttgaaattcactttttgtttgtttgtcatagaaccagggattcatgacaggaaatgatctccttctcaagataagaaaattgcatttaagttactaatcagtgtatggtttactagtttggcggaggcctcaatccgggtctagaccaaggtcatggtggcgacgaaggtggaggccgaggtggagggtgatgcttccactctcagtcttggggtggggtcgtggggatgacatatgagagtggggtgcagtggtggctcgtcgacatcagccattggcacccttcccctgcccagttcgatgatgcaccctccctcctactacttcacgatggcaccaccatctccaggtaccgtgccgatggaggaaaggagaaacaagattaagagtgatgccacatacttagcgatggggtgcttgatatcctagatattgtactagcttcagacctcgccgaattgacaccttcgaagaaatgaagtcgccagattggtaggctttgagtgtttcaccagaggaagtatgtagtgcagttaaggaagcttctcttgtaacattggatataatgacgctgctacatgactattattttgacatcataacctacatataaagattagagactaatctgtttttttctgagctaag

SEQ ID NO: 217275 - DNA, 1818 bp, Zea Mays
aggcgctggaggcgtccacagggggcgacacccgtgaccctgcccccgttcgacatcagcgctcctccccccgaccaccgtcgatttggtgtctgagccctcgctagatctcgcaccctcaccgaagccctcattggattcgacgccctcactggaggttgcaccgcgatgggatctaggaaccgtagatggcctcgaccacccacgtgggttgttgcctctgcggatgagacgcagcgccaaggggccagaggaaacgacgtgatggacctcatatcacagctcatgtcatggttcatgcctctcatcgcctcccgccgtggttcgccgaggccgccccatgctgcacgccatgggcagcgatgtcgccttcacgaagctcggcatggagtgctaccccaaggaggccaccgctgttggggtcaagggattccccgacatggaaaaataaccgacgacgagatcaatgccgcctccgtcacttgctgccgcatctacctcaggtccgagtctgaacctggtatatcgcaagttcttcggcgggtactgcaactgctcataccatgattgcagagctgagaacaccttgaagctaggagatgtcatccagtaccatgaatgtggttaccgcattctctataagaagcgggcaccgatccatgtgtagtaccagcaaacttcccattttctatgactccaagcaatggcagttgccgttcagtttggactatagaattcaattatgagttcagtttgttgatattaaaggaaagatacaggtcagcctcttttacttaacaaggattcatacttaaatacttaacaaggattcatacttaaatttatctgatgcaatttttcaactgaacgtgaacttggcaggggtgagtacggagtagtgtacaagcgagttctgcattgagctgtcgtagagagcgtagacagacactctagccaacgttgttggctgggattggaacacaaaagcgagacaagggatgagaagcacaggaggagccaggtgaggtgaggtggcgacacacaggagtcgggcaagctcagctcatctcatctcatgctctactaaaaaggattagcccatctcaagagaaaagagtaacattgtcagcccactgcaataaccacactattaccagtcttgaaattcactttttgtttgtttgtcatagaaccagggattcatgacaggaaatgatctccttctcaagataagaaaattgcatttaagttactaatcagtgtatggtttactagtttggcggaggcctcaatccgggtctagaccaaggtcatggtggcgacgaaggtggaggccgaggtggagggtgatgcttccactctcagtcttggggtggggtcgtggggatgacatatgagagtggggtgcagtggtggctcgtcgacatcagccattggcacccttcccctgcccagttcgatgatgcaccctccctcctactacttcacgatggcaccaccatctccaggtaccgtgccgatggaggaaaggagaaacaaggtattttgaagattaagagtgatgccacatacttagcgatggggtgcttgatatcctagatattgtactagcttcagacctcgccgaattgacaccttcgaagaaatgaagtcgccagattggtaggctttgagtgtttcaccagaggaagtatgtagtgcagttaaggaagcttctcttgtaacattggatataatgacgctgctacatgactattattttgacatcataacctacatataaagattagagactaatctgtttttttctgagctaag

SEQ ID NO: 217276 - DNA, 2018 bp, Zea Mays
actagatagatgctgtcatgctgaggacgaaggcaagcatgttgggcacagcgccatagtatcaaactatcattttgagccgtttcgcgtaccctaaaatcagtggcaacagcgccatagcatcgtcaactccatcaagccgttaccatcaacaacgattgcttgctgccgactgccaagcggggccggtcaatccagaagttggcagcctccaatcgcagcatccctccgagatcgctgccccgtccccctcccccggcttatcccctatcccctcctcccccgctccttccacacaaacctccatgccccttcttcctctcctccccgtcatggcttccaccttctcccccacttccgccgcgagggccctcctcccgggctccacctcccgcccactcttcctcgccgcttcagcttcctcagggcgcattcaaccatccaggaagggactggacttccgccgcggccgattcaccgtctgcaatgtcgccgctcccaccgccgccgaacaggaggcgacggcgtcggccgcgaaggagacccagcgccccgtgtacccgttcgcggccatcgtggggcaggacgagatgaagctctgcctgctgctcaacgtcatcgaccccaagatcggcggcgtcatgatcatgggcgacaggggcacggggaagtccaccaccgtccgctccctcgtcgacctgctcccggacatccgcgtcgtcgtcggcgaccccttcaactccgacccggacgaccccgaggtcatgggccccgaggtccgccagcgggtcctgcagggggacaccggcctccccgtcaccaccgccaagatcaccatggtcgacctgcccctcggcgccaccgaggaccgcgtctgcggcaccattgacatcgagaaggcgctcaccgagggcgtcaaggcgttcgagcccggcctgctcgccaaggccaacaggggcatactgtacgtcgacgaggtcaacctgctggacgaccacctcgtcgacgtgctgctggattccgctgcgtcggggtggaacacggtggagagggagggtatctccatatcccaccctgctcgcttcatcctcatcggctctggtaacccggaggaaggggagctcaggccccagctgctggaccggttcgggatgcacgcgcaggttggtaccgtcagggacgccgagctcagggtgaagatcgtggaggagagggctcgtttcgacagggatccgaagacgttccgtgagtcgtatcatgacgagcaggagaagctccagcagcagatatcatctgcacggagtaaccttggcgctgtgcagattgaccatgacctccgtgtcaagatatccaaggtgtgctctgagttgaacgttgatggactcagaggtgacattgtgactaacagggctgccaaggcgctggctgcgttgaaaggaagggacagcgtcaccgtggaggacattgctactgtcattccaaactgcttgaggcatcggctccgcaaggatccgcttgaatccattgactcgggtttacttgtcattgagaagttttatgaagtctttagctagattgttcttgaggtttatcaatttcagagccttcagtatcttcacacatgtttcagttagctagttttatcttccaactttttttttctaatgcctattcatcgaaggcattgaatcttaaagtttcctgtgctcatttcttcatggtctgtcaatggagaatgatacgttgtgagccccgatatgacaacatgttgatttcttaacacttttttctaatagattcgccagcaaattatgcgacttatctgtttcctactctcaatttcgatagggactataactggttgttttgtgggttttgaaacttgttcagtttgctggattaattaatgctgattaatcatgaagattttcgttcttagatcaaagtttgtcatgcccgtttagcatgattttctcaatcgagaatggtagttttcagctgtgatgtctctacatttg

SEQ ID NO: 217277 - DNA, 557 bp, Zea Mays
gcagttgcttaaacagagtagagcagtactaaatctttaattttctcccctttatgtacaaccttgcatacaatatttctgggagcaagatgagtctgatatcatcagtcgccaaacaaggatcagtctccactttcaaggcagaaagaaacagatgttgcgatatgctttcacataccattggcgcctatggtcgattccggagatcaaggactgcttggaggaggctggattcaagtgggtccacgtttggatgagggagatgccaaatacccagtcaggtggaaacgccaaggaatataacgccaaccgggacgtgaagtatgaagaatcacaccatttcaaccaaggagatgcttggaacgcctatgtcgttggagtagcaaatatctagccgttgatccattttttttgcttgcaggtatgtgtagtgatgaaaggttgtacaggaacgtggaagattgcttgcagatctagaagaagatgaacaacctaaaaagaaggttagattagggagcccaacgctcaatggatttcaatttataatgctaggcggc

SEQ ID NO: 217278 - DNA, 453 bp, Zea Mays
ccttgcatacaatatttctgggagcaagatgagtctgatatcatcagtcgccaaacaaggatcagtctccactttcaaggcagaaagaaacagatgttgcgatatgctttcacataccattggcgcctatggtcgattccggagatcaaggactgcttggaggaggctggattcaagtgggtccacgtttggatgagggagatgccaaatacccagtcaggtggaaacgccaaggaatataacgccaaccgggacgtgaagtatgaagaatcacaccatttcaaccaaggagatgcttggaacgcctatgtcgttggagtagcaaatatctagccggttgtacaggaacgtggaagattgcttgcagatctagaagaagatgaacaacctaaaaagaaggttagattagggagcccaacgctcaatggatttcaatttataatgctaggcggc

SEQ ID NO: 217279 - DNA, 1649 bp, Zea Mays
gtcataaatagccagccccatccccagcttctttccccaacctcatcttctctccttttgctcggaacgcacacaccgcccggtctccgatctccgatccccgatcccctcgtcgatccaagatcttcgtcaagactctcactggaaagactatcaccctcgaggtggagtcctctgacaccattgacaacgtcaaggccaagatccaggacaaggaaggcattcccccggaccagcagcggctcatcttcgctggcaagcagctcgaggacgggcgcacacttgccgactacaacatccagaaggagagcaccctccaccttgttctccgcctcaggggaggcatgcagatcttcgtcaagaccctcactggaaagactatcaccctcgaggtggagtcttctgacaccatcgacaacgtcaaggccaagatccaggacaaggagggcatccctccggaccagcagcggctcatttttgctggcaagcagctcgaggacgggcgcacgctggccgactacaacattcagaaggagagcaccctccacttggtgttgcgtctcaggggcggcatgcagatcttcgtgaagactctgactggcaagactatcacccttgaggtcgagtcttctgataccattgacaatgtcaaggccaagatccagaaggagagcaccctccacttggtgctgcgtctcaggggtggcatgcagatcttcgtgaagactcttactggcaagacgatcacccttgaggtggagtcctcagacaccattgacaacgtcaaggccaagatccaggacaaggagggcattccaccggaccagcagcggctgatcttcgccggcaagcagctggaggatggtcgcaccttggctgactacaacatccagaaggagagcaccctccacttggtgctccgcctcaggggtggcatgcagatctttgtgaagacattgactggcaagaccatcaccttggaggtggagtcgtctgacacaatcgataatgtcaaagccaagatccaggacaaggagggcattccaccggaccagcagcgcctgatctttgctggcaagcagctggaggatggccgtaccctcgccgactacaacatccagaaggagagcaccctccacctggtgctccgcttgcgaggtggtatgcagatctttgtgaagaccttgactggcaagaccataaccctggaggttgagagctccgacaccatcgacaacgtgaaggcgaagatccaggacaaagagggcatccccccagaccagcagcgtctgatcttcgccggcaagcagctggaggatggccgcaccctagcagactacaacatccagaaggagagcactctccacctggtgctccgcctccgcggtggtcagtaagccatggttcatttaagctgctgctgtacctgggtatctgcgtcgtctggtgccctctggtgtacctctatatggatgtcgtcgtctaataaacatctgtggtttgtgtgtcatgaatcgtggttgtggcttcgttggtttaatggacctgttgtgtcctctgtgttgtacccaaaactcttctgcagcagtatggcttgaatccttatgaagtttgatatttgaacttaaaagtctgctcattatgttttt

SEQ ID NO: 217280 - DNA, 2185 bp, Zea Mays
aaactgagcttgacaaaaccaagttaacattcaacaaaccaaacacgttaagctgtaagccatagtgggaaactgagcctgacagaatcaagttaacattcagcaagaaacggtagaaagcaagaacctggaggggtccaataaacaccagcgaatcaaatttgatcccaggcagttaattaggagatataaccagaaaaaaacataatgagcagacttttaagttcaaatatcaaacttcataaggattcaagccatactgctgcagaagagttttgggtacaacacagaggacacaacaggtccattaaaccaacgaagccacaaccacgattcatgacacacaaaccacagatgtttattagacgacgacatccatatagaggtacagcagcagcttaaatgaaccatggcttactgaccaccgcggaggcggagcaccaggtggagagtgctctccttctggatgttgtagtctgctagggtgcggccatcctccagctgcttgccggcgaagatcagacgctgctggtctggggggatgccctctttgtcctggatcttcgccttcacgttgtcgatggtgtcggagctctcaacctccagggttatggtcttgccagtcaaggtcttcacaaagatctgcataccacctcgcaagcggagcaccaggtggagggtgctctccttctggatgttgtagtcggcgagggtacggccatcctccagctgcttgccagcaaagatcaggcgctgctggtccggtggaatgccctccttgtcctggatcttggctttgacattatcgattgtgtcagacgactccacctccaaggtgatggtcttgccagtcaatgtcttcacaaagatctgcatgccacccctgaggcggagcaccaagtggagggtgctctccttctggatgttgtagtcagccaaggtgcgaccatcctccagctgcttgccggcgaagatcagccgctgctggtccggtggaatgccctccttgtcctggatcttggccttgacgttgtcaatggtgtctgaggactccacctcaagggtgatcgtcttgccagtaagagtcttcacgaagatctgcatgccacccctgagacgcagcaccaagtggagggtgctctccttctggatgttgtaatctgcaagggtacggccatcctccagctgcttgccagcaaagatgagccgctgctggtccggtggaatgccctccttgtcctggatcttggccttgacattgtcgatggtgtccgaggactccacctcaagggtgatcgtcttgccagtaagtgtcttcacgaagatctgcatgccacccctgagacgcagcaccaagtggagggtgctctccttctgaatgttgtagtcggcaagcgtgcgcccgtcctcgagctgcttgccggcaaaaatgagccgctgctggtccggagggatgccctccttgtcctggatcttggccttgacattgtcaatggtatcagaagactcgacctcaagggtgatagtcttgccagtcagagtcttcacgaagatctgcatgccgcccctgagacgcaacaccaagtggagggtgctctccttctgaatgttgtagtcggccagcgtgcgcccgtcctcgagctgcttgccagcaaaaatgagccggtgctctccttctggatgttgtagtcggcaagtgtgcgcccgtcctcgagctgcttgccagcgaagatgagccgctgctggtccgggggaatgccttccttgtcctggatcttggccttgacgttgtcaatggtgtcagaggactccacctcgagggtgatagtctttccagtgagagtcttgacgaagatctgcatctgcataagaatcaccaaacaacagggtgactatcaacaaaaaagaacagtctcaaaggaaataaacagcatatgaactatgaaggcgccatgcatgctcatcacactgggtattcaaaatctacacatagctgcagcatatgccaccatacaagtacatcaaaatcataataattagaagacatactgatatattagaatatataggtactcaagaacgattaaatcatagtagcatgttacttcatgtatctaagcatgtatatacatctatctaagtaccagtaaaatcaagataatttaagacatactgatttattaga

SEQ ID NO: 217281 - DNA, 1413 bp, Zea Mays
atggccgccctcctgcggctcatcgccgagagccaagtaacctcggcgccggctgccgagccgaatcgggatcgcggggcgaaggaaaacgggcaggcttacggagtggtattcgcttgcgcgggcgggcgcgtggctgcgggcgtcctcctcctcatcgtcgtaggcatcgtcgtccagctcctggtggcgctgcgggggcgactgcgggggcaactgcggctggtgatcgtcgtcctcatcgaccatctcggcgacgtcgtcgtcgtccgcatcgtccttgtcctccgactggtccccgaaaagggaatggacatggcactttcaaagcttaacagtggtggatgggttcatatattccctgaaggaagtcgttcaagggatggagggaaaaccattgctcctgccaagagaggtgttggaagattggtaatggatgctgacagtcttccagttgtaataccctttgtccatactgggatgcaggatataatgcctgttggaaaatgaatccccagagcaggaaaaagggtgattgtggtcgtgggtgacccaatcaactttgatgacctgctcatcgacaactgtggtgacacccaagatattcctagagggatcttgtacgacaaagtgacacagagaattgggcagcgattgcaggaactcaaggtcgaagtcgatagactggctgcagagcaggaacctgaactccaaaaccgcaacgtgggtgatgatggataccggctgtggcagcaggtcgattgggaaggatttgggatagggagttccatgttgccatcagaaccttcagctgctgcgcaagtgccatcaagggaagccgagcctgaaccgcacctggaagtggagcaaagtgtgtctccagccccaagtgcagcaaccttttacgatgttgctgttccacactggttccagcggcatgtggacccttctgagctcatggggttcgcttcccatggcctgatcaagcatggcaagttcttggaggaaggctacagggaattccaacaatcggctactactctgcacacctgggcttggattgaatgaagaggttcgacccaacatggattcgaagacaaagttcagtgatgtcaagggagttgacgaagctaaagctgaacttgaggaaattgttcactacctacgagatcctaaggtgaattgttttagtcactacctacgaagctaaacctttgtggtggaacctttgtatgtttgaacctctgttgtggaagaactagtgtgctggaattgtgtatgacttgtgatgagaatgttgtgtatgatggcttttctgtgtattatgattatgtgagctatcatgagagctcagtgtgtcgtcactgtatggtcactgtatgtgggtgccataagtgacgatcccaactttag

SEQ ID NO: 217282 - DNA, 1641 bp, Zea Mays
tcttggctagagttctttactcacgagcgaggagttgtacctctaggttttggccagggcttaagttgtttcgtacctctctgcctttgtatcatagttttgttagacttgggtcgaggacatgtattgttctagaaaaggctagcgaataaggaccttgatttcccatttctggctcttctaatttccggaggacacaaccttcttgttctcgctcatggtcttgggcattacattcaactggggactactatagatgatgcgattggtgaggcatatgacaaatcagcaagatggttgggccttgatatgcggaaaggtggtggtcctgctcttgaagagcttgctctagaaggtgatccaaatgctgttaagttcagagttccaatgcgacagcataaagattgcaatttttcttatgctggactgaagactcaagttcgattggcaattgaatctaagaacttatgtacagaggatattcccgtttcggctgcatcggaggaggacagacaatcaagggcgaacattgctgcctcttttcagcgagttgctgtgttacatttggaagaaaggtgtgagcgagcagttgaatgggcattgaatatggaaccttccatcaaatactttgtaactcagatatcttgacgatggttaatttcaaatcggtttactcatccagtgttgacttatccaattataaaaaggttgtttcaggaggtgtcgcatcaaacaagtatgttacgactcgcttgaatcatgttgctgggaataatggcctacaacttgtatctcctcctccaagcctttgtactgacaatggtgtcatgattgcttggactgggattgagcattttgttgccgggaggtttgaggacccacctgctgctgatgagtctgatgatatgcagtatgagctgcggccaagatggcctcttggtgaggaatattcaaaaggaagaagtgttgcacgatcattgaagactgctcgagtccatccatcactaacgtccatgatacagggctcccttcaaaagtagttgagttggaagttggaaactaattattggtctcagctgctttatgcagttgagtttcccgtcttctagttttgggttcacaaatcagctgatttatctgtattcgctgaattgaagtaacaaacctgcaaaagggccgaactagtttaatagtagatgaggctatatacaaattcagttcataccagtgtttttaaggcgttgcctaggtgatgtctaggcgtctaggcgctcgaataattctagtcgccttgcttgcctacgcgtccaggcggtggtctaacgtctcgccttaccgtattaagaacattggttcatacataccagaagatgcttatactccatttgtgtttaccatggaggctggctgtatcaggccccacgcattttgaatgtagtgtatatttcttgtttcttaaggccttcgatccgaacatatcattagtcattactttgcaatgccactaaggttgattgtgatgttcatacgggcaaccaaagtttttaaaatgtggattgtattctttagacatgaattgagaattgagaacaaatatggccttggtgtcgaagattaatgatgacataagattattgtgtt

SEQ ID NO: 217283 - DNA, 1350 bp, Zea Mays
gtaaaaacctgtgcaagtgatcgattgttcgttgccaatgaaaaatgaagaaatcactggttttcgtacatagccagatgaaaaagttcactttccagacctggtttttacccattttacgagcgaaatgaaaaaaccgtacttttggcggcatgaaagtttctgaaaaacaagctcgaaaaagaggcatttatgagggaaacgagaaaaaagtgtcactttgccacaggcgagacggaacagatctgaaaagatgtacagaggatattcccgtttcggctgcatcggaggaggacagacaatcaagggcgaacattgctgcctcttttcagcgagttgctgtgttacatttggaagaaaggtgtgagcgagcagttgaatgggcattgaatatggaaccttccatcaaatactttgttgtttcaggaggtgtcgcatcaaacaagtatgttacgactcgcttgaatcatgttgctgggaataatggcctacaacttgtatctcctcctccaagcctttgtactgacaatggtgtcatgattgcttggactgggattgagcattttgttgccgggaggtttgaggacccacctgctgctgatgagtctgatgatatgcagtatgagctgcggccaagatggcctcttggtgaggaatattcaaaaggaagaagtgttgcacgatcattgaagactgctcgagtccatccatcactaacgtccatgatacagggctcccttcaaaagtagttgagttggaagttggaaactaattattggtctcagctgctttatgcagttgagtttcccgtcttctagttttgggttcacaaatcagctgatttatctgtattcgctgaattgaagtaacaaacctgcaaaagggccgaactagtttaatagtagatgaggctatatacaaattcagttcataccagtgtttttaaggcgttgcctaggtgatgtctaggcgtctaggcgctcgaataattctagtcgccttgcttgcctacgcgtccaggcggtggtctaacgtctcgccttaccgtattaagaacattggttcatacataccagaagatgcttatactccatttgtgtttaccatggaggctggctgtatcaggccccacgcattttgaatgtagtgtatatttcttgtttcttaaggccttcgatccgaacatatcattagtcattactttgcaatgccactaaggttgattgtgatgttcatacgggcaaccaaagtttttaaaatgtggattgtattctttagacatgaattgagaattgagaacaaatatggccttggtgtcgaagattaatgatgacataagattattgtgtt

SEQ ID NO: 217284 - DNA, 981 bp, Zea Mays
ctgtgcaagtgatcgattgttcgttgccaatgaaaaatgaagaaatcactggttttcgtacatagccagatgaaaaagttcactttccagacctggtttttacccattttacgagcgaaatgaaaaaaccgtacttttggcggcatgaaagtttctgaaaaacaagctcgaaaaagaggcatttatgagggaaacgagaaaaaagtgtcactttgccacaggcgagacggaacagatctgaaaagatgtacagaggatattcccgtttcggctgcatcggaggaggacagacaatcaagggcgaacattgctgcctcttttcagcgagttgctgtgttacatttggaagaaaggtgtgagcgagcagttgaatgggcattgaatatggaaccttccatcaaatactttgttgtttcaggaggtgtcgcatcaaacaagtatgttacgactcgcttgaatcatgttgctgggaataatggcctacaacttgtatctcctcctccaagcctttgtactgacaatggtgtcatgattgcttggactgggattgagcattttgttgccgggaggtttgaggacccacctgctgctgatgagtctgatgatatgcaggggataggtcataaatgggcaaattgagttaggtcacaaataactcacgggtttgagagttggcagatctcttggggtggtctggtctgtacgttgaggcatggatctgagagttctacgcctcctttggatgcagctgaaccacaatttctttagttctttagagcatctataatagttatgtaaacaacttcctaaatatgaatttaggaagttttcggaaaaactcttcttcaacaattatgtaaagtagatccttaaatttacaaactccctacaaaacccaatttcactcctacatttaagaacctcgttggaactatctaaatcaatgttggttctaaatccatcgctgaaaccatatttcgg

SEQ ID NO: 217285 - DNA, 2416 bp, Zea Mays
gtggcttatgcagcggaaggagaaaacatagtacctgataccatgcaagcaatgttgttgctgactacacatataaccagtcaacaaaagaaaatgtcttgagcatgctggggtcaatgactaaggttttgcagtcatcttctgataaaacatctttagacactaaagaggaaaataagttttttgagtccgatatactggataaagtgtggcacatcctttatgatgattgtctgtatgctcttggtacttgtgtggaaggggaactcaagcatttccacaaggcgagatacaagcttgcgcaaggatattatagaagaggtgaagcaggggacctggaacgggctaaggaagagctctcgttctgtttcaaatcttctcggtcttcctttacagtaaacatgtgggagattgatggcactgttagaaaaggaaggaggaaaaatccaaatgtgggtggatccagaaagaatctggaggtcagtttgtcagaaagttcacggaaattcattacgtgcattagaaaatatatgatactctatttaaacctgctggagaagaacacggacctgtggactcttgagaaggcttatacttatctgcgaacagataagaggtttgcattgtgtttaggtgatattgttcctgttggtcttgggaagtatattctagttctaacggcagcaattcataatcctgagattcgtcgagcttctggtgatgcttctgttgagcaattacttgagaaaatgttcactgtattcatggatcatgcgaacatgtgggctgatataagcaatataccagaggtgaacagtccagaattatcagaaagcaatctttacagctatatccaccagtacatccatttgctcgagagtgatgtacgactagatgttctagaaggactaaacgagaagataagaaagcgtttcaagacaccgaagttatcaaatagtaacttcgctaagatatgcaagcatgcttctctggcatggtgccggtgtattctcatcaaactggcctcaatcactccactgcctgaatccgcagatgcaaccaatcagcctgcaccattatccaatgggcttctactctatgttgacttgcaacctgatgagcttcttatctcatcccctgatgggcctgctcaattcaaagggcttgacatgaactggtttgagacacttaacagaattaaaaacatcccggtcaagcaaacatccgaagataacttggagactgctgttacgttaatgaagagcacttataacttttatcgggagagcccttgtggaacatttccttcaggtatcaatctctacacggttacaccatcacaagctcctattgaagggctaccgccaaccgctgctgtagttgagacgctcgacttaagtattccaagaaaactccttctgtgggtatacactctggttcatggtcgttactcaaatatatcctccgttgtaaagtattgcgacgagatgaagttaagaagtaaaagaggaaccccagctgcgtctgcttcgtcacaagttgtgcagccagtgtcgcatagtaccgtttcttcccaagttgtatctaaagaaaagagctcccaagttgaacccgctgaagcagcacaaaatccttctgatctagctgccacttgcgttcctgcataccaagaagttggtggtgctagtgcctcgcaaagtgccattgaggcccagaaagctactgctgcggcatctcagctcactcgcagtggttcatcaagggcaatggaaaatgcacaggacggcggggagaggaagtaacgagatagagttcgattttttttatcctctatgctacatcgtatggatgcatatgatcctgcctgacgattctcaggtctcagctctccgtggctccgtgtgcaaatctctgccacgggcgtgttttaacgcctgattggatggttgcccgctggcgcgcccggccagcctcgtacggccacttcggacgcatctgcatcttcggaggtacccgcagatgtagatgaatggccgtaaaatggtttggtctgcgtctctttacatataaccaaataaaaactcagataaagttaactcatgtggtggtctatgttgagatgatgcgggtaaccaatcgaacggttaacaaattcaggtcgtatgtatatcctggtttacagttagtgtttcctaagtgcatttgtagattatagagctgtcaagattgaacgatacatctgtaaggtgttacaaatgctaaatgctaatcctgattttgtggctgatgctaaaaacctgtggactcttaattaccacagactgaactttccctcattttggcccaacaaatacaatagcagaggaagagtttcagttggatttggtggaacggtaggagcgtaaaatatcacttt

SEQ ID NO: 217286 - DNA, 2206 bp, Zea Mays
cgggattttaccttccaggcagctgctgggctcgtgacccacgccgtctcggaccaacccgagcgccgaaccccaaggctcgcgaccgcgacactcttgtgtcctcctgctctccagatctcgccgtcggcggcggcatgctcccctccaccgtcggcggccgcggccgctacctcatgctcggcatcgcccttgccctcgctgccctgctcgcgctcgcctccgcttccgagtccgaccacaagtacaaaactgaagagccagttaagctttgggtgaataaagttggcccttacaacaatcctcaagaaacttacaactactacagccttccattttgtcaaccgtctgagaaccctacacataaatggggtggtcttggagaggtcctgggtggaaatgagctgattgatagtcagcttgaaataaagttcttaaaaaacgtggagaagggcttcatttgtacacttgagctagatgctaaaaaggtccagcagtttgctgatgccattgaaagctcatattggtttgaattttttatagacgatctgcctctttggggttttgttggggagactgacaagaacagtgaaaacaagcattatctttacacgcacaagaacatccttgttaaatacaatgataacaggataattcatgtaaatctcacccaagagtctcctacgcttcttgaagatggtaagaaattggaaatgacatattcagtgaagtgggtagcgactgatgtgtcatttgcacgccgttttgaagtgtacctggactatcctttctttgaacaccagattcactggttctccattttcaactctttcatgatggttattttcctaactggtttggtttcgatgatattgatgcggactttgagaaacgattatgccaaatatgctcgtgaagatgatgatctagagtccctggagagagatgttaatgaggaatcaggatggaagcttgtccatggcgatgtatttcggcctccccaaagtttgatgtttctttctgcacttgcgaggggctatcatcacaaccttcattgtgtgctatgctcttacatcttttatttctggatatgttagtggtggtctttactcaaggaatggtggcaaaaactggattaaagcgatggttcttacagcgtccctgtttccgttcttgtgtttctcaattggcttcgcgctgaatacaattgctattttctaccgctcattagcagcaataccatttggaacaatggttgtcatgtttgtactttgggctttcatctcctttcccttggtgcttttgggaactgtcgttggtaggaactggagtggagctcctaacaatccctgccgagtaaagactattccacggcctattcctgagaagaagtggtaccttacaccttctgtcatctcattgatgggtggcctgcttcccttcggtagcatcttcattgagatgtactttgtgttcacatcattctggaactataaggtgtattatgtctatggcttcatgttgctggtctttgtcatccttcttatagtcaccatctgcgtcactattgtgggtacttatttcttgctgaacgccgagaactaccattggcaatggacgtcgttttcttctgcagcctcaaccgctctgtacgtgtatctgtactccatctactactaccatgtgaagacaaagatgtcaggcttcttccagacaagtttctatttcggctacacgctgatgttctgccttggcctaggcatactttgtggagctattggctatctagggtcaaccctttttgtaaggagaatctacaggaatatcaaatgtgattaaatccctgctgcttaagctagcaacagaaaaatcatatgtattgtcaggaggcatggcctaaaaaaatggattttaatggtagaccctgattttggaactgctgaggacttgctcccctttgttcgttgttatacgcatttttgtttgcctgcttattcctgcgagatcgtcctcgcaatgtatacctgtgatagtcgagcattagtctggagcacctgtgttcatcattctcttttttttttgtttctgttactttattcggtaggatgtaatcagtgaatgttcgtgcggcgctctactaattaaggcaacaaggggtaggctccttcctctggtcttgttgttatgccttccttcaatctatctg

SEQ ID NO: 217287 - DNA, 2139 bp, Zea Mays
agctgctgggctcgtgacccacgccgtctcggaccaacccgagcgccgaaccccaaggctcgcgaccgcgacactcttgtgtcctcctgctctccagatctcgccgtcggcggcggcatgctcccctccaccgtcggcggccgcggccgctacctcatgctcggcatcgcccttgccctcgctgccctgctcgcgctcgcctccgcttccgagtccgaccacaagtacaaaactgaagagccagttaagctttgggtgaataaagttggcccttacaacaatcctcaagaaacttacaactactacagccttccattttgtcaaccgtctgagaaccctacacataaatggggtggtcttggagaggtcctgggtggaaatgagctgattgatagtcagcttgaaataaagttcttaaaaaacgtggagaagggcttcatttgtacacttgagctagatgctaaaaaggtccagcagtttgctgatgccattgaaagctcatattggtttgaattttttatagacgatctgcctctttggggttttgttggggagactgacaagaacagtgaaaacaagcattatctttacacgcacaagaacatccttgttaaatacaatgataacaggataattcatgtaaatctcacccaagagtctcctacgcttcttgaagatggtaagaaattggaaatgacatattcagtgaagtgggtagcgactgatgtgtcatttgcacgccgttttgaagtgtacctggactatcctttctttgaacaccagattcactggttctccattttcaactctttcatgatggttattttcctaactggtttggtttcgatgatattgatgcggactttgagaaacgattatgccaaatatgctcgtgaagatgatgatctagagtccctggagagagatgttaatgaggaatcaggatggaagcttgtccatggcgaggggctatcatcacaaccttcattgtgtgctatgctcttacatcttttatttctggatatgttagtggtggtctttactcaaggaatggtggcaaaaactggattaaagcgatggttcttacagcgtccctgtttccgttcttgtgtttctcaattggcttcgcgctgaatacaattgctattttctaccgctcattagcagcaataccatttggaacaatggttgtcatgtttgtactttgggctttcatctcctttcccttggtgcttttgggaactgtcgttggtaggaactggagtggagctcctaacaatccctgccgagtaaagactattccacggcctattcctgagaagaagtggtaccttacaccttctgtcatctcattgatgggtggcctgcttcccttcggtagcatcttcattgagatgtactttgtgttcacatcattctggaactataaggtgtattatgtctatggcttcatgttgctggtctttgtcatccttcttatagtcaccatctgcgtcactattgtgggtacttatttcttgctgaacgccgagaactaccattggcaatggacgtcgttttcttctgcagcctcaaccgctctgtacgtgtatctgtactccatctactactaccatgtgaagacaaagatgtcaggcttcttccagacaagtttctatttcggctacacgctgatgttctgccttggcctaggcatactttgtggagctattggctatctagggtcaaccctttttgtaaggagaatctacaggaatatcaaatgtgattaaatccctgctgcttaagctagcaacagaaaaatcatatgtattgtcaggaggcatggcctaaaaaaatggattttaatggtagaccctgattttggaactgctgaggacttgctcccctttgttcgttgttatacgcatttttgtttgcctgcttattcctgcgagatcgtcctcgcaatgtatacctgtgatagtcgagcattagtctggagcacctgtgttcatcattctcttttttttttgtttctgttactttattcggtaggatgtaatcagtgaatgttcgtgcggcgctctactaattaaggcaacaaggggtaggctccttcctctggtcttgttgttatgccttccttcaatctatctg

SEQ ID NO: 217288 - DNA, 1353 bp, Zea Mays
gtttaactgagagagatgttaatgaggaatcaggatggaagcttgtccatggcgatgtatttcggcctccccaaagtttgatgtttctttctgcacttgttggtatcggtacccaattggcagctcttatcctacttgtgatcgttttggccatcgttggcatgctatacattgggcgaggggctatcatcacaaccttcattgtgtgctatgctcttacatcttttatttctggatatgttagtggtggtctttactcaaggaatggtggcaaaaactggattaaagcgatggttcttacagcgtccctgtttccgttcttgtgtttctcaattggcttcgcgctgaatacaattgctattttctaccgctcattagcagcaataccatttggaacaatggttgtcatgtttgtactttgggctttcatctcctttcccttggtgcttttgggaactgtcgttggtaggaactggagtggagctcctaacaatccctgccgagtaaagactattccacggcctattcctgagaagaagtggtaccttacaccttctgtcatctcattgatgggtggcctgcttcccttcggtagcatcttcattgagatgtactttgtgttcacatcattctggaactataaggtgtattatgtctatggcttcatgttgctggtctttgtcatccttcttatagtcaccatctgcgtcactattgtgggtacttatttcttgctgaacgccgagaactaccattggcaatggacgtcgttttcttctgcagcctcaaccgctctgtacgtgtatctgtactccatctactactaccatgtgaagacaaagatgtcaggcttcttccagacaagtttctatttcggctacacgctgatgttctgccttggcctaggcatactttgtggagctattggctatctagggtcaaccctttttgtaaggagaatctacaggaatatcaaatgtgattaaatccctgctgcttaagctagcaacagaaaaatcatatgtattgtcaggaggcatggcctaaaaaaatggattttaatggtagaccctgattttggaactgctgaggacttgctcccctttgttcgttgttatacgcatttttgtttgcctgcttattcctgcgagatcgtcctcgcaatgtatacctgtgatagtcgagcattagtctggagcacctgtgttcatcattctcttttttttttgtttctgttactttattcggtaggatgtaatcagtgaatgttcgtgcggcgctctactaattaaggcaacaaggggtaggctccttcctctggtcttgttgttatgccttccttcaatctatctg

SEQ ID NO: 217289 - DNA, 2499 bp, Zea Mays
ctttgattagttcatgagcatctttaatcatttcaagtaagaaggtttcttctgttgctcggaagatataattttgcctgcatgttttcttccctacttctatttctgaaaatagctatccatggggttttgttggattttaactttagcataccccaacttacttgggactaaaagactttgttgttgttgctgttgttgttgtactatgtagcaatcatttagctgacataattttgcttatctatgaaatgcgacagatactgaacaggtttattataatgttgttcctttctcatatggatgtctttctggttcagatgaactaaattattcggacttgtgttatcctcctccattttatgtgccagaaagcttgttgaataagctgatggttggagacttggagcagagatgaagttcctactagtgatgcacattgtttccctgcaatgtatcttgatgtaaggaatataggcagtccaagtcacatggtagaagtcctaaccacaaggacaaaagagattcttgtgaccggaggaacagaagaaatcctgagagtgacgacagaagctctcttgagtgcgctgacaacggttctcgtgagtgtgccgactgaagatgatcaatggagcgcaaaaacagcagttatggcatggtatccaatatccattgcttctgatagaagctcagctgggccatcagagaagcagctgtatgacaagcaagggaacagtagattccatctggttgtggggttaaaactatctccagcagcttatctatccccatacatatatttaaactctattttgcgaacagtgcaaaacaatgtttttgggtaaactataaatagactgctgcaaacggtctaagaaggaacctattcggaaagtcaatgtaaatgaagcggctgctatagtaatggtaatggtggctacttgtggactgggtgctgcaaatgactcacttaacaccatgaaaggaaccaaggacaatgttcgcacccattttagtcatgatccttcttccagctttggatatttctcatcttaacaggatcaagatgcactgtccgaacgcatttcaaatggtgaggctgatgcttcacttacaggtagtggacacaaccccaaagggaacgttttggaattataaattattgatgatgattggattgcaaacactattgcaaaagctgctgctgcagtagcctccaaagaggcagattcttcagaagcttccatgacaaaggagcagaagctgaaagctgagaggcttcgccgtgcaaagatgtttgctgcaatcattaagagtggagacaagaagatgaatgatttagctgtgtttgctgcaatcattaagagtggagacaagaagatgaatgatttagctgcatcatcggatccaactagtgaagctgccaaggcaattcctgatatgaatgtgtctggacttgatcagcaatctgtggctaaggaacgtgaaggtagttctgatccgtttgaacatgagggaccaaacttgacaaatcataataaagactctgatgatgaaccaaacagagtgcggaagtatagaaagaaacatcgagaatcccatgaggaaaaagatgaatcggaggatatctataagcactcgaggaagaggcatcacccagagcattcaagaggccctagcaaggatgttcacaaacataagcacaagagcctcaaggtcgcacagaagtgtccgcgtctggatcaggtgccaagtttgaatcagacaagctgctcgatgacattgcacaatcaactcaggtaacaactgaagtgccgagtgaactgagagcaaaaatcagagcgatgttgctcgagagactgtagtattcaacgttatgtccttaggcctctgatctgtagccaactgctctgtcgatttctgtatttgcttcgaacgctccaactgtgcccattttacttgaaatcagtgacctgcacgccaagttcgttggcctgctccacatgttgaagtttctgctgcacgcataggtttgaacgtcttgaactcttgatgaatcagtggtccgcctgcaggctgcagcgtcatatttctacgggatatttctagcggatttctgcactgatggaataattaatgtggtcttcatgtggaggacagcatctctgttttgtggtgttgaggacagcagcatcaacagtcttttgactgttgtaggacagcaggcagcagcagtctttttgactgtactttagcatctagagtacaacacatgtgtgctgcagtagcatctaaaggataacatatttgtgctgcagtgtgtagtgtggtatgtagtgtagtccctagagctataaataacccttctaaaggtatgttattttgagtagtgtgtgagtaataaatcaaaaattgcttcaactcgtagtgtcatccgagtaagaattccattgcttacaaagacaactattttgttctattatagtgattttagtgtat

SEQ ID NO: 217290 - DNA, 2396 bp, Zea Mays
ttgagaccggctaatcgaaagaaaaaaaaaaacagccgccacggatctcctccgctgagtcattttgtagccgaaaccctagcgctccgccgaggcgccgagcaccaggctccagcctcgcctaagaaaaagccgaggccgagacaaactacttgtactaactcagctgctatgccatggatctggagatcgttgggcggtgtgccttactgttcgacgatgacgcgacaacggaggtcgtcaactccggcggttccttgtcccctgggcggccatcggcgcagcagacctcctcctcgaccgccacgacatccgccacctccttgaccgcgtgccccctcccccgcgtcgcgcctactcagtggccctcctctccacgccctcccccgacggcgtctctgagagtctgagaccgagcccgatcgcgagcgctatctggacgtcccggctggcgacggtgaatacgagggttctggagatgcagccccctcagatgaactaaattattcggacttgtgttatcctcctccattttatgtgccagaaagcttgttgaataagctgatggttggagacttggagcagagatgaagttcctactagtgatgcacattgtttccctgcaatgtatcttgatgtaaggaatataggcagtccaagtcacatggtagaagtcctaaccacaaggacaaaagagattcttgtgaccggaggaacagaagaaatcctgagagtgacgacagaagctctcttgagtgcgctgacaacggttctcgtgagtgtgccgactgaagatgatcaatggagcgcaaaaacagcagttatggcatggtatccaatatccattgcttctgatagaagctcagctgggccatcagagaagcagctgtatgacaagcaagggaacagtagattccatctggttgtggggttaaaactatctccagcagcttatctatccccatacatatatttaaactctattttgcgaacagtgcaaaacaatgtttttgggtaaactataaatagactgctgcaaacggtctaagaaggaacctattcggaaagtcaatgtaaatgaagcggctgctatagtaatggtaatggtggctacttgtggactgggtgctgcaaatgactcacttaacaccatgaaaggaaccaaggacaatgttcgcacccattttagtcatgatccttcttccagctttggatatttctcatcttaacaggatcaagatgcactgtccgaacgcatttcaaatggtgaggctgatgcttcacttacaggtagtggacacaaccccaaagggaacgttttggaattataaattattgatgatgattggattgcaaacactattgcaaaagctgctgctgcagtagcctccaaagaggcagattcttcagaagcttccatgacaaaggagcagaagctgaaagctgagaggcttcgccgtgcaaagatgtttgctgcaatcattaagagtggagacaagaagatgaatgatttagctgtgtttgctgcaatcattaagagtggagacaagaagatgaatgatttagctgcatcatcggatccaactagtgaagctgccaaggcaattcctgatatgaatgtgtctggacttgatcagcaatctgtggctaaggaacgtgaaggtagttctgatccgtttgaacatgagggaccaaacttgacaaatcataataaagactctgatgatgaaccaaacagagtgcggaagtatagaaagaaacatcgagaatcccatgaggaaaaagatgaatcggaggatatctataagcactcgaggaagaggcatcacccagagcattcaagaggccctagcaaggatgttcacaaacataagcacaagagcctcaaggtcgcacagaagtgtccgcgtctggatcaggtgccaagtttgaatcagacaagctgctcgatgacattgcacaatcaactcaggctgcagcgtcatatttctacgggatatttctagcggatttctgcactgatggaataattaatgtggtcttcatgtggaggacagcatctctgttttgtggtgttgaggacagcagcatcaacagtcttttgactgttgtaggacagcaggcagcagcagtctttttgactgtactttagcatctagagtacaacacatgtgtgctgcagtagcatctaaaggataacatatttgtgctgcagtgtgtagtgtggtatgtagtgtagtccctagagctataaataacccttctaaaggtatgttattttgagtagtgtgtgagtaataaatcaaaaattgcttcaactcgtagtgtcatccgagtaagaattccattgcttacaaagacaactattttgttctattatagtgattttagtgtat

SEQ ID NO: 217291 - DNA, 2601 bp, Zea Mays
ttgagaccggctaatcgaaagaaaaaaaaaaacagccgccacggatctcctccgctgagtcattttgtagccgaaaccctagcgctccgccgaggcgccgagcaccaggctccagcctcgcctaagaaaaagccgaggccgagacaaactacttgtactaactcagctgctatgccatggatctggagatcgttgggcggtgtgccttactgttcgacgatgacgcgacaacggaggtcgtcaactccggcggttccttgtcccctgggcggccatcggcgcagcagacctcctcctcgaccgccacgacatccgccacctccttgaccgcgtgccccctcccccgcgtcgcgcctactcagtggccctcctctccacgccctcccccgacggcgtctctgagagtctgagaccgagcccgatcgcgagcgctatctggacgtcccggctggcgacggtgaatacgagggttctggagatgcagccccctcagatggttggagacttggagcagagatgaagttcctactagtgatgcacattgtttccctgcaatgtatcttgatgtaaggaatataggcagtccaagtcacatggtagaagtcctaaccacaaggacaaaagagattcttgtgaccggaggaacagaagaaatcctgagagtgacgacagaagctctcttgagtgcgctgacaacggttctcgtgagtgtgccgactgaagatgatcaatggagcgcaaaaacagcagttatggcatggtatccaatatccattgcttctgatagaagctcagctgggccatcagagaagcagctgtatgacaagcaagggaacagtagattccatctggttgtggggttaaaactatctccagcagcttatctatccccatacatatatttaaactctattttgcgaacagtgcaaaacaatgtttttgggtaaactataaatagactgctgcaaacggtctaagaaggaacctattcggaaagtcaatgtaaatgaagcggctgctatagtaatggtaatggtggctacttgtggactgggtgctgcaaatgactcacttaacaccatgaaaggaaccaaggacaatgttcgcacccattttagtcatgatccttcttccagctttggatatttctcatcttaacaggatcaagatgcactgtccgaacgcatttcaaatggtgaggctgatgcttcacttacaggtagtggacacaaccccaaagggaacgttttggaattataaattattgatgatgattggattgcaaacactattgcaaaagctgctgctgcagtagcctccaaagaggcagattcttcagaagcttccatgacaaaggagcagaagctgaaagctgagaggcttcgccgtgcaaagatgtttgctgcaatcattaagagtggagacaagaagatgaatgatttagctgtgtttgctgcaatcattaagagtggagacaagaagatgaatgatttagctgcatcatcggatccaactagtgaagctgccaaggcaattcctgatatgaatgtgtctggacttgatcagcaatctgtggctaaggaacgtgaaggtagttctgatccgtttgaacatgagggaccaaacttgacaaatcataataaagactctgatgatgaaccaaacagagtgcggaagtatagaaagaaacatcgagaatcccatgaggaaaaagatgaatcggaggatatctataagcactcgaggaagaggcatcacccagagcattcaagaggccctagcaaggatgttcacaaacataagcacaagagcctcaaggtcgcacagaagtgtccgcgtctggatcaggtgccaagtttgaatcagacaagctgctcgatgacattgcacaatcaactcaggtaacaactgaagtgccgagtgaactgagagcaaaaatcagagcgatgttgctcgagagactgtagtattcaacgttatgtccttaggcctctgatctgtagccaactgctctgtcgatttctgtatttgcttcgaacgctccaactgtgcccattttacttgaaatcagtgacctgcacgccaagttcgttggcctgctccacatgttgaagtttctgctgcacgcataggtttgaacgtcttgaactcttgatgaatcagtggtccgcctgcaggctgcagcgtcatatttctacgggatatttctagcggatttctgcactgatggaataattaatgtggtcttcatgtggaggacagcatctctgttttgtggtgttgaggacagcagcatcaacagtcttttgactgttgtaggacagcaggcagcagcagtctttttgactgtactttagcatctagagtacaacacatgtgtgctgcagtagcatctaaaggataacatatttgtgctgcagtgtgtagtgtggtatgtagtgtagtccctagagctataaataacccttctaaaggtatgttattttgagtagtgtgtgagtaataaatcaaaaattgcttcaactcgtagtgtcatccgagtaagaattccattgcttacaaagacaactattttgttctattatagtgattttagtgtat

SEQ ID NO: 217292 - DNA, 4972 bp, Zea Mays
cctctcctacgcggaaacaaaagttcctccccgtcgctttctcaggtaaccgcgagctccgccgtgacaaatcctctcctcgttttccccacctcctcgtgctcccctccctcctgtctttgcggccggatccctgcccccaaaaccggattggggagggctcgctgcgttcaggcgagggcagcggcggcggcgtgccgtggttcctcagcgccgaggtggtcagaggtcgggacgtgcggtagattggtggtggcttcgtggcgctatcaatgctggtggatttgagcaggggcggtgggtgcgcggatagacgcctgagaaatccgggtgcccggggcagtgctgctccggaaatctgacctgccggcggagaagaattacactaacggccatgctgatggcccggtgaagcgcaaggtagccgcgatgccagcagcggcacctactactccaaggaggcacccgtcaccgaatgccggcggtcgggcgtcgtccccgacgccagctgggtcacaggcgaagaggtcccagtccaccgaacggcggccggtgactccgtcaaggccgtcttccggcggctcgcggccgagtactccgtccaggatctctgccccggcatcgccatcgtctgcgacttccagcccgtcctcattctctagctcgtcgacgccagtgggtgatgccgttccagaaacgcaaatcgctctgaggaggttgcctggtggccgggctcctgatgggctgtggccttcaatgcggagtctgtcttcttctttccagctcgaatcaaaggggaaaaagatttctagtagctcctctgcagatcaggccaagacgagggatgcagcacccgctgataggaagaggagcccattgagaggtagagctacccctgagcaatcggagaatccacatgccaaggtgattgatcatcatcgctggcctgctatgatggggggcagggtgtctgcaagcacaatgtccaagagcatggatctcactgataagatcagtaggtctgctcttccatcagttccgtcacgtggtgtttcaccgaagcgaacaacagtgtcctctgctgcaaataccttgtcaagaagtattgatcttgctgataaaattgatcggctggtctcttcgtcaatgtcatcacaaggggaatcaccaagaaagtcaccttgtaatggtgcagatgatgtgtccaaaaaggttggtgttcgtaaagatctcaaactctcatccttggcaatatcaagaagggtgtcaccagtaacaacagatgataaaattgatcggctggtctcttcgtcaatgtcatcacaagggggatcaccaagaaagtcaccttgtaacggtgcagatgatgtgtccaaaaaggtcggtgttcgtaaagatctcaaactctcatccttggcaatatcaagaagggtgtcaccaataacaacagctgcatcagatggcactagaaccttatcaggaagcatggatcttactgaaaaagataacagtacactctcgccagtttcatcacccagcatttcaccaagtgcatcattatcaagtgtgtctaatgccgcatcacagactactacaaagtcatccgagagattaattggacctgtttccaacctgtcctcatcgagaggactttcacctagaagaacaacttctggtggcattgttgatttaatgaaaagcattgatttccctgaaaaagataggagaccagcttcatcaagagggttttcgccaaggaggagactcgtgtctgatggtgttaatgatattgggaaaaatatggattttgctgaaaaggatagcagagtagtcagctcatcaattccatctcgaggggtttctccaaggagaagacttgcctctgatggtgttgatactatgtgcaggagctcggagttttctggaaaggataacaggccatccacctcatcttccacatcacgtggaatgtctccccgaagaaggcttgcttctgatggcataagtgctgtaaccaaaggcatggactttggtgataatgctaacagaccatcaacctctaaaggagtgtcacgagggatttcaccaagacttcaattagcctctgatggtgttggcaatgtatcaaaaggcacagatcttgctgatggactggacaggccatcaacctcatatgcaacaccgcgaggtatgtcaccacgacgcagggttgcatctgatgccagcaatgccacttcagaaaggatcaagttcaccaaagaggattctggaactgtgtcctcttcagttgcacctagaggggtctcaacattaagacaacttgcttctgatggtgttgaatctgtctcaaaaagtatggatcttgttgagaaagatactagacctactacctcatcagcttcatcacgagggctttcaccaagaaggcgactttcctcagatggtgtcaatgtgatttcaaagagcatggatcttgttgaaaacaataacaaacttgtcaccatgtcagctgcagctcgaggggtttcaccaagaagacggctcgcctcagatggtgtcaaagtgacatcaaagagcattgatcttgttgaaaacagtaacaaacccttaacagtgtcagctgcaacacgaggggcttcaccaagaagacggctcacctctgatggtctagcatttatatcaaagagcacaaatattactgaaaaaagtatcagaccttcaacaccgtcaatgtcatcacgagggatgtcaccaagaagacggctggcctctgatggtatcaatgctgtattggacacagaatttgctgacaaaaattgtagaccatcttcctcatcagctgctttacgaggggtttctcccagaagcaggtctgcctctaatgccatatcaacaggcatgactaatgctgaaaatgacagcagaccatccacaacatcaagtccgtcatgtcagactctgcagagcagcaggcttgaatctaatggtgttaacatcctatcaaaagatatggaaatctcatcaactgtatctggttgcacttcagacagtagacttgatggcgctggtgctctagtaaaaagcatagatgtcactgagaaacttactgtgtcaactgaagatggtggtggtgaagacgatcctggaagaatagattctagtgacgtagttactagtgcagtttcatcatcccttgcatctcaagaggtatcatcaagacatgttactgatgacgttaagaatgcgtcagagagtgttggtgcaacgcaaaaaggtaacagaccattatcagtgaaggttccatctcgagtagcttctccaagaagacgacttgcatccgatggcattgatactatatctaaaagcatggattttgctgagaaagataagaaacccatgacagtgtcagttccatcacgtggaatgtcaccaagaagaacagcaagatctgacagtgctgatataatgtcaaaaagtatggattttcctttacaagtgttttctacaagaagagtactaggacctgatggtgctaatgccatgtcaagaagcatggatctaactgataaaattagacagaaaatatcttcaactatgcaatcatccagagtctcaccaaggaaaatgcctcttgcttataacagaataaaaggccctgaaattttatcaggtgatgctgagagccctggttctgctgatggaaatgaaagtcaagaggagaatgccagttcaagtccagatgcaccttcaaatagttcagaaaaatctacacctccaaagcagctagctaggagatcaccttcgccatcacatattttaatatgcccttcatcatcatccaatgcttcatcgacaccatcatttgtctccaggagattaccaagcccatcaaggactagaccttcaacacctgtctcaccatgtagttctgccagatctgattcagcctcttcaattcttagctacattggtgatgctacaagagggaagaagagcccaactcacacggaagatgcccatcagttgcgcctcctgcataataggaacttacaatggtgttttaccacttcttatgttgatgaactgctgtcaattcagaagataagtgctgagactatgttgtatagtgtatgggatgctaactcaaggatgtgtgactctatggttataaaaaggaactatgtacaacagctaaggcaagaggtcaaattgggaattgtcttgaaggagcaaatggattaccttgatcactgggcagcgctgcaaacagagcattcttcttctttatccagcgcaactgaagctcttaaagcaagcacattgcgtcttccagtttcaggaggagctaaggccgatgtacttactgttaagaatgctgtcagttcagcagttgacattatgcaagcaatggggtcatccgtttgccatttgctatcaaagttacaggcttcacactctctggttacagaactttcagctgttgctgctaaagaaagtaccttactcaacgagtacagagaactcttggcaacagcagcagcactacaggtccaagagtcgagcctaaggacacagctcatacaagaaacagagtgaacaggttaaggtcctgtatttctaactaggaagatagaagtaaacaccattcgttagtttcagtgactgctgcatatgtgtacctttgatgtcgttttgtttttcctttgctcttccttttcccccccacttattagctagctcatatttctttacatttctactcccccccccccccctgttcttttctgttcgaacaacttacatggaagataagggaagcaacatggaaatggaatcatggatttactccatgacaaagctgccaatgtggtcttttattgcatcctagaccaatgagccaaaaactgaaagctttgttgtaagctgtaaatctgagcagttatgtgtccttcagtgtaatgcctttggatgt

SEQ ID NO: 217293 - DNA, 5165 bp, Zea Mays
ggtacttttaacggggacttgcctgtactaatcatcataactaagccactagttagtcgtcctcgtcccggtggcctggacgaccgggcagcgggcacccctccaccaccatttaatccgcttctagcttgtttctctatctctctctctacccccatctctggcagcttggcttcgccattacttggcttgcaggagctggccgtggagttcccgtgaggtggagaccaagccatgactgactcgctcgaccctacccgcacccgaaagagacgcttcgattcctatgcataaataggaaaaaaggagaggaggaattcgagaaaatcaccgcctctcttcctttcttcatcgccctgcccttttctcttctcctctcctctccacctaccgaatcccgtcgctgggggtcctcgatctggtcgggacgtgcggtagattggtggtggcttcgtggcgctatcaatgctggtggatttgagcaggggcggtgggtgcgcggatagacgcctgagaaatccgggtgcccggggcagtgctgctccggaaatctgacctgccggcggagaagaattacactaacggccatgctgatggcccggtgaagcgcaaggtagccgcgatgccagcagcggcacctactactccaaggaggcacccgtcaccgaatgccggcggtcgggcgtcgtccccgacgccagctgggtcacaggcgaagaggtcccagtccaccgaacggcggccggtgactccgtcaaggccgtcttccggcggctcgcggccgagtactccgtccaggatctctgccccggcatcgccatcgtctgcgacttccagcccgtcctcattctctagctcgtcgacgccagtgggtgatgccgttccagaaacgcaaatcgctctgaggaggttgcctggtggccgggctcctgatgggctgtggccttcaatgcggagtctgtcttcttctttccagctcgaatcaaaggggaaaaagatttctagtagctcctctgcagatcaggccaagacgagggatgcagcacccgctgataggaagaggagcccattgagaggtagagctacccctgagcaatcggagaatccacatgccaaggtgattgatcatcatcgctggcctgctatgatggggggcagggtgtctgcaagcacaatgtccaagagcatggatctcactgataagatcagtaggtctgctcttccatcagttccgtcacgtggtgtttcaccgaagcgaacaacagtgtcctctgctgcaaataccttgtcaagaagtattgatcttgctgataaaattgatcggctggtctcttcgtcaatgtcatcacaaggggaatcaccaagaaagtcaccttgtaatggtgcagatgatgtgtccaaaaaggttggtgttcgtaaagatctcaaactctcatccttggcaatatcaagaagggtgtcaccagtaacaacagatgataaaattgatcggctggtctcttcgtcaatgtcatcacaagggggatcaccaagaaagtcaccttgtaacggtgcagatgatgtgtccaaaaaggtcggtgttcgtaaagatctcaaactctcatccttggcaatatcaagaagggtgtcaccaataacaacagctgcatcagatggcactagaaccttatcaggaagcatggatcttactgaaaaagataacagtacactctcgccagtttcatcacccagcatttcaccaagtgcatcattatcaagtgtgtctaatgccgcatcacagactactacaaagtcatccgagagattaattggacctgtttccaacctgtcctcatcgagaggactttcacctagaagaacaacttctggtggcattgttgatttaatgaaaagcattgatttccctgaaaaagataggagaccagcttcatcaagagggttttcgccaaggaggagactcgtgtctgatggtgttaatgatattgggaaaaatatggattttgctgaaaaggatagcagagtagtcagctcatcaattccatctcgaggggtttctccaaggagaagacttgcctctgatggtgttgatactatgtgcaggagctcggagttttctggaaaggataacaggccatccacctcatcttccacatcacgtggaatgtctccccgaagaaggcttgcttctgatggcataagtgctgtaaccaaaggcatggactttggtgataatgctaacagaccatcaacctctaaaggagtgtcacgagggatttcaccaagacttcaattagcctctgatggtgttggcaatgtatcaaaaggcacagatcttgctgatggactggacaggccatcaacctcatatgcaacaccgcgaggtatgtcaccacgacgcagggttgcatctgatgccagcaatgccacttcagaaaggatcaagttcaccaaagaggattctggaactgtgtcctcttcagttgcacctagaggggtctcaacattaagacaacttgcttctgatggtgttgaatctgtctcaaaaagtatggatcttgttgagaaagatactagacctactacctcatcagcttcatcacgagggctttcaccaagaaggcgactttcctcagatggtgtcaatgtgatttcaaagagcatggatcttgttgaaaacaataacaaacttgtcaccatgtcagctgcagctcgaggggtttcaccaagaagacggctcgcctcagatggtgtcaaagtgacatcaaagagcattgatcttgttgaaaacagtaacaaacccttaacagtgtcagctgcaacacgaggggcttcaccaagaagacggctcacctctgatggtctagcatttatatcaaagagcacaaatattactgaaaaaagtatcagaccttcaacaccgtcaatgtcatcacgagggatgtcaccaagaagacggctggcctctgatggtatcaatgctgtattggacacagaatttgctgacaaaaattgtagaccatcttcctcatcagctgctttacgaggggtttctcccagaagcaggtctgcctctaatgccatatcaacaggcatgactaatgctgaaaatgacagcagaccatccacaacatcaagtccgtcatgtcagactctgcagagcagcaggcttgaatctaatggtgttaacatcctatcaaaagatatggaaatctcatcaactgtatctggttgcacttcagacagtagacttgatggcgctggtgctctagtaaaaagcatagatgtcactgagaaacttactgtgtcaactgaagatggtggtggtgaagacgatcctggaagaatagattctagtgacgtagttactagtgcagtttcatcatcccttgcatctcaagaggtatcatcaagacatgttactgatgacgttaagaatgcgtcagagagtgttggtgcaacgcaaaaaggtaacagaccattatcagtgaaggttccatctcgagtagcttctccaagaagacgacttgcatccgatggcattgatactatatctaaaagcatggattttgctgagaaagataagaaacccatgacagtgtcagttccatcacgtggaatgtcaccaagaagaacagcaagatctgacagtgctgatataatgtcaaaaagtatggattttcctttacaagtgttttctacaagaagagtactaggacctgatggtgctaatgccatgtcaagaagcatggatctaactgataaaattagacagaaaatatcttcaactatgcaatcatccagagtctcaccaaggaaaatgcctcttgcttataacagaataaaaggccctgaaattttatcaggtgatgctgagagccctggttctgctgatggaaatgaaagtcaagaggagaatgccagttcaagtccagatgcaccttcaaatagttcagaaaaatctacacctccaaagcagctagctaggagatcaccttcgccatcacatattttaatatgcccttcatcatcatccaatgcttcatcgacaccatcatttgtctccaggagattaccaagcccatcaaggactagaccttcaacacctgtctcaccatgtagttctgccagatctgattcagcctcttcaattcttagctacattggtgatgctacaagagggaagaagagcccaactcacacggaagatgcccatcagttgcgcctcctgcataataggaacttacaatggtgttttaccacttcttatgttgatgaactgctgtcaattcagaagataagtgctgagactatgttgtatagtgtatgggatgctaactcaaggatgtgtgactctatggttataaaaaggaactatgtacaacagctaaggcaagaggtcaaattgggaattgtcttgaaggagcaaatggattaccttgatcactgggcagcgctgcaaacagagcattcttcttctttatccagcgcaactgaagctcttaaagcaagcacattgcgtcttccagtttcaggaggagctaaggccgatgtacttactgttaagaatgctgtcagttcagcagttgacattatgcaagcaatggggtcatccgtttgccatttgctatcaaagttacaggcttcacactctctggttacagaactttcagctgttgctgctaaagaaagtaccttactcaacgagtacagagaactcttggcaacagcagcagcactacaggtccaagagtcgagcctaaggacacagctcatacaagaaacagagtgaacaggttaaggtcctgtatttctaactaggaagatagaagtaaacaccattcgttagtttcagtgactgctgcatatgtgtacctttgatgtcgttttgtttttcctttgctcttccttttcccccccacttattagctagctcatatttctttacatttctactcccccccccccccctgttcttttctgttcgaacaacttacatggaagataagggaagcaacatggaaatggaatcatggatttactccatgacaaagctgccaatgtggtcttttattgcatcctagaccaatgagccaaaaactgaaagctttgttgtaagctgtaaatctgagcagttatgtgtccttcagtgtaatgcctttggatgt

SEQ ID NO: 217294 - DNA, 676 bp, Zea Mays
ggcgcctctcagctctttctgctggctcatgttccatttctcgacgacttgaagtaagtagagtggagctgctgcttcaagtgggaacattttgcgttgcaataggagcattaattgcaggaatatttggcatgaatcttaaatcatatctggaaacaaatgcgtgggcattttgggtgacgactggtggaatagtagttggagcagtagctggatttttcgtcgtatactcgtatctaagggctaggaagatattgtgaaccctgtaacatctgtatgttaggatattttttggagctgtaaataatgtcattagcacatccagtgagggatatgcgtgttccaaactctgcatggtttgtgtactctgtactcttgcgagaatgttgccaccctatgtatttgtagttgcccgttgagacggaaataggttagaactcagaaacaaatatttggtttccaccctagacgatttctcgtagctgcattttactatcctgtattgaaaattcgtgtcaacatctgtcttaatcttctaaattttggtaatgcactaaatgcttggggacctcggtgctatcttgagcttgaacttgaaggtacattttactcaaactccaatgaagccagtcaccaagtcctggatctgccgcaatcacatgaagataaccacgcg

SEQ ID NO: 217295 - DNA, 802 bp, Zea Mays
ttcagcttcctgaccacacaagggacagactgaaggaggaagaggaagaaattgaaatgttattggaaaattatcttcaacgatgtgaatcatgccatggtcaagcagagagacttctgaattctgcaagagagatggaagactcgatttctgtgaacttaagttctcgacgacttgaagtaagtagagtggagctgctgcttcaagtgggaacattttgcgttgcaataggagcattaattgcaggaatatttggcatgaatcttaaatcatatctggaaacaaatgcgtgggcattttgggtgacgactggtggaatagtagttggagcagtagctggatttttcgtcgtatactcgtatctaagggctaggaagatattgtgaaccctgtaacatctgtatgttaggatattttttggagctgtaaataatgtcattagcacatccagtgagggatatgcgtgttccaaactctgcatggtttgtgtactctgtactcttgcgagaatgttgccaccctatgtatttgtagttgcccgttgagacggaaataggttagaactcagaaacaaatatttggtttccaccctagacgatttctcgtagctgcattttactatcctgtattgaaaattcgtgtcaacatctgtcttaatcttctaaattttggtaatgcactaaatgcttggggacctcggtgctatcttgagcttgaacttgaaggtacattttactcaaactccaatgaagccagtcaccaagtcctggatctgccgcaatcacatgaagataaccacgcg

SEQ ID NO: 217296 - DNA, 1811 bp, Zea Mays
aattatcttgtgttggccaaacgagccacccttgttctgctaagaactgaaagaacgtttcagtgattcactcgcatagttaaaaaatattattttatattatagattatattatttatagaatggagtttaagtaatgagaggatgatgcgtaagctgctggatggaggtagtataaaggtaagaggtaatataaagcgctaaaaaggttcccacctccaacgcccgccttcgtgaacccagctgcgggatggaggatcggacggccagggtctctccggggaggagaactcacagccaccatctcagccaacaggtccggatagcgtctcgtcgtcctcccgcctcgctccctccgtcgccttctccaacgggaaatagccattaccgaaggaggcccgtcagcagcgtcggggcaaaaatttcaccgcgcgcgatcaagcgattgatgcccccgtcatggcgtccgtgccgctgtcctcgccgtcgcaggccggcctccttggccccccgttcccgctcctgccaccgcccttcggtgcatgcctccgctaccgcttgccgaggctgcctacaggcctctcgtcgagcgtgaggaagggagggctcctgccgctgccgctcctggtgcctccccgggccgcggggggcaaggacgggcgggccgtgaccaaggaggagttggaagaggaggaagaggagttcgaggtgaccaaggagggcgaggaggttaatcaggagacaggaggaggcagtggagccaccaaggaggcggcggcaaggggttcgggtcgattcgcggcggactacgtctcgctcggcgtcagggagcccgtctacgaggtgatagaagtgagatcaaatgggaggatgtccaccaagaaaataagcaggcggcagctactgaaatctagtggtctccgcctacgagatactagaagtgttgacccatcactatggttaatgaattcaatgccttccctgctggtacgtgagcaagctattttactcaatcttggttcgttgcgagcaattgctatgtatgcgcgtgttcttatattcaactataacagcccaggagggaaggcctttctagggttattactgtctaggttaaatccaagaaacatcaatggtgggcctgcaatgccttttcagcttgaggttgttgaagctgcacttctttctagaatacaaagattggagcagagactaatgaaaattgagcctcatgtggctacattgctagaagttctgccaaatcgcttgacagctgatgtgttggagcagcttcgtctaagtaaacaagcattggttgagctgggatcacgagcaggtgacctcaagcagatgcttatcgatctcctagatgatcctcatgaaatcagacgaatatgcataatggggagaaattgcacacttgatagattgagtgatattgtggagtgcactgttcctttagagaagcagattgctgaagaggaagaggaagaaattgaaatgttattggaaaattatcttcaacgatgtgaatcatgccatggtcaagcagagagacttctgaattctgcaagagagatggaagactcgatttctgtgaacttaagttctcgacgacttgaagtaagtagagtggagctgctgcttcaagtgggaacattttgcgttgcaataggagcattaattgcaggaatatttggcatgaatcttaaatcatatctggaaacaaatgcggtacattttactcaaactccaatgaagccagtcaccaagtcctggatctgccgcaatcacatgaagataaccacgcg

SEQ ID NO: 217297 - DNA, 369 bp, Zea Mays
tggatgcccttctcgaccttcaagctcgtgtcggtgcgggcggcatcgggttccccgcggccgatcgatcctacctcggcaggcagcacatccccaccaaaggggtcgtgggcatcgacgacgtggacagcgaggcctacgtctcgcagttcttcgtcgatggctcgttgttcatcgctggattttggaagcgcgtcagagtctacgacgccgagaaaggatggaagacccattaggatataagctgcaaaagtgtgcactagatggttcctgacacgcccggatttaagggcaaacctgggtggtctcaaatgtgtactaggatcaagtctcacacatatgataactcatgttacataaaacaatgtc

SEQ ID NO: 217298 - DNA, 2849 bp, Zea Mays
atggcgcgggcacgcgctgcgatcgagggaggtgaggtaggcgtggaagacgaagctgacggcggtgtggaggcagaagccgccgccgaagtacacaaggtttggaagcttcttactgcttccaccattgtcatcggtcttcttggcgagcggcgggaggaaagggcggacggcaacatctggggagacggcgcggtcgttggaggcgacgtccatagcagattagcagcgtccgtggcggccgggacgccgggacgcgagcatccggtccccgctctctacggggacgcgtggacggcgctccagtgggtggccgcgcactccgtgggccgggggcaggaaccctggctgactgcccacgcggacctcgggcgcgtccacgtcggcggagagagcgcgggcgcgaacattgcccaccacgccgcgatgcgcgctggcagagaggagctgggccacggcgtgaagctcagctcgctcgtgatgatccatccctacttcctgggaggcgagagctccgagacagacgacatgggcgtagcgttgctccgcgagctcgtccggctgtggccggtggtgtgcccgggcacgagcgggtgcgatgacgacccgttgatcaatccgatggcagagggtgcccccaatctcgctagcttggggtgccgacgcgtactggtgtgcgtcgggggaaaggacccgatgagaggcagaggaaggctgtattgtgagaagctgaagagaagtgggtggcgcggggaggtggatgactgggaggcggacggccagggacacggtttccatctctcgtgccccatgagcgcagaggcggaggcgcaagtccgggtcatcgctgagtttctgacctacggatgacatatctgttttcccactccttcacgcggccatggtgcattgttctcgaatctgatatacattttttgtttcgagtttggattgaggacatgcatgtttatattttatatttttatctactatttcataagcttaataaatgtttggctatgggttccagattctcaattttcatcagaagaaggggttactgagctgtattagacttacctttgggttaatatctattggtgcaagacccagattggctatacctttgtaatcgaatttgctttgcctggctaaagtttatgacaaaatcgtcgcattgctcacattctctttaatacagtcctggtgaccttgtcgcataacatgagcagtcatttagtatacatgagtgatgagtcgtgaggcttctcataatagagcagtgttcctgcacaaatgggagaaagggctggtagtctcacatgcaaagagtccaggagcagccacctatgatggatcataacccaacagttgtaaaagaaatcaatatggggagaatttctcttggaccaacttatttgatgatatctcttgctttgatatccaccttcaggcatcctaggtgtgttttgtttgtcctacaaggcatgcattatgtcttggtcaatcttttacttccattgctgcatcatggggctttgagaaatactgcttccttgacttgtccttttgctttcattgaccaaacacactttcctttatcatcttgcaaaaggcatgctgtttgagcaagacataagttatacacataaattttatgatatgcgtggactgaaggctaaaaggctttttaaagctaccccaacttgcttgggataaaaggcttttgttgttgttgttgttgcatgaactgaaggatcttggtagaatttacagagaaatgctgtagcgatttgatctgttgcaatatcaatgattgagttagggttgaccatcttgcatatgttcgttggggatcagaagtacaacacaatggatgctctactatcagatatttgtatcagcacatctgctgctccaacctatcttcctgcatactctacttcaagacagaagatttccatgggaacaccaaggagttccatcctattgatggaggagtagctgccaataatctggtgcaatatttgtcagtaattatgcatcgcacttcaatcatgacgcaaggctttagttgccatttgagaagtaaccaagcagatattcaaggaaagcccagattcttcccaataaaacctatggatcatgactgatttttggtcatttcactaggcaggctcagcaaagtttgaagcaaactacaacgcacaaacaactaaatcatggagagtgttgagttggttgcttggcagtggatccactcccttagtatctattttcacacaggcaagtgcagatatggtggatattcatatctctgctagtttcaaagccttgcattctgagtaaaacgatctgagcattcaggatgatactctacaaggactgtgtcctcggttgatgttgcaaccgaggaaaaaatggagaaacttgccagagttagagatatgctactaaagaaacctgtctcacaggcgaatttggaaactggctatatggtgcgtgcctgtcataggacagagctgactaatgacgaagctctcaagagatttgcgaagctgctgtctgatgaaaggcaaattcgtaaggcaagatggccaaaatgaagaaagcccttgtggttgtttcaacacacagagaactctgcattacttcaattaagaattatggttgatattatttgttgatatgaattgtaacaataaaacaacttgtattggatcatgctgacactatgaattgatgatgttggcttctgccgggtgccggctgtcttttgtagcgtgtgaaggaatggaaaatattaatattctttttgataaatataagcattggattacttgtatagt

SEQ ID NO: 217299 - DNA, 2821 bp, Zea Mays
atggcgcgggcacgcgctgcgatcgagggaggtgaggtaggcgtggaagacgaagctgacggcggtgtggaggcagaagccgccgccgaagtacacaaggtttggaagcttcttactgcttccaccattgtcatcggtcttcttggcgagcggcgggaggaaagggcggacggcaacatctggggagacggcgcggtcgttggaggcgacgtccatagcagattagcagcgtccgtggcggccgggacgccgggacgcgagcatccggtccccgctctctacggggacgcgtggacggcgctccagtgggtggccgcgcactccgtgggccgggggcaggaaccctggctgactgcccacgcggacctcgggcgcgtccacgtcggcggagagagcgcgggcgcgaacattgcccaccacgccgcgatgcgcgctggcagagaggagctgggccacggcgtgaagctcagctcgctcgtgatgatccatccctacttcctgggaggcgagagctccgagacagacgacatgggcgtagcgttgctccgcgagctcgtccggctgtggccggtggtgtgcccgggcacgagcgggtgcgatgacgacccgttgatcaatccgatggcagagggtgcccccaatctcgctagcttggggtgccgacgcgtactggtgtgcgtcgggggaaaggacccgatgagaggcagaggaaggctgtattgtgagaagctgaagagaagtgggtggcgcggggaggtggatgactgggaggcggacggccagggacacggtttccatctctcgtgccccatgagcgcagaggcggaggcgcaagtccgggtcatcgctgagtttctgacctacggatgacatatctgttttcccactccttcacgcggccatggtgcattgttctcgaatctgatatacattttttgtttcgagtttggattgaggacatgcatgtttatattttatatttttatctactatttcataagcttaataaatgtttggctatgggttccagattctcaattttcatcagaagaaggggttactgagctgtattagacttacctttgggttaatatctattggtgcaagacccagattggctatacctttgtaatcgaatttgctttgcctggctaaagtttatgacaaaatcgtcgcattgctcacattctctttaatacagtcctggtgaccttgtcgcataacatgagcagtcatttagtatacatgagtgatgagtcgtgaggcttctcataatagagcagtgttcctgcacaaatgggagaaagggctggtagtctcacatgcaaagagtccaggagcagccacctatgatggatcataacccaacagttgtaaaagaaatcaatatggggagaatttctcttggaccaacttatttgatgatatctcttgctttgatatccaccttcaggcatcctaggtgtgttttgtttgtcctacaaggcatgcattatgtcttggtcaatcttttacttccattgctgcatcatggggctttgagaaatactgcttccttgacttgtccttttgctttcattgaccaaacacactttcctttatcatcttgcaaaaggcatgctgtttgagcaagacataagttatacacataaattttatgatatgcgtggactgaaggctaaaaggctttttaaagctaccccaacttgcttgggataaaaggcttttgttgttgttgttgttgcatgaactgaaggatcttggtagaatttacagagaaatgctgtagcgatttgatctgttgcaatatcaatgattgagttagggttgaccatcttgcatatgttcgttggggatcagaagtacaacacaatggatgctctactatcagatatttgtatcagcacatctgctgctccaacctatcttcctgcatactctacttcaagacagaagatttccatgggaacaccaaggagttccatcctattgatggaggagtagctgccaataatctggtgcaatatttgtcagtaattatgcatcgcacttcaatcatgacgcaaggttgatacattatttgcacttctatgtgtaaaatcttgcaaagtgtcaacatggctttagttgccatttgagaagtaaccaagcagatattcaaggaaagcccagattcttcccaataaaacctatggatcatgactgatttttggtcatttcactaggcaggctcagcaaagtttgaagcaaactacaacgcacaaacaactaaatcatggagagtgttgagttggttgcttggcagtggatccactcccttagtatctattttcacacaggatgatactctacaaggactgtgtcctcggttgatgttgcaaccgaggaaaaaatggagaaacttgccagagttagagatatgctactaaagaaacctgtctcacaggcgaatttggaaactggctatatggtgcgtgcctgtcataggacagagctgactaatgacgaagctctcaagagatttgcgaagctgctgtctgatgaaaggcaaattcgtaaggcaagatggccaaaatgaagaaagcccttgtggttgtttcaacacacagagaactctgcattacttcaattaagaattatggttgatattatttgttgatatgaattgtaacaataaaacaacttgtattggatcatgctgacactatgaattgatgatgttggcttctgccgggtgccggctgtcttttgtagcgtgtgaaggaatggaaaatattaatattctttttgataaatataagcattggattacttgtatagt

SEQ ID NO: 217300 - DNA, 1823 bp, Zea Mays
ggggagaccggatgccgttgcaggtagtctaatgagtagcaagccagaaccccagtaaacccaaacccaactcctccctccccacttccccagtccccagtcctcgcggccgaaacccttgctcccttccgcgatggccggccggggcgcctccccggccgcggcggccgccgtccaggtgcgctgcgccggctgccgcggcgtgctcgccgtggctcccggcatgaccgagttcatctgccccaagtgtcgcatggcgcagcgcctcccgccggagctcatgccgccctccccgcccaaggcctccccgactccgcctccctcaggtccaactccgcctccaccacctccaccttcgctgccgcctccgcctccgcctccgcctcagccagtgccgcaccctctgacccgccgctccgctccccgggcgcagggcgtggaccccaccaagatccagctcccctgcgcgcgctgcaaggccgtcctcaacgtgccccacggcctcgatcgcttccgctgcccgcagtgcggcgtcgacctcgctgttgacttgtccaagctccgccatttccttgcatctgctggcccaggcttttttccgcccccactcccacctcccccacccccgcaacccccagtgccaatgcctcatctgccctttctgccgatgatgccacgccttccattgcccatgctgccgatgctctctcctgctgagctaccggaggagatcaatgaggttgcagttgatgttgagcgcgacgaagatgaaagtggcacttttggggaaactttcattgattatagacctcccaagctatcttttggttttcctcatcctgaccctgtagtagaaacatcctccttgtcagcagtgcaacctccagaacctacttacaagttgactatcatgaaagaattggatgaaaccaatgcattatcttccttacagattgaaacaatagtgtatgcttgtcagaggcatcatcatcatcttccaactggagctagagcaggtttcttcatcggtgatggggctggtgttggtaaaggacgtaccgttgctggattgatctgggaaaattggcagcagggaaggcataaagctttgtggatatcaattggttcagacctgaaatatgacgctcgcagagatctggatgatgttggtgcaaaatgtgtggaagtgcacgctttaaataagcttccatattctaagctagactctaaaacctttgggatcacagatggagttgtttttgtaacttatagcagcttgatagcatcctctgagaaccgttcccgtttgcaacagttggtacagtggtgcgggtctgagtttgatggtcttctggtgttcgacgagtgccacaaggccaaaaatctgattcctgaggcagggagccagcccacccgcactggtaaagctgttcttgagattcaggatatgttacctcaagcacgggttgtttattgttcagcgactggtgcatctgagcctcgaaatttaggttatatggttcggcttggtctctggggagatggaacatcgtttgagaatttcaaccaatttttaggtgctcttgagaaaggaggtgtgggtgctcttgaacttgttgctatggacatgaaagccaggggaatgtatgtttgccgtactctaagttacaagggtgctaactttgatatcctagaatcacttctggaggaaagaatgatggatatttttgttagtatgattgctcattgacatgaagtagtattcttttaaatttaattaacttggcgagaacaaagtggtagaaactgaaaggagacaatgt

SEQ ID NO: 217301 - DNA, 1472 bp, Zea Mays
atggccggccggggcgcctccccggccgcggcggccgccgtccaggtgcgctgcgccggctgccgcggcgtgctcgccgtggctcccggcatgaccgagttcatctgccccaagtgtcgcatggcgcagcgcctcccgccggagctcatgccgccctccccgcccaaggcctccccgactccgcctccctcaggtccaactccgcctccaccacctccaccttcgctgccgcctccgcctccgcctccgcctcagccagtgccgcaccctctgacccgccgctccgctccccgggcgcagggcgtggaccccaccaagatccagctcccctgcgcgcgctgcaaggccgtcctcaacgtgccccacggcctcgatcgcttccgctgcccgcagtgcggcgtcgacctcgctgttgacttgtccaagctccgccatttccttgcatctgctggcccaggcttttttccgcccccactcccacctcccccacccccgcaacccccagtgccaatgcctcatctgccctttctgccgatgatgccacgccttccattgcccatgctgccgatgctctctcctgctgagctaccggaggagatcaatgaggttgcagttgatgttgagcgcgacgaagatgaaagtggcacttttggggaaactttcattgattatagacctcccaagctatcttttggttttcctcatcctgaccctgtagtagaaacatcctccttgtcagcagtgcaacctccagaacctacttacaagttgactatcatgaaagaattggatgaaaccaatgcattatcttccttacagattgaaacaatagtgtatgcttgtcagaggcatcatcatcatcttccaactggagctagagcaggtttcttcatcggtgatggggctggtgttggtaaaggacgtaccgttgctggattgatctgggaaaattggcagcagggaaggcataaagctttgtggatatcaattggttcagacctgaaatatgacgctcgcagagatctggatgatgttggtgcaaaatgtgtggaagtgcacgctttaaataagcttccatattctaagctagactctaaaacctttgggatcacagatggagttgtttttgtaacttatagcagcttgatagcatcctctgagaaccgttcccgtttgcaacagttggtacagtggtgcgggtctgagtttgatggtcttctggtgttcgacgagtgccacaaggccaaaaatctgattcctgaggcagggagccagcccacccgcactggtaaagctgttcttgagattcaggatatgttacctcaagcacgggttgtttattgttcagcgactggtgcatctgagcctcgaaatttaggttatatggttcggcttggtctctggggagatggaacatcgtttgagaatttcaaccaatttttagggtggtggaagaaatctattgcatatgc

SEQ ID NO: 217302 - DNA, 2972 bp, Zea Mays
attgttacctgtctcggctgctcctccacgacaggaaaccctgtaccaaaaccctcgtcactccatcctcgtccctcccggcgccggaaaaaccagttcgcgtccatcctcctcccctcccacttcgccatggaccccagcttccggttcgacccggacagctccgacgacgaggcggcgggtgctccaccgcggggcggcccggtgcagtcgccgtgggagttctcgtcgtacgcggagtccgtggcggcggagcacgcgcgccgccgcaccacctccatcgacgagaaaatctcgctcctgcgccaggaacgcgggaatcccgtcgttcccgatgactcggggagcgacgtgagcggcagcggggaggatgatagcgacgacgaggagatagagggggagagcggtgacgaggaggacgagctggaggagagcgaggatgagggcggggtcgaagggggcactgatgacgaggagattgaggggagtggcgatgaggaggcgatcggcgatagggagggcgatgaggacgggggtgacgagaagggaggaggcgagctgggagaagaggatgatgcccatgaggaagaagatacggtcgatcagaatgacacgagtggaccagttgatccttctaattttttctcttcttcggatcgggcatcatttcatgcaaattcattccttgagcttaacttgtctcgtccgctagtgcgagcttgtgaagcacttggctaccagaaaccaactccgattcaggctgcttgcattcctctggcattaactggaagggacatctgtggtagtgctattacaggatctggaaagctgctttctctttgcctgtgttggaacgtctactttttcgtccaaagcgtgtacctgcaattagggtgcttattcttactccaaccagagagttggctgctcagattcatagtatggttgagaagttagcccaattcactgatatcagatgttgtctcatcgttggaggtctttcaactaagattcaagaagttgctctaaggtcaatgcctgacatagttgtagcaacccctgggcgcataatagatcatctgcgcaattctctttctgttgggcttgaagatctagctgttgtgatccttgatgaggctgatcgcttgcttgaattgggcttcagtgctgaaattcaagaactgattcgtatgtgtcctaaaaggaggcaaactatgcttttctctgctacaatgacagaagaaattgatgaacttgtaaagctttcactaaacaagcctgtacgccttgaagctgatccttctctgaaacggcctgcaacattgactgaagaggttgttaggatacgacgagcacgtgagtcaaatcaagaagctgttcttcttgcactctgtttgaagactttcaagcgaagtgttatcatttttagtgggacaaagcaatctgcacacaggttaaaaataatatttggtctctctggcatgaaagcagctgaacttcatggcaaccttacacaggcccagcggcttgaggctctggaacttttcaagaaaaaagaagtagattttttgattgcaactgatgtcgctgctcgtgggattgatattgttggtgttcagactgtaataaatttcgcatgcccaagagatgtgaaaacttatcttcatcgtgttggccgcactgcgcgggcaggaagagaaggctatgctgtgacatttgtaaccgatgatgatagatgcctcttgaaagcaattgcaaagaaggctggttcacagctgaaaagtcgcattgttgcagagaaacctgtggctgagtgtgcacgactgattgagcaactagaaggccaaatttctatcatcattcgagaagaaagggtggaaagagaagcaagaaaagctgaaatggaaatcgcaaaggcagaaaatatgatagctcataaggatgagatatactcacggccaaagagaacctggtttgctactgaaagggagaagaaacttttggcagcagcggctaaagaatctttggatcacggtaagagtacctctggagttattagtgctaagaaggccgaagaccttcgtctaaaggagaaaaggagacgagaacatgagaagaatctaccaaggaagaagcgccgaagattggaggcccagcgtgagatgttggaagatgaggatgacgagaaaacaaaggaaaatgatagagggaagcaaccaatgaaaggccaatctctagtggatgctgcttaccgaaaggcaaaatcattgaaggcagccagcaaacgggcccctggtgcaaggaaaggaaagaaagagaagaatgaaaggcaacattctgagaaggctccgaacaggcatgaagagatgcgtgacctgttccaaaatgatatgagtgaatggaaacagggacgctcctcaaagaaaaataacaaatttgcgcccaaaaaatcaaggaactcttttaagagcaaagcaaggtacaagcggaagtagaagactcggccatctccgggtttatattacattcccttgtttcaattttgactgactgatcctgaagaaatatctgggatccagatgtttgcagttaattcaagtttgctttaaacatattctcatatcatgtattgaaactcaccgttttctggggtctcttatgatctcgcgaactgtgttgccgttttgtagttcgtaccatcttaaattttagggttatttggtttctatagacttagcttttaggacccgtttggtttgagctattaaagagtagtcccttcgttttagtcccatttagcatataaattgccaaatgatatgactaaaatagcgactaaactgctttagactctggtctcattaagggtgactaaaagagactaaaggaaataattaggtcttagcgatttagagactaaagtggagtaaaatagatggactaaaaaatagttactagaaaccaaacacctt

SEQ ID NO: 217303 - DNA, 1152 bp, Zea Mays
cgcggcatggagcgaacggaccatgtgtggagcaaggaggcccacctggcgggcggggttctcgaccaatcactccagtatccagtctctctctcggctctcctctccccgatttccttccccacccgctgtcagtctcactccccgcgcgcgcgctctctctttcctcgccttcgccgccggcgacgagcttgagctcgagctggttcctcgtatagaagacgacggccgcggtatggagcccatgaacgtagacaacggcggcagcggtggccttgacgcgcagatcgaacagctgatgcagtgccgcccgctcgccgagcaagaggttaaggcactgtgcgagaaggccaaggagatattgatggaggaaagcaacgttcagcctgtcaagagtccagtgacaatatgtggtgatatacatggacaattccacgatcttgtagagcttttccgaattggcgggaagtgtccagacaccaattacttatttatgggagattatgtagatcgtggctactattctgttgagactgtcactatgctagtagcactaaaagtgaggtatccacatcgaattacaatccttcgtggaaaccacgagagtcggcagatcacacaggtgtatggattctacgacgaatgcctacgaaagtatggcaatgcaaatgtatggaagacatttacggatctttttgattattttcctctgacagctctggtggaatctgagattttctgccttcatggtggtctatctccatcaattgaaaatcttgatagtgtgcgcagcttagatcgagtccaagaggttccccatgagggacctatgtgcgatctcttatggtcagatccagacgaccgatgtggttggggcatctcccctcgcggtgctggctacactttcgggcaggacatatcagagcagtttaatcacacaaacaatctcaaactcgtagctcgggctcatcaattagttatggagggatataactgggctcatgagcaaaaggttgtcaccatattcagtgctccaaattactgctatcgatgcggcaatatggcatccattttggaagttgacgactgcaacagccacacattcatccagacatccagatgtttttttcggtccccaaaacagacttctta

SEQ ID NO: 217304 - DNA, 1199 bp, Zea Mays
gcggcatggagcgaacggaccatgtgtggagcaaggaggcccacctggcgggcggggttctcgaccaatcactccagtatccagtctctctctcggctctcctctccccgatttccttccccacccgctgtcagtctcactccccgcgcgcgcgctctctctttcctcgccttcgccgccggcgacgagcttgagctcgagctggttcctcgtatagaagacgacggccgcggtatggagcccatgaacgtagacaacggcggcagcggtggccttgacgcgcagatcgaacagctgatgcagtgccgcccgctcgccgagcaagaggttaaggcactgtgcgagaaggccaaggagatattgatggaggaaagcaacgttcagcctgtcaagagtccagtgacaatatgtggtgatatacatggacaattccacgatcttgtagagcttttccgaattggcgggaagtgtccagacaccaattacttatttatgggagattatgtagatcgtggctactattctgttgagactgtcactatgctagtagcactaaaagtgaggtatccacatcgaattacaatccttcgtggaaaccacgagagtcggcagatcacacaggtgtatggattctacgacgaatgcctacgaaagtatggcaatgcaaatgtatggaagacatttacggatctttttgattattttcctctgacagctctggtggaatctgagattttctgccttcatggtggtctatctccatcaattgaaaatcttgatagtgtgcgcagcttagatcgagtccaagaggttccccatgagggacctatgtgcgatctcttatggtcagatccagacgaccgatgtggttggggcatctcccctcgcggtgctggctacactttcgggcaggacatatcagagcagtttaatcacacaaacaatctcaaactcgtagctcgggctcatcaattagttatggagggatataactgggctcatgagcaaaaggttgtcaccatattcagtgctccaaattactgctatcgatgcggcaatatggcatccattttggaagttgacgactgcaacagccacacattcatccaggtgttggcacgcgcgagagatgcgtgctgacacgcagagctttgcatgctgaccaaaaggcttaagaaagaagacaagggagaatgagg

SEQ ID NO: 217305 - DNA, 1770 bp, Zea Mays
atgttcgatacctgcgacatcagctcgattccgggccaccatggatccaacaacgttgaggataatctttctgaagctttggaacaccgaaatttgttgccacggcgcgagctcatcttcgattggagcatagaccatgtcggcggaggaaggagacacgacaaccctgacgtgggcgttggcttggggaatggcgttggacgcggtggtggtgtatcccgaggccgcggaactgccgatattgggcgcggaacgaccggcttgcagcgtggtgttgggcgcgggactgccggtggtctggcgcgaggcacgacgcgtggcgcagcatgcggcattggacgcaactccgcctacctgaagctcagcactggcgcacctacagctgcagagccggtgatggcggaccggcggagcaatggtggttcgccccctagctggagcttcgcgtctcaaagcagccactaccacttggcggcgatgagaggaagctacgcgccacagagcctctggcgcccgtcgccgatgccggtccgtggtgccgccctgtcctcgacgccgcacgttgtggcctcggcgcccgccgagaagaacttcgccgccgacttcctgctgggcggggtgtcgtcggcggtgtccaagaccgtggcggcgcctatcgagcgcgtcaagatgctgctgcagaaccaggacgagctgatccggaccggcaggctgtccgagccgtacaggggcatcggcgactgcttcggccgcaccgtcagggacgagggcttcctgtcgctgtggcgcgggaacaacaccaacgtcatccgctacttccccacgcaggccctcaacttcgcgttcaaggactacttcaagggcctcttcaacttcaacaaggacagggacggctactggaggtggttcgcggggaacatcgcctccggcagcgccgccggggccacgtcgctgctcttcgtctactccctcgactacgccaggacgcgcctcaccagcgactacagggcggcggctaagggcggcgagaggcagttcactggcctcgtcgacgtgtaccggaagacgctccggtccgacggcgtcgtggggctctaccgcgggttcaacgtctccgtggccgggatcgtcgtgtaccgcggcctctacttcggcatgtacgactccttgaagccggtgctgctgacggagaagttgcaggacaacttcttcgcgagcctggcgctcggctggatgatcaccaatggcgccagtctggcctcttacccgctggacactatccggagaaggatgatgatgacctcgggggaggccgtcaagtacaagagctccatggacgccttcgcccagatcgtcaggaacgagggccccaagtcgctcttcaaaggcgccggcgccaacgtcctacgcgccatcgccggcgctggcgcgcttgccggctacgaccagctgcagctcatcttcttcggcaagaagtacggctcagggggcgcgtgaacagggacaagtttcagcgaattcagtaaaactcagcgaatagacgacgacgacgaaaacggcatttgattccttcatttactatattttttttacaggttcacatatttgtatagctcaaaattcacaataagaagcattcagattgcttccatttgttttcgctctgattgattttttttttaaaaaaaaattatgtttgtaagattgcagtgatgtaatataagtactaaaaataataaagagttgcttgaaagcattcagtgttatcaa

SEQ ID NO: 217306 - DNA, 2046 bp, Zea Mays
atagtgattatacgtgtgacaaatcacgcaaaagctggcaacacgatccaataaccatactttgaaacacaggatcgtcaatttgacaccaattcattacatgtggatcaactccggttattggcacacgaaagcacagttgccgtggagtaaatgaacatggaactggctactaacatttgctagtggttaaacagtaaatcatcctaccctacaaatcaaggtcgatgggggcacgaaattattcccaattccctgccctcactgcacatccctagaccacaaactgtataaccatccacagctactcagggtactcatgcacgctacatcgaaacaatctcattgcacatcctttcaagcgcaccctacaaccaatgcttcagggaggaacacagttgatttgcacagttggaaggattagacctatattaacaaattcaattctcttcacaatggactctgcaaaaataagagctcccattcatgatacccactattctgcacagggttttgatagcagagaccgtctgtctccttttaagttttaacagcaaattacaaggattggaggtagagctaggaagtgttaactaactccattccccatctcatcggttttggagctcttgtgctgccgtaagttgaccatccatgttaaaaacaaagaggcaaattttctctatgaaagctattgtatcagcaagaaaataatagcagtgtgctaccttactcttcttgtgcttatgcacatctactgaatcttctgttccctcatgcttcctcttcttttcatgatggccacttttatcttttttcttatccttgtctttgtctttatctttgtccttactccgatccttatgccgatgtttgtgcttcttgtgttccttgtctttgtctttgtgccttttatgcttcttctctttgtccttggactcactttttggtttacccgaaatagtcggtatacctttttcagtctaaggcaaatccacaagagctgtttctcgaagttggaacgcttgccccagagtttccatatcaaagggctgaatataagcaggtttatccctcagatatgcattatgaacaagttgatctaactccattccttctcctttgcgaatttcagtgtctcccacaacattgtgaagataatgtgtatctgatattgccagcggcaaaggtttcttgcaaaagaaatcatggtgtggcagcagtttgtagtggctgatcaaatcaacagcaccagtgagctcccttggtcctgaaatacagagatcgtattatcaatcaaccacatagcagacaaataaggtttcagaaaagataggtgcactgatatatctatgatacaaaatttattctagcatacaatagacattagatgcagtaatgcggctcataaaacaactttgtgcactatgacacaaaatattaaccgtccaagttccaactaacgcattgtgaactgtaaataagtaaataaaacagttaaaattttgccattgtaaaaagaactgtagtaaacagctgactacaagacatactggcctcaactggcaaaaccgcaaaagaatcagcaccagaagtttgtatttaaaattccaagcatataattattactaatttttttgcaaactaatgacgataactaataatcaagcaagctgtgatactaatataactctgttgctttgtgcccacatgaattaggatttagcatttcagatttgcatactgaataattggcatataaggggaactgggaaacatagggatcacaaataatacttacctgcttccatcaaacagattcatttttgttcctttccagcactaaccattaaccaaccattctggttgataataccagccacacaatcaaaatttcagatagtgctacttgattggcataatactgataatggtaacttggaggcaaactatgatataccatgttgtatatgcacctggtgatcaggaaataagaccccaacaaaagataaccacccattttaacaatttcatctctgaaaattg

SEQ ID NO: 217307 - DNA, 5044 bp, Zea Mays
cagcaataggataggacacggatcgacacccgccgctaggcgcaagccacacacaaggaagtgaggcacggcgatatacctcgtggccggaggcgcgcgccaccgctggtccaccgccatgctggtccccgcccagtcggcaccggcgccgccgttgtgctctctccgctccctatcgtcacactacctcctccttccgtcccacttcctcccccctggcggcgtccttcccccgctccgccgcggcgacctcgccatccgcatgggcggcgggccgcgcaccttccccggcggcgtgtccaagtggcagtggaagcgtatgcaggccaagaaggcgcggcagctcctcaaggcgcgtctggcccgcgagcgccagctctacgagatgcgcaagcgcgtcgagctccgcgacgccgtggcgcacctcgagcggccctgggacgcgggctcctccgccggcgcgtccgccgtggctcccactctgctctccgtcgcggccgaggaccagctcagggcgctcgcggaccgcttccaccgccccggcggcgtggacctgtggaacgaccgcgacgggccccgcgtcttcgcgtccccggccacaggcgccgcctccgccaggttcttccccaggaacgccttccacagcatccagccctacgcgctcgtcggcgccggcgtagaggcgagcgcgcagggtgttcgtgagaatgccgcggaggatggcgcgcacagtagcattgcgaccgatcgcgagcctgcggttgaactcacggaaagggatgatggaacatgggagccggtggatgcactcggcgacgccgatgtcagcgacgccggtgactggacctcggaagacgatgacgacgaagctgctgctactcctgaatcagagggcatgggagatgccggttcttggcgtgagcaacgagccatggtaaggagaaatggaaggagcaacggtgcagcaagatgggaatctgcaggtgcaatggctgccggcagcggaaatgacgctgcaactcctgaatcagagggcatggtagatgcgggttcttggcgtgagcagcgagccatggttaggagaaatggaaggagcaacggtgcagcaagatggggagctgccggtgcaacggctgccagcagcgacaatggcagaggttcgagtggaagacggactggctcgaaggccacggcgggcagccatgtcagacagaggggccgaacaggtgctggttcgttgtctgaatctgaggcgacccctggctcgaaggccacggcgcgcagccatgtcagacagaggggccgaacaggtgctggttcgttgtctgaatctgaggtgacccgcgcgcgctccgagccgaaatggggaacgaggaacagagatgacacgaggaatggtgccggccggtggaatgctcctagaaaggatagggtgagtgatggtggtgggtttgattcagagtcaggcagtgcaagagggaaggaaccggaaccaagacggggagccagaagtaagatgaacggaagcgatagtcttagaggaagatcgaaacacaactacagtgctaatgccaacggcggggagaagctgttcaagtacctgagcggtgacggtgacccgcgcgcaaacagcagcaatggctttgcggagggtttggaggcaccaaaatggaagccgagaagaatgaatcgagctaggagcagcaatggtggcagagatgatgacatgggtgggagattcaggcgaggcgatgatagagtggcaagacggctacgggcaaacgcgaaaccaatcaatacgacgagcggagatgatggcagcagcgcggatggtgaacggagcaggaatggaggacgactgctctggggagacgagtactcgctgcggccaacgtcggaattgcgcggctcttggcgggacactggatcgcatagattgtaggctactaccaaagacagactgatgatttcttcgtgctaacttttgtaaaactagacctctgaaaagtaatgtactccaccaaccaacaatggaacatctcaacttttaacggaaacgcacttgcaaactcaaataagcacataaaagatagtccaggattcttgaattacatgagcactgtcagatccatatagcaaggattaacacagggtcccaagacaatagttggacggaccagtgggcaagtctacctggtcacagattacaatatggtcatggctgaccttatgagctcaaaactgtaaaaacatcaacagcaccagtgcttggtaaagttggctccagcttcttgaccgagtcacggatcctgccggcgatctagtggtggttgtcgccggaggggcggtagaggcggttgtaggcggcctcgccgacgaggtagatcccgaaggcgacgatggcgatgccgagcccgggtgtggcgtggcgcagctggttccccgccatagggtgcctcctccactcgtccctccgccggaagaactccccagtcgcgttgagtcccttccctccgctcgccatcgcctccgccgcgctctcgatcccttcccctctctctcacaactgtccgaagcaggaagataggcacgcgcacaataacccaagcccaggtaatatacgcagcccaacgttcagctacagctctatgcctctatggctctatctcatggcgacggcgacgtcgtcggcgccgctgctcccgaagcccgcactccgagctgcgtcctcttcttctctacacaccccaaatccaaggtccaagatacagcgagccaccccagaacagcaggaccaacatgtcgacaccaagtggaggaggcagccgagggccccgccccggcgcggcgagggagccaagagacgcctgcgcagcctcgtccagcgcggggaaatcgacgaagcgctcgtgctcttcgattccatggcctccggcggcggcaggaactgcccgcccgttgtcccctgcaacatcctcatcaagcggctgtgctcggacggccgcgtctccgacgcggagcgcgtgttcgcggcgctcggcccctccgccaccgtcgtcacctacaacaccatggtaaacgggtactgccgcgccggccggatcgaggacgcgcgccgcctcatcaacggcatgccgttcccgccggacacgttcacgttcaacccgctcatccgcgcgctctgcgtccgcgggcgcatccctgacgccctggcggtgttcgacgacatgctccaccggggatgctccccgagcgtcgtcacctacagcatcctcctggacgccacctgcaaggagagcggctacaggcaggccatggcgctcctcgacgagatgcgcgccaagggctgcgagccggacattgtcacgtacaatgtcctcatcaatgccatgtgcaacgagggcgacgttgatgaagctctgaacatattgagcaacctgccgtctcatggatgcaaacctgacgctgtcacgtacacacctgtgttgaagagtctgtgtggctctgaacggtggaaggaggttgaggagctcttggctgagatgaccagcaacaattgtgcgccagatgaggtgacattcaacacaatagtcacttccctgtgtcagcaaggcttggttgatcgtgcaatcgaagtggttgatcatatgtcagagcacggatgcgtcgctgacatcgtcacatacagcagtattcttgatggtttgtgcgacgtagggcgcgttgacgacgcagttgagttgttaagcagactgaaatcctacgggtgcaaacccgatacaattgcctataccactgttctgaagggcctgtgcagcacagaacaatgggagcgtgccgaggagctcatggccgagatgctctgcagcgattgcccccctgacgaagtgacattcaacacagtagttgcttctctatgtcagaaagggttggtcgatcgtgcaatcagagtcgttgagcagatgtcagagaacggttgcagccctgacattgtcacatacaactgtatcatcgatggtctgtgcaacgaaagctgtattgacgatgccatggaattgttaagcgatctgcagtcctgtgggtgcaagcctgatatagttaccttcaacactttactgaagggcctgtgtggcgttgaccggtgggaggatgctgagcagctcatggctaacatgatgcgcagtaactgtccccctgacgaattgacgtttaatacggtaatcacttctttgtgccagaaaggattacttacgcaggcaatcgaaactctgaagataatggctgagaatggttgcgttccgaactcatctacctacagcatagtagtcgatgcacttctgaaggccggaaaggctcaggcagcccttgagctgctgagtggcatgacaaatggtactccagatctgattacttataatacagtaatttccaatcttaccaaggccgggaaaatggaggaagctcttgacttgttgcgtgtgatggtctctaatggcctttgcccggacacgaccacatacagatctttggcctatggtgtctgtagagaagatggaaccgacagggcggtcagaatgctccgcagggtgcaagatacgggcttgtcgcctgacactacattctacaatgatgttcttcttggtttctgtcgagatcggagaacggatcttgccatcgattgctttgctcatatggtctccagtggctgcatgcctgatgaatcgacctacgttatcctccttgaggctcttgcttatgggggtcttttggacgaggcaaaacgacttctagccagcctgtgttctcttggcgttttagataagaagttgatcgaggaagaaagccactactcgtagactgagcgtttgaaccagaaatgagcaagcggacggtccgcgcctgtgggccggacggtccgcgcgtgcgcagaacagattagggtttcgagttttgtgctacggttgttagctatattcacgggattagctcggaatcagttgtgtaaagggtccagcccccctcctctataaatagagaggtctac

SEQ ID NO: 217308 - DNA, 3070 bp, Zea Mays
tttgctggtcgcctattgcttttttaagcaaaacgccggatggggaatatatgagcaaaccagcccggcactcgacaccgtgaaggcggcacccggattctctcgtctgagatcctcgtgctccccgccggccgcttcctggccgccgtgctgcccgaccgcgaggtcaggatcctcggcggcaggctcggcagcttcaacctcaacccggggcccttcaacgtcaaggagcacgtcatcatcaccatcttcgccaactgcggcgtctcctacggcggcggcgacgcttactccatcggcgccatcaccgtcatgaaggcctactacaagcagacgctcagcttcgcatgcgccctcctcatcgtcctcaccacacagatactggggtacggctgggctgggttgctgaggaggtacctggtcgaccctgccgagatgtggtggccttctaaccttgcccaggtctcactcttcagggcgctgcacgagaaagaagaggagggcggcaagtcccgtggcccgtcgcggatgcgcttcttcctcatcgtcttcttcgcgagcttcgcgtactacgcgctgccggggtacctgctgccgatcctgaccttcttctcgtgggcgtgctgggcgtggccgcacagcatcacggcgcagcaggtcgggtccgggtaccacggcctcggcgtcggcgcattcacgctcgactgggcgggcatctcggcgtaccacggcagcccgctggtggcgccgtgggcgtccatcgccaacacggccgtgggattcgtcatgttcatctacgtcatcgtgccgctctgctactggcagttcaacacgttcgacgcccgcaggttccccatcttctccaaccagctcttcacggcgtcgggccagaagtacgacaccaccaaggtgctcaccaaggacttcgacctcaacgtcgccgcctacgacagctacgggaagctctacctcagcccgctcttcgccatctccatcggctccggcttcctgcggttcacggccaccattgtccacgtcctgctcttccatggcagcgacatgtggaagcagagcaagtcggccatgaacgcggtgaagctggacgtgcacgccaagctgatgcagaggtacaggcaggtgccgcagtggtggttcctcatgctgctgctgggcagcgtggtggtgtccctgctcatgtccttcgtctggaaggaggagatgcagctgccgtggtgggggatgctcttcgccttcgcgctcgccttcgtcgtcaccctccccatcggcgtcatccaggccaccactaaccagcaaccggggtacgacatcatcgcgcagttcatgatcggctacgcgctgcccggcaagcccatcgccaacctgctcttcaagatctacggccggatcagcaccgtgcacgcgctatcgttcctcgcagacctcaagctcggccactacatgaagatccccccacggtgcatgtacacggcccagctggtcgggacggtggtcgccggcgtggtgaacctggcggtggcgtggtggatgctggacaacatcgagaacatctgcgacgtggaggcgctgcacccggacagcccgtggacgtgccccaagtaccgcgtcacgttcgacgcgtcggtgatctggggcctgatcggcccggggcggctcttcggccagcacgggctgtaccgcaacctggtgtggctgttcctggtcggcgcggtgctccccgtgccggtgtggctgctgagcagggcgttcccggagaagaagtggatcgcactcatcaacgtgcccgtcatctcgtacgggttcgccgggatgccgccggccacgcccaccaacatcgccacctggctggtgacgggcaccatcttcaactacttcgtcttcaggtaccgcaaggggtggtggcagaagtacaactacgtgctatcggcggcgctcgacgccggcaccgccttcatgggtgtgctcatcttcttcgccctccagaacgcgcaccacgagctcaagtggtggggcacggaggtggatcactgcccactcgcctcctgccccaccgcgccgggcatcgccgtcaagggctgcccggtgttctgaatcttccgacgtgagcgtagtaagcagtgtgtgtaacagtgtaaggaaatgtttgctacgggagccatggattcaaccaagcatcgattaaccgatgcagtgctttgtcactcgtgaatgtaacgccatagcgccagtggtggattcagatttcagagggagaaaaaaacacaggcccagtgtctttggaacgcccgaatttggagtcatctggaaccgacggctcaggtttactgcaaccaacaacttagcacttgcgatctagcgtgtgtaataaaagtctgcacaattcgaagctcggcgtgtcaagaacaagaagcatatgtgcggagaataccggagcggcgaaaactgcatggtttttatttagaacaagaagcatatgacgatacagtttttactccatgtcatagcttcaagaatccacaaaacacaaaggaatatacagactgatatttgataaaagcgagagtatgatcaagcgatctcatgtggtgaaagttggctaataaaagttgctctacgaatacctggttctggagtgccgtcgtccatcctcctcatcctcacagattgtacacttatcacctgaaagcagaaagtccttggctacttgcatgtcttctttgaactctggacgccgggcctctggatgctcaaagtggcagctcgaagatttcctcttcccttgctgcgatgtgtttcctgcagatccatgcaatgtggccgtcatctctgtatcgaacacgccacaggccaaatctctgtgctatgtccatccccgtcagaaccccttgccctttcaagaaatccacaagccattgcctggctgctgtcatatcctctcccatgtcgctcgtgctaccattccttgacttgccatacagtgctgccgcgcccagagcccccacggacatggcagatgcagttgtgccgtacaaggccgaggagtccagcaggc

SEQ ID NO: 217309 - DNA, 3791 bp, Zea Mays
atgagtgataggataatcatgataacatcaccatctaagagggatgatgccagagatattggagatattgatttgcagtcctacatggacttggagaacatcgcgttctaccaggttccagcaaatttggaatcagccttgtccatggaaagtgagagatcactaggaattcatgtctgcatggacaacagtggtgtcaacttcctgcacaggtttcttcgtcatcttgtggagtataaagagaattacatgaatttgagaaacatcctattccatggtattgaatggcaggttcaagggttgcaacttctctgttcacttttaggccctggctcaagcgtgaagcaggtggaattcaagaagaatgttttcagcacaaaaccaggacatgcttttgttccactttcggagatgcttcaccagaacaacaccatcaaagcagttgttttttctgaatgtagaattggatcaactggagccacgttgcttgcttcagctttggcaaacaacagaagtgtggaggatttccaaatatgggaggactccataggatccaagggggcagaagaactctccaagatgattgaggtgaactttatgctgaagaagttgatcatccttgacaacagctccattacagtggctccacttatctctgctgtactcgcacgcaaccgtagagtggaggttcacatatggggacacggttgtggtacaaaaggtggcacgaacagctgtaaaattgttgaattcctgcctgagactgggagcatgaagatctacagcagcattagctcaacagggctgcaacgggttgcttgtgctctgccatggaataccacagtgacaacactggacatgtcaagtgtcccactaaagtccaaatggaccaaagagcttagaggagtccttgaacggaacaggagcctgaaaactgtgaagctcagcaagtgttcccttggggacaaagcagtggtgtatatagctgcagggctttttaagaacagctatttagagaacttgactttggatggaaatagatttggtggagtaggggtggagcatttgctatgccctcttagcaccttttctccacttcagagacaagccaataccacattgaaggttttgagttttggaggagagcgagcgaatataagcaagtttggtgtacctgctatcttgcagatgttggagacaaaccagagcctaattcagctggcaatatgcaatgatgcaagtttgaagccaaatgatgttgtcaaaatctttactagtttagagaggaatgccactcttcgtagcttgtctttgagaggctgtaagggagttgagggggaggcaatcctgcagaccattatgagcactttagaagtcaacccttggattgaagaaattgacctccacggaacacctttgcatgttgctggtaaaacggaccaaatttatgagaagctctgtcaaaatgagagtcttgttctgccaaacgattttcttgatttgccactaagtgctcctacttgctgccgggtttttctatgtggtcaggaatcagcagtgtaactatagttctcacccattatgacaaggtagctcatctgccagaagggctacagccaattgccacacttgtacaaaggctcagagaagaattccattcatatgcagaaatttaccccactgtttttgccgtggatgcaagatcattggtttcagtaagtagactcacccatcacttgaggatgacaattaagacaatcctccagcaagtacctcaagtttatgaagtatgcaatgatttggttagagttttgcatgactggaggttgaagaataataaagctgtaatcaaatggtctgagttccgtgagatatgtcagctcaacattccagagctaagattgagatcaaggcgtgataatgtagagaaagtggacacaagaagacgtacggttgcaaaatcactgcataacttgggtgaaatcatattttttgaggatcttggagtactgatcttggattgcgactggttctgtcgatatgtccttaaccaactggctacactgaaatcaatcaagacagaaagaagtggttttatccgcaaacaagagcttgagaagattctacaagagaagctgtgcaaccaaattcaagggtcaaactggagagccggtgcatctttccagggcaatgatgtcataaatttgctgttgaagcttgaattgtgttatgaacaggaacctggaaacccagacacattacttctagtgccatcaattcttgaggaaagcaaagaaggtgctcagcagtggcacttggccatgccagagtgcagatatgttggaaggtgtcttaaatgcacagatatacatatgtttttgacaggcgatttctttccaaggcttcaggttcgtttgcagaacaagatcatgtgcatgggacaacaacagggtgcactctacatcttggagaaaaatcttatttatacagtggtcaatagtatccatgtcagagtggtgctgggaagtacattagagtcatccgtcgatgtgcttgcatgctccagcaaaagtgttactgacatggtgaggatattccacaagttaataatcccaaccatactaaacctgtcttcaagtttgatgttcgaggaaagcattatcaggccagactgtgtaaaatatctcataccgcataggttcctccaaacacagcagctgcctctgaagagaatgaagcaaattcttttgtcattgcctgcagaaagcatgtatgattacgagcatacatggagtgccattgaaagcaataaaaggatcatcttacaatcaggatcagatcatgccagagaattgctatcagatgatgatttccatgaggttcttcaccgtagatactatgatctacagcacctcgcaactgaacttgctgtcaaccctgacaatcagcagcaacatgaaatcatccccgaaacagatgtggttgatccttccatattaggcattgcaaaaggtgttgagatggttctacaaagattgaagagagtggaacaaggaataagggacctcaaggaggaaatcgcaagcttgaggtactatgagtatcaccttttgactgaactccacaggaaaatggactacatgatgaattacaacacccagttggaggagaggaaagtgccacagatgttttatcttgttagcctggacaaccggtccaaacagctggtcacaagaatactgcctgggatgcggtccttacgggtgcatatgctatgtgaattccgtagagagatgcatgtagtggaagatcagctcggctgtgacctgattcaagtggacaaccagacggtgaaatccttgctaccttacatgagtaagttcatgaagctgctgacctttgctctgaagatcggcgcgcatttcatcgttgggatgggagagatgatacctgacctgagcagggaggtggtgcgcctgctggactcctcggccttgtacggcacaactgcatctgccatgtccgtgggggctctgggcgcggcagcactgtatggcaagtcaaggaatggtagcacgagcgacatgggagaggatatgacagcagccaggcaatggcttgtggatttcttgaaagggcaaggggttctgacggggatggacatagcacagagatttggcctgtggcgtgttcgatacagagatgacggccacattgcatggatctgcaggaaacacatcgcagcaagggaagaggaaatcttcgagctgccactttgagcatccagaggc

SEQ ID NO: 217310 - DNA, 4861 bp, Zea Mays
cacgatccgccgcagggcgccgcaacgccctcgccgcctccggtggccactgacgtgtcaccccactcccttcttcgtcaccccatctccctttcccgccacttctccgcgccatttcccttgcccactcgcctcctacctactaataatcccctccagccagcaattctcccgcaaaaaaagacaaaaccctaaacccgcggagccggggtggagagcagccattccttcgctcccctccgcaatggcgtcgcgccgagccagcaacggccgctctcccctcgtgcggaaacagagtcagatcaccgcctttttctcctcccctaccccctctccgtccccctcgggcccgagccccggcgcatccaagccctctccatcgccgctgaaccctagtgcgaggacgaggtccccacttgccgcggtatccccctcctctcccaagctgccacagccgcagcagaaacagaaggaggtaaagaaggttaaggaggagcatgatgccgccttggtgcctgcgcccgcggccgcggaggtggtggggaggtgtttgcgggtgtactggccgctggacgacgcgtggtacaagggcaaggtggaggcctacgacgcggcctcccgcaggcaccgcgtgaagtatgacgacggcgacgaggaggaggtcgatctcaggaaggagaagttcgagtgggccgccgtcgttgaggagtcgaccttgctgccggcgaggaagctgcggcgtctccggcggatgtctgatatctcggtggcaaaatcaccggctgaggcagaggatggcgcaggggattccactgaggacgaggactggaagagggatactgttgtggaggatgcttctgaggaggtggagctggatgaggaagacgaggaggaagttgttgcagtgcgatcacgaaagagaaatccaaagaattccttgatgtcaggttcaacaccatcgacattgggttctggtttgacatcagaatcggagccaagaatttcgaagaggaggaaaaacgtggatgtggcctcattggattttgctaaaaggttcaccttcgaagcagttaataccaatagaaaagttgacccagaagtgccaatgagctgtggccagaaggggcaaactacggggaatgactacactgctcctactggggatgcagctgagcgctttgggcagcgggatgctgagaagtttaaattccttggagaagggcgcaaagacgcaaaaggcagacgtcctggaaacccgggctttgatccgagaacacttttattgccacctcagttcttgaagaatttgacaggagggcagaggcaatggtgggaattcaaatcacagcacatggataaggttctgtttttcaagatgggcaaattctacgaactatttgagatggatgcacatgttggagcaaaggatcttgatcttcagtacatgaagccccactgtggattcccagagaagaatttatcagtgaatttggagaagttagctgagaagggttatcgagttctggttgtcgagcaaactgaaacacctgaccagcttgaacttcggcgtaaggagatgggtataaaggacaaggttgtcagacgtgaaatatgtgcagtagtcacaaaaggaacactaatagaaggagagcacctactggcaaacccagatccttcatacctcctgtccgtgactgaaagttaccaacgaagtccaaataagagccaagacacatgtaccattggtgttagcatagttgatgtttctacaagcaaatttattgtaggacagttccaagatgatccagagcgccatggattgtgttcaattttgtctgaaatgaggcctgtggaaattataaagcctagtaaaatgctgagtccagaaactgagaaggcattaaacaacaacacaaggaagcctttaataaatgagctggttccgtccacagaattctgggacgcagaaaagactattgatgagataaaacagtactacagctcagccaataaacagaaaaaagccgatgatatacaagactgtgtggactgtctgcctaacttattacgcgagttaattggagcaggtgataaaacatatgcactttcagctctaggaggttccttattttatttaaggcaaacccttctggatgagaaaatacttccatgtgctgagtttgagccacttgcatgctcggggttcatcaacaatatccgaaaacatatgatacttgatacagcagcattggagaatctagaacttttggaaaatacaagaactggtggcctctcagggaccctgtatgcacaactgaatcattgtgttactggatttggaaagagattgctcaaacggtggatcgcaaagccattgtatgatcgcagagaaatacttcggcgtcaaagtgctgttgctactttcaagggagttggccaagattgtgctgcacagttccgtaaggatttgtctaggctccctgacatggaacgcctgcttgcacgtctttttctcaagctgtgatgaaaacaagagaagttcatcagttgttctttatgaagatgcatcaaagaaaactgcttcaacagtttacttctgcgctttgtggatgccagcagatgttccatgcatgttcttctattagtacattgatatgctcagagggatctcaacttattgatttgctgtcaccaggcaaaggcctatcaaatatttcatctattttagaccgattcagagatgcatttgattggtcagaagcagaccgcaatggtcggatcattccttctgaaggttgtgatcctgaatatgatgccacttgcaatgcaatagaagagatcaaatccagtctaaaagagtacttgaaggagcaacgaaagcttttgagacctgcatcggttaattatgttaatgttggaaaagatatgtacctaattgaagtgcctgagagtttgggaggttcagttcccagaaactatgagttgcagtctacaaaaaagggtttctatcggtactggacgccagaactgaaagagctaatattagaactttcaaaggctgagtcagagaaagaatcaaaattgaaagccattcttcagaatctgattcagctatttgttgagcatcacactgagtggaggcagctggtttctgttgttgctgagcttgatgtattgacaagtcttgctattgcaagtggttattttgagggaccaagttgctgtccaactataaaagaatcaaatggcacagacgatactcctactttccatgctagaaatcttggacatcccattctacgaagtgattccttaggcaagggttcatttgtaccgaatgacgttaagataggtggtccagggaatgccagttttattgttcttactggtccaaatatgggtggtaaatcaactctcttgcgccaagtttgtcttaccattatactggctcagattggagcagatgttcctgcagaaaaacttgagctttctcttgttgaccgtatcttcgttcgaatgggagcaagggatcatattatggctggccaaagtacattcttggtggagctcgaggagactgcctcagtgctttcatcagctaccaagaattctcttgtggtgttagatgagcttggacggggtacatcaacttctgatggacaagctatcgcggcttcagttctggaatatctagttcatcaggtgcagtgtctaggcttgttttctacacactatcataggttagcaatggaacacaacgataccaaggtatcgctgtgccatatggcgtgcgaggtggtcgagggagtaggaggtctggaagaagtgactttcctttatagattaacacctggtgcttgccctaaaagttatggtgtaaatgttgctcgattggcaggaattcctactaaattgcttcaaagagcgaatgaaaagtcgagtgaatttgaggccaattacgggaagcgacacaagatgaccaacgataagcacgtcagtgcacagagcgatgataagttttctgccataagggatctgtttcgaattgtgaagacatggcctcgtcctgaagatcaggaagcgagtataagcatgctccgtaaattgcagaagcgtgccaaggtataggctgtggaaggctaggtaggcgattgttacatagcatgctcgcctggtagagatggcctcgttttgctaccttggtggcattttttttgttggattggcgtcataccgagaggggagaaaattacgtggacacgggttccaatcgaggacagcattgccctaggtttagtgtggaagcagaaaaaggctcagtcccatcggatgtgtcaggattcattgatgggacgtggattgagaattctgcgtctacagctttactatcccttccaacaattttgtgccctcactaattctcctaccaggccaggagccccaaggtattggtctgtcctggtttgttcgagctcggtagggtgttggatcagtgctgacctgagacgtggagaaacatcccggactgtaactttcctgaagggttaattatgattactatatgtaaatcagaactactctctcgaagttgcaaggcaacttaggattaattttagtgcctttttgtattctgaaaagttcgagcttgtatttagtcgagatttgagctgtaatccaaaacaaaataggccccactccaacgttttatagccttatcgtagaacgatacaggacacgtggacatgaatcttactacggttattcccatctgggttagtttgtgaacttaaatcctttgggatctcctggggtgaggaattttaggagatactatttaaataagatatttaattatttatga

SEQ ID NO: 217311 - DNA, 4671 bp, Zea Mays
caaaaaaagacaaaaccctaaacccgcggagccggggtggagagcagccattccttcgctcccctccgcaatggcgtcgcgccgagccagcaacggccgctctcccctcgtgcggaaacagagtcagatcaccgcctttttctcctcccctaccccctctccgtccccctcgggcccgagccccggcgcatccaagccctctccatcgccgctgaaccctagtgcgaggacgaggtccccacttgccgcggtatccccctcctctcccaagctgccacagccgcagcagaaacagaaggaggtaaagaaggttaaggaggagcatgatgccgccttggtgcctgcgcccgcggccgcggaggtggtggggaggtgtttgcgggtgtactggccgctggacgacgcgtggtacaagggcaaggtggaggcctacgacgcggcctcccgcaggcaccgcgtgaagtatgacgacggcgacgaggaggaggtcgatctcaggaaggagaagttcgagtgggccgccgtcgttgaggagtcgaccttgctgccggcgaggaagctgcggcgtctccggcggatgtctgatatctcggtggcaaaatcaccggctgaggcagaggatggcgcaggggattccactgaggacgaggactggaagagggatactgttgtggaggatgcttctgaggaggtggagctggatgaggaagacgaggaggaagttgttgcagtgcgatcacgaaagagaaatccaaagaattccttgatgtcaggttcaacaccatcgacattgggttctggtttgacatcagaatcggagccaagaatttcgaagaggaggaaaaacgtggatgtggcctcattggattttgctaaaaggttcaccttcgaagcagttaataccaatagaaaagttgacccagaagtgccaatgagctgtggccagaaggggcaaactacggggaatgactacactgctcctactggggatgcagctgagcgctttgggcagcgggatgctgagaagtttaaattccttggagaagggcgcaaagacgcaaaaggcagacgtcctggaaacccgggctttgatccgagaacacttttattgccacctcagttcttgaagaatttgacaggagggcagaggcaatggtgggaattcaaatcacagcacatggataaggttctgtttttcaagatgggcaaattctacgaactatttgagatggatgcacatgttggagcaaaggatcttgatcttcagtacatgaagggtgaacagccccactgtggattcccagagaagaatttatcagtgaatttggagaagttagctgagaagggttatcgagttctggttgtcgagcaaactgaaacacctgaccagcttgaacttcggcgtaaggagatgggtataaaggacaaggttgtcagacgtgaaatatgtgcagtagtcacaaaaggaacactaatagaaggagagcacctactggcaaacccagatccttcatacctcctgtccgtgactgaaagttaccaacgaagtccaaataagagccaagacacatgtaccattggtgttagcatagttgatgtttctacaagcaaatttattgtaggacagttccaagatgatccagagcgccatggattgtgttcaattttgtctgaaatgaggcctgtggaaattataaagcctagtaaaatgctgagtccagaaactgagaaggcattaaacaacaacacaaggaagcctttaataaatgagctggttccgtccacagaattctgggacgcagaaaagactattgatgagataaaacagtactacagctcagccaataaacagaaaaaagccgatgatatacaagactgtgtggactgtctgcctaacttattacgcgagttaattggagcaggtgataaaacatatgcactttcagctctaggaggttccttattttatttaaggcaaacccttctggatgagaaaatacttccatgtgctgagtttgagccacttgcatgctcggggttcatcaacaatatccgaaaacatatgatacttgatacagcagcattggagaatctagaacttttggaaaatacaagaactggtggcctctcagggaccctgtatgcacaactgaatcattgtgttactggatttggaaagagattgctcaaacggtggatcgcaaagccattgtatgatcgcagagaaatacttcggcgtcaaagtgctgttgctactttcaagggagttggccaagattgtgctgcacagttccgtaaggatttgtctaggctccctgacatggaacgcctgcttgcacgtctttttctcaagctgtgatgaaaacaagagaagttcatcagttgttctttatgaagatgcatcaaagaaaactgcttcaacagtttacttctgcgctttgtggatgccagcagatgttccatgcatgttcttctattagtacattgatatgctcagagggatctcaacttattgatttgctgtcaccaggcaaaggcctatcaaatatttcatctattttagaccgattcagagatgcatttgattggtcagaagcagaccgcaatggtcggatcattccttctgaaggttgtgatcctgaatatgatgccacttgcaatgcaatagaagagatcaaatccagtctaaaagagtacttgaaggagcaacgaaagcttttgagacctgcatcggttaattatgttaatgttggaaaagatatgtacctaattgaagtgcctgagagtttgggaggttcagttcccagaaactatgagttgcagtctacaaaaaagaactgaaagagctaatattagaactttcaaaggctgagtcagagaaagaatcaaaattgaaagccattcttcagaatctgattcagctatttgttgagcatcacactgagtggaggcagctggtttctgttgttgctgagcttgatgtattgacaagtcttgctattgcaagtggttattttgagggaccaagttgctgtccaactataaaagaatcaaatggcacagacgatactcctactttccatgctagaaatcttggacatcccattctacgaagtgattccttaggcaagggttcatttgtaccgaatgacgttaagataggtggtccagggaatgccagttttattgttcttactggtccaaatatgggtggtaaatcaactctcttgcgccaagtttgtcttaccattatactggctcagattggagcagatgttcctgcagaaaaacttgagctttctcttgttgaccgtatcttcgttcgaatgggagcaagggatcatattatggctggccaaagtacattcttggtggagctcgaggagactgcctcagtgctttcatcagctaccaagaattctcttgtggtgttagatgagcttggacggggtacatcaacttctgatggacaagctatcgcggcttcagttctggaatatctagttcatcaggtgcagtgtctaggcttgttttctacacactatcataggttagcaatggaacacaacgataccaaggtatcgctgtgccatatggcgtgcgaggtggtcgagggagtaggaggtctggaagaagtgactttcctttatagattaacacctggtgcttgccctaaaagttatggtgtaaatgttgctcgattggcaggaattcctactaaattgcttcaaagagcgaatgaaaagtcgagtgaatttgaggccaattacgggaagcgacacaagatgaccaacgataagcacgtcagtgcacagagcgatgataagttttctgccataagggatctgtttcgaattgtgaagacatggcctcgtcctgaagatcaggaagcgagtataagcatgctccgtaaattgcagaagcgtgccaaggtataggctgtggaaggctaggtaggcgattgttacatagcatgctcgcctggtagagatggcctcgttttgctaccttggtggcattttttttgttggattggcgtcataccgagaggggagaaaattacgtggacacgggttccaatcgaggacagcattgccctaggtttagtgtggaagcagaaaaaggctcagtcccatcggatgtgtcaggattcattgatgggacgtggattgagaattctgcgtctacagctttactatcccttccaacaattttgtgccctcactaattctcctaccaggccaggagccccaaggtattggtctgtcctggtttgttcgagctcggtagggtgttggatcagtgctgacctgagacgtggagaaacatcccggactgtaactttcctgaagggttaattatgattactatatgtaaatcagaactactctctcgaagttgcaaggcaacttaggattaattttagtgcctttttgtattctgaaaagttcgagcttgtatttagtcgagatttgagctgtaatccaaaacaaaataggccccactccaacgttttatagccttatcgtagaacgatacaggacacgtggacatgaatcttactacggttattcccatctgggttagtttgtgaacttaaatcctttgggatctcctggggtgaggaattttaggagatactatttaaataagatatttaattatttatga

SEQ ID NO: 217312 - DNA, 3630 bp, Zea Mays
catttttcaaaagggcgaaaacgccgcgtgccccagcatatccaccacagtaaccaaaacctcgccggcggcgggcggcggcgggcggccatgtcgcactggaaggagaaggagaatgctccacctctcccgctctacccaagcggcgcctctaacccctctcatctcctcccctgcaagcgcccgctgcaatccccatccccatgcccaccgctgcgccggccgctcgtcgatatcactggcaacgcattggaacagcggggcgggtatgggtatacaactcccctcccgaacgcttccaggccttgcgggtttcttctgcacgacgacgaagacgacatgaacgaggcattcttgcgggaggtggacgccatctgcgaggagcgtgcgcggtccacggccaggaaggaggaaaaggagaaggagaaggagaaggagaagaagccagcagaggagcataaggggacgggcggagtggcgctcatggcggcagcgggcacgattgacgccgctggaacagagacagcaacgcttgacgatgctttctgggaggaggtgagcgccatctgtgaggagtgtgatgcccagtctgctgccaagagccaggagaggacgaaggaggaggggagcttggtgctgtcctgcgatgatgcttcactcccccctgctatttccatcaccgcggagggtggggagtttgaagatgcattctgggagatcaatgccgttatggaggagcacaatgccaaagctcatgccaagtatcaggaggggctcaagggaatggaggagaaagatggattgttagcactgtgcggtgatcatgatccttcagtttccccagtaatatccgttgcaatggggggtggagcgcttgttgatgcactccttggtgaggttgatgctgccgtccatgatgggcatgctgatatgtctgctgctaagggccaggtggaacagcaagatatggaactagaaaaggaggaagatgaagcgtgtgctccaaagaagtacaatgaatatttgcactccttgaatgataggcagaaggaggctgcatgtaatgatgttgctgttcctctaatgattgttgctggtccaggaagtggaaagacttccacaatggttggtagggtgctcacacttctcaaagagggtattccaccaccaaacattcttgctatgacattcaccacggctgctgcctcagaaatgagagagaggatagggacagtggtgggaaaggcagttgccaaggatattgcaataagcacatttcactcattttgcttgcagctttgcagaacacatgctgaaaagctaggacgcacatctgaattcataatctacggacatggacagcaacgaagggcgcttattgagacagagcgccttttggaaaatgacaaaaataatggtgttggagatacaactaaacagtatgatggggacataaaaaattctttcaaagacaaagctaaaaagtggcagaaatttattacacaggcaaaagcttcaggaagaactccagaggactatgaaaaaaagggtgatttgacaggagcttctgttcttcgacattacaatgaaatattaagatcttgtaatgctcttgattaccatgatttcattaactcatctataacccttctcacaaattttcctgaagtgtacaaagagtgtcaggatatgtggcgggcaattgtagttgatgagtttcaggataccagtgctatgcagtattgtcttctgaagattctagcttcccacaatcatataactattgtcggtgatgaagatcagtccatcttcagtttcaatggtgccgatgtatctggctttgattcatttcgtaaagattttccggatcataaagagatcaggttgagcaagaattaccgctccacacgtgcaattgttgaagcagcaactgctctaattcagaacaacactaagcggcatcatcctaggcttgtagagaccgacaacccttctggctgtaagatcactgtcaaggagtgccacagtgaagattcacaatgcgcatttgttattgacaaaatcattgaaattacatctggtaccgctgaggggtgcaactttggcaacattgctgtcctatatcgaagacagataactggcaaagctttccaagtctccttccgcaacaggaaaattccctttaacattcatggtgtggctttctacaggaaaaaggtgatcaaagctatcatggcaatacttcggaccacattacctggttgtgatgatggtccttggcgtcaagccttcaaggcccttttacccggtgacaaagaagaaaagaagaagattatatatcatgttcaaaagatttcactggctagaacgtgtagttttttaactgctgctagtgacatcttcagcgctaaggtctctggtaccttcaaaagggcccagattactcaaggacgtaaggttttatcgaccttggatagcctatcaaaacttgttgaaaaggaacaatcagtttcagtcatcatttcgtctgcgggagacatgctacctcagaaatatctccttgagaagcgtgctgttgttgatgttgataatggcaagttattaaatgaagatagtgatatcagatcggtccttcagtttttaatggatgatgtgtctgacttcttgtcaacacatttttctagttcaatggagagaagcaagactgatgagaaaggctgtgcttctacacttaaagctttcattgattatatatctttgagggaaactgaaaattttcgatcccgaaaggaggaaaataagaattctatcacattaacaactattcatcagtcaaaaggtttggagtgggatgttgtgtttattgtgcaggcaaatgattcggaaattcctttgttgcatgagtacaatggtagtgtgaaagaagctggaagcacactggaggaggagaggaggttactctatgttgcaatgacacgagctcggaaaaagctgtacatcttgcatgttacaattgattctaaccgtcagcttctgcaaccatcacgttttctcagggaaattcctgatcaccttcttgaggtgcagggcgaagagcctctgagaaaaatgcctgaacgaccttcaggtgatgttccttttgatgactctgaagtggatacatcaatcggaaagccaattatgggaccaaacgaagcttcatcttatccagaacaggctcaggcatgccttgctaatgatttcttgagaaggtttgatattgatgatagatcggtagtctcacatatatttcatcattggggcaagaagcaggcatttcaaaatccaaagagattacttgaaaagatcagttttgtaattgatgaacgcctacgtggtaaaggatacaagcgcaaggatgtcttgcgaaagctgaaatcgttcctaagcggtgatgaagcattgggctacgcacaatatgttatcaagtgggaacagattcctatagaaaagcggaatcatttgataagagaaaggcaggaacatttccaaaagcagaggattgagaactctatgggttcgtcagaacccacagccaagcagcccatgttgctgtctatcagaaaactgaacagaattcgtccttgtttg

SEQ ID NO: 217313 - DNA, 1316 bp, Zea Mays
ctgacttcttgtcaacacatttttctagttcaatggagagaagcaagactgatgagaaaggctgtgcttctacacttaaagctttcattgattatatatctttgagggaaactgaaaattttcgatcccgaaaggaggaaaataagaattctatcacattaacaactattcatcagtcaaaaggtttggagtgggatgttgtgtttattgtgcaggcaaatgattcggaaattcctttgttgcatgagtacaatggtagtgtgaaagaagctggaagcacactggaggaggagaggaggttactctatgttgcaatgacacgagctcggaaaaagctgtacatcttgcatgttacaattgattctaaccgtcagcttctgcaaccatcacgttttctcagggaaattcctgatcaccttcttgaggtgcaggtgatgttccttttgatgactctgaagtggatacatcaatcggaaagccaattatgggaccaaacgaagcttcatcttatccagaacaggctcaggcatgccttgctaatgatttcttgagaaggtttgatattgatgatagatcggtagtctcacatatatttcatcattggggcaagaagcaggcatttcaaaatccaaagagattacttgaaaagatcagttttgtaattgatgaacgcctacgtggtaaaggatacaagcgcaaggatgtcttgcgaaagctgaaatcgttcctaagcggtgatgaagcattgggctacgcacaatatgttatcaagtgggaacagattcctatagaaaagcggaatcatttgataagagaaaggcaggaacatttccaaaagcagaggattgagaactctatgggttcgtcagaacccacagccaagcagatatcgtaccttcgaagcttggggtgcaccatcactccgacttctcgcttacacgcatcacatcttatcgaaaagtacaaatcgctctaacttggttgaagaaagtacaaatcacaacattttattgttttttatgtacatgccgtccatactacaaatgtagtagtgttgtgtactggatacatcaaggttgtacggcagctccgatcatatctattgtctgttcttcttagccatattcctgtagtacatgctgcattgttgtgacaccaagagtttttgcttctcttgggccttggcagtggtattggctaggcactggctaaccttgtactccattcctacttatatgaactccattgtgtttattattcatgagataaaaaaacattacactgaataaactgtcatctaagcaaatgaaaaaaaa

SEQ ID NO: 217314 - DNA, 2146 bp, Zea Mays
cttctctggacgtctggtgggctatgtacggaacacttcagcatgcgacctctcctgcagcgggccggcccatttctacacaccagtccatcccgctttctgttcagagatctcggacgttggacctgaggcccgagccgggtagccgagcaaagcgagagctcccctctccctgtctcctcgtctgtgactgtgcgccgccatcgcccgtcgaccagcgccgtccgcccgctcgaaaactgagacgcacgctgcccgcgcatcgccgtggcctgctccagtctgtggaaaagtgacgaaccaactcggggaattctactctcgaggccgccacctccgcctccgcctccagccctccaccgactactgtctggaactggaagtgtaccactactattcaattggccctagccctcgcatagcacgatgccgccgccgctgcttgagttcgcgatcctcgccactgcctgcaggttcagcaagccccttaccgttctcaggaggcttggcgttcttggcccaccaaccgttcgacgcaatgccgcagaggcgttcgtgccttcaccgtttcgccaggttgtcgttcagagtggaaagcttcttgggacaccaaggttctgccacaccactgccggcatgtcagaatgtctcccggacgtctacgccagtcaggtactgaaggttctcaagtccaccagtgctgacaacacggatctcagcggtgctcttcatcagttcgcggtccacatggatgaggatattatcctcatggtcctccagaagcagcggtccaactggcaggtcgccctggcattcttcaactgggcggcaaccctgccggggtatgcccacgggtcaagggcctacaccgagatgctggacattcttgggcggatgaagaaggtcagacacatgaggcagctgtttgacgagattcctgaggagcgacgtcaggtggtcgtgacgaataagatgtttgccgtgctgttgaaccggtacgctggtgcgcacaaggtgcaggaggcgatagaggtgttctacttgaggaaggattacgggtttgagcttgacttggtcgggttccagatactactgatgtcgctgtgcaggtataagcatgtcgaggaggcggaggcgctgttccgtgagaagaaagatgagttcccgcatgtcacaaagagctggaacattatactaaatggttggtgtgtcaagggaagcctgagggacgctcaaaggatttggaatgatatcattgcatctaaggttgaacgagacctattcacctttggtacgttcataaacgcattggccaaaaatggcagaattagtgccgcggtgaagctgttcaaacagatgtgggagaaagggatcaatcctgatgttgcgatttgcaattgtatcatcgaccagctgtgcttcaagaaaaagattccagaagcacttgagatttttggtgagatgaatgaccggctttgtcaagccgatgtggctacctacaacactttgataaaatacatgtgtaagataaaaaggatggagaaagtttatgaacttttggatgacatggaagcaaagggctgccctccaaacaataggacatactcctacattctgaagacgactgagaaacccaaagatgtcattgccttgatgcagaggatggagcgaaccggctgcaaattggattctgatatatacaacttgatattgaacctttatatcaaatggaaatatgagaaggggatgcaacagatatgggatgagatggagagaagagggtcaggcccagatcagcggtcgtttactattatggttcatggtcttcattcccaaggcaagctcgatgaggctctgcagtattacacaacaatgaagtctagagggatgattccagaacctaggaccaagatactggtgaaagctatgcacatgaagaaggacggggctgccactgaagatgactcggcaagtttatgggttgaaagaaagaaaaacagttcttttttctatgggtgtctaaatcacaatggctgcaccttgggctaaaaagaatcatcagcatagattcattggcaatatgatttctcagtaacttttgctcagactttcagtgccaggattagacggggttttggaatttttt

SEQ ID NO: 217315 - DNA, 6156 bp, Zea Mays
cttctctggacgtctggtgggctatgtacggaacacttcagcatgcgacctctcctgcagcgggccggcccatttctacacaccagtccatcccgctttctgttcagagatctcggacgttggacctgaggcccgagccgggtagccgagcaaagcgagagctcccctctccctgtctcctcgtctgtgactgtgcgccgccatcgcccgtcgaccagcgccgtccgcccgctcgaaaactgagacgcacgctgcccgcgcatcgccgtggcctgctccagtctgtggaaaagtgacgaaccaactcggggaattctactctcgaggccgccacctccgcctccgcctccagccctccaccgactactgtctggaactggaagtgtaccactactattcaattggccctagccctcgcatagcacgatgccgccgccgctgcttgagttcgcgatcctcgccactgcctgcaggttcagcaagccccttaccgttctcaggaggcttggcgttcttggcccaccaaccgttcgacgcaatgccgcagaggcgttcgtgccttcaccgtttcgccaggttgtcgttcagagtggaaagcttcttgggacaccaaggttctgccacaccactgccggcatgtcagaatgtctcccggacgtctacgccagtcaggtactgaaggttctcaagtccaccagtgctgacaacacggatctcagcggtgctcttcatcagttcgcggtccacatggatgaggatattatcctcatggtcctccagaagcagcggtccaactggcaggtcgccctggcattcttcaactgggcggcaaccctgccggggtatgcccacgggtcaagggcctacaccgagatgctggacattcttgggcggatgaagaaggtcagacacatgaggcagctgtttgacgagattcctgaggagcgacgtcaggtggtcgtgacgaataagatgtttgccgtgctgttgaaccggtacgctggtgcgcacaaggtgcaggaggcgatagaggtgttctacttgaggaaggattacgggtttgagcttgacttggtcgggttccagatactactgatgtcgctgtgcaggtataagcatgtcgaggaggcggaggcgctgttccgtgagaagaaagatgagttcccgcatgtcacaaagagctggaacattatactaaatggttggtgtgtcaagggaagcctgagggacgctcaaaggatttggaatgatatcattgcatctaaggttgaacgagacctattcacctttggtacgttcataaacgcattggccaaaaatggcagaattagtgccgcggtgaagctgttcaaacagatgtgggagaaagggatcaatcctgatgttgcgatttgcaattgtatcatcgaccagctgtgcttcaagaaaaagattccagaagcacttgagatttttggtgagatgaatgaccggctttgtcaagccgatgtggctacctacaacactttgataaaatacatgtgtaagataaaaaggatggagaaagtttatgaacttttggatgacatggaagcaaagggctgccctccaaacaataggacatactcctacattctgaagacgactgagaaacccaaagatgtcattgccttgatgcagaggatggagcgaaccggctgcaaattggattctgatatatacaacttgatattgaacctttatatcaaatggaaatatgagaaggggatgcaacagatatgggatgagatggagagaagagggtcaggcccagatcagcggtcgtttactattatggttcatggtcttcattcccaaggcaagctcgatgaggctctgcagtattacacaacaatgaagtctagagggatgattccagaacctaggaccaagatactggtgaaagctatgcacatgaagaaggacggggctgccactgaagatgactcggcaagtatggcagggaagcatctaaaattggatcatcgttcaagactattcaatgttcatagatagtctgcttccaggtctttgttctataatctgagcaggggatgctgtccatataggtttatgggttgaaagaaagaaaaacagttcttttttctatgggtgtctaaatcacaatggctgcaccttgggctaaaaagaatcatcagcatagattcattggcaatatgatttctcagtaacttttgctcagactttcagtgccaggatcatcagtcagctgtgaaaacgttttcctagcaggtgaaattgggagttcaaggtgcgtaccgatatccaaatttatttaatgtgttgcgcaagaaacaaacaaatgtggtgggagcacttaaattctacaccttttaatgtggaatggcaaagttttatttattagattaaacaaggatatggatatttttatctagaacctaaataaaaacggcttgttctctatgaggtccatgtgttactgtttttgctacttcaaacactcgtttgccagtgcgctgaaatgtgattctgtagggctacaaaattggaacactatgttcgtacacacatttccacttttgggtactctagtattcactctcagtacatatagattagagtaccaaaacaaagccgtatacacggtctcaggcttcttacacagttacctagatgcagtaggtttaggcatcatttgcggtgtggaagtttaagaatgcggaagaagccgtgatttatcgactccggcatggacattgttgttttgctattccggtgcttcaaatgtaaacatatgcagactgttaaaggagtgacaatgattttgagtcactcatctaacttaatgaacaatctccacagaaaggagtgatgtattatgtttttcacttagattccttcataataatttgcgtagcaactaactgaactactaagcacaagatttattaactaacagtaagatgattcagctgaagcgtattttaagcaagagatgtttctgctactcgagttctgtgacaagagatctggcaaacttgcagtaggaatctctgatatcatgcatttggatggctgcgacctgtatcggcgtcctctctcttggctgcttctttgagcaagaaactccgagagcgacgacagaaaccaagcagttctcagtttcagctgtggcgacatggttggtgtttgtgtgcaaccacatttttgcatcggctatctcccagattctctctgggagagcatcctctgaaaacctgtgcaagtccaatgatcctctgaacatctcatcagttgggctccttcccgtgaacatctcaagcaacagtatgcccacgctataaacatctccaagagtcgaaacacaagacccttcaccgtactctgttatatatattacggaaaaaagaatcgatcaaaaaccaaccagttttatacaagaaacaaggaacaatgaatagaaacccaaacacacgtatagtttcagtcacctggagcaacgtagccgatggagcctcttattccagctgtgctgcttgaattctgcagggtgttacttcttgcaatctctggaaggatccttgatatgccaaagtctccgacccgggcactcatgtcctgtgcgagaaggatgttgcttggcttgagatcgcagtgaacgattggtggctgacagtggttgtgaaggtaatccagaccgtccatgacatctacagcaacgttgagcctctgtacgatgctaagagtgttactcactgtgggcatgctgctagtgctaggttttggatgaagccagtcacctaggctaccatttggcatgaactcaaaaaccagagccttgaactcccggccctggcggtcgatgctcgagcaacacgtgatgatcttcatgaggcaacggtgacgcacccttcgcagcgcctcgcactcggccacaaagcttctactagatccagattgctcgaggtcgaaaaccttgaccgcggcaagagtagtcccctcctcgtcttgaaaggagcatctatagactgtcccaaagcttcctctaccgagcaagttggtctctgaaaacccgccggttccgttttctaatgcatggtaagaaaccttttcgtactgttcctcgatcattggtggccggaacgagctctgcttgaccctttgtcgtctgcgcttccagtagatcaacccaaagacaagtgccataaaggccagaaacaggaacgctgatgttgttgctagagctatcgtaagagacttgacccgcctcttcttgcttcctttcttcagagagttcttgcggcatggctgtaaacgaagctgaggtatgccgccacaaagcccactgttcccggcgactgaaaagtttcgggaaatcctgaatattcctccctctggcacttggccttgtagactgttgaaggacagatctaactctgacagtgatgtcaagttctgcaacgacgttgggatcggccctgacaagttgttgtgtgctagatccagttgctgaaggttgcgaatggcaccgatgccttctggaatagtgccggatagcttgttcatggacaggttgagtgcgagtagatccgtcatattcttgagagactggggtatctccccctccaatgagttatcctccaaccaaagcccctgcagcatgatgcactccccgatgctgtcaggtagctcgccggatagctggtttccagatagatccatgctgttaaggttcaccaagctaccgacttgaggaggaagagggcctgacagcgagttagacgacaagtccaagtacttggagaggagtggcagttcgaaaacctctgcggggatcgaactgttgagacggttattagctagatcaagggatattaggttcttcagctgtccgaagctcgttggaattgcgccctccaggttggcatgctgcgcgtacagctcaatcaacctcgagaggtttccgatggatgtcggtatgaggcctgacacctgagtgttgtacagacctaaccgagccaagtttcctagcttgcccatgctgtccggaagcacgccggagacggacgtgaaccccagaccgaggagttcaaggctggccaggttgccgatggctgaggggatgcttccggatatcccgtcgttgtattctaaacggaggatctgcagggccgtcgtcgagaggttgcctaccgaacctggcagccgccctgtgaagctgttgtcggcgatgtttagatcctggagctgggtacagtttgacagggaagccatgaattcccacccgtttctgtcgtctgcttccagctcgttttggaacaagtacaggagctgcagacctctgagtctccccagcgccggaggcacgcgcccgtggagcatgtttacagagagctcgacccgctggagcgtcgtgaggttagtgagcgaagcggggatggatcccgtgaactggttccaagagaggctaaggatcgacatgctgggaaatctgctgccgatctcggcggggatggtaccattgagcttgttcgcttggatctgcagtctttccagcgacgacaggttgtacagagagcgtgggggctcgccggagaggtagttgaaggcgaggtcaagtctcgtgaggcctacgatgctgccgaggctacgagggatggcgccctgtagctggttgaatgcgagggacatgacacgaagcgacgacaggttgcctatggactccggtacggtgccagtgaggttgtttcgaaacagtatgagctcctcgaggcgtgcgagcttgttgccgagctcagagggcaggcctccgcggaggtggttggactggaggcgcaagtccaccaggctggtgcatgagcttaggttggcggcggagagcttaccggagaaggcgttgtagcttaggtcaagcgcacggaggtggcgcaggcggccgaggctcgcggggatggcgccgctgagggcgttggagctcaggttgagaagcctcagggacgaaaggttaccaaccgccggggagaggacgccggtgagcccgcgagagggtaggaacagcgccaccactcgacgccgcctgccgctgcctcggcacctcaccccttcccagctgcagtacccgccgccgccgcctgcgctaccgttccacgaggcaag

SEQ ID NO: 217316 - DNA, 1727 bp, Zea Mays
gcagctgctgcaccgcgcgctgcggctgggcggtcgccgcagggccggcgtcctgatgctgctcgcagtcgtgtccgccgctgtcttctcctctctcttcgccgtcgtcaaagatgacagcaattcaatcagtatcgtaaataattatgaagtaccaaatgccatacagaagtcagtgtatcccagcacaacacggcctctaatgatgtctggaaaccaatactccaccagtgttgtcaacaaaatcgagcttccaaatcggcttcatcttacgtatgcaaacttcacacatccttgcgaaggtttctcagtccctcctcccctggttgataagaaacgcactggaccccgaccatgccctgtttgctatgtttctgtggatcaggcatttgccttgatgcccctacaagcttcaccatcacctgtcgtaaagaacttaaactatgtatcagaagatggtgttactgcaaatttatcaaatctaggatctggatttggagggcatccatctctggagcagagaaacaaatctttcaacattaatgagtcaatgactgtccactgtggctttgttagaggaaagaagcctggccaaggtactggattcgatatcaaggatgatgatctgctagagatggagcaatgccgtgagctagtcgtagcttctgctatttttgatgaagaaacagaggcttatgtcaagaattctagttctttgtacaataataataaagttggactgtggaggctggtggttgtccgaaacctcccttatgaagatccaaggcgtacgggaaagattccaaaacttctgctccataggctttttccaaacgtgaaattttcagtttggatagatgcaaagcttcagcttgttgcggatccctatctcctgcttgagaggttcctgtggaggaagaataccacttttgcaatctctcggcattacaaacgctttgatgtgttcgaagaagcagaagctaacaaagctgctggaaagtattacaacgcatccatcgattaccaaatagagttttacagaaatgagggcctaacacattattctcctgccaagcttcccatcacaagtgatgtccctgaaggctgtgtgatcatcagagaacacatccccatcacgaacctcttcacgtgcttatggttcaatgaagttgatcgcttcacctccagggaccaaataagtttcagcaccgtccgggacaaaatcagggctagagttggctggatgcccgagatgttcatggactgcgagaggcgcaactttgtcgttcaggcgtaccacagagagctactggagcagatgattgcatcaggtaggatgcccccttcgggggctgtggtggtgaccgacgcagcaccatctcggaaagtccgggcaggtagcaggaaggctactccgtcgaagaagccctccgtgaagcggaaaaaagagaagaaatcgagctcgcgacggcgtctcccgaaacccgtcgccggtggtttgggtgctatgtgacctaagttttcgtcgagtagcagagtcttgatactcccacagtcacacacttatacagcgtgtaccggaatacaaacaatgttccattacttaggtctggggcttgtaatcgtgccccggcgaaatttgttcatattactcttcatcgttgttgtacataacatctccaaaccaatattcaattttgttcattgatgttatgttcagttatttg

SEQ ID NO: 217317 - DNA, 1828 bp, Zea Mays
gcagctgctgcaccgcgcgctgcggctgggcggtcgccgcagggccggcgtcctgatgctgctcgcagtcgtgtccgccgctgtcttctcctctctcttcgccgtcgtcaaagatgacagcaattcaatcagtatcgtaaataattatgaagtaccaaatgccatacagaagtcagtgtatcccagcacaacacggcctctaatgatgtctggaaaccaatactccaccagtgttgtcaacaaaatcgagcttccaaatcggcttcatcttacgtatgcaaacttcacacatccttgcgaaggtttctcagtccctcctcccctggttgataagaaacgcactggaccccgaccatgccctgtttgctatgtttctgtggatcaggcatttgccttgatgcccctacaagcttcaccatcacctgtcgtaaagaacttaaactatgtatcagaagatggtgttactgcaaatttatcaaatctaggatctggatttggagggcatccatctctggagcagagaaacaaatctttcaacattaatgagtcaatgactgtccactgtggctttgttagaggaaagaagcctggccaaggtactggattcgatatcaaggatgatgatctgctagagatggagcaatgccgtgagctagtcgtagcttctgctatttttggaaattatgatatgattcagcatccgaggaacatcagtgaattttcaaaggcaaatgcatgtttctatatgtttgtagatgaagaaacagaggcttatgtcaagaattctagttctttgtacaataataataaagttggactgtggaggctggtggttgtccgaaacctcccttatgaagatccaaggcgtacgggaaagattccaaaacttctgctccataggctttttccaaacgtgaaattttcagtttggatagatgcaaagcttcagcttgttgcggatccctatctcctgcttgagaggttcctgtggaggaagaataccacttttgcaatctctcggcattacaaacgctttgatgtgttcgaagaagcagaagctaacaaagctgctggaaagtattacaacgcatccatcgattaccaaatagagttttacagaaatgagggcctaacacattattctcctgccaagcttcccatcacaagtggtcagtgaactcatcagattatgatgtccctgaaggctgtgtgatcatcagagaacacatccccatcacgaacctcttcacgtgcttatggttcaatgaagttgatcgcttcacctccagggaccaaataagtttcagcaccgtccgggacaaaatcagggctagagttggctggatgcccgagatgttcatggactgcgagaggcgcaactttgtcgttcaggcgtaccacagagagctactggagcagatgattgcatcaggtaggatgcccccttcgggggctgtggtggtgaccgacgcagcaccatctcggaaagtccgggcaggtagcaggaaggctactccgtcgaagaagccctccgtgaagcggaaaaaagagaagaaatcgagctcgcgacggcgtctcccgaaacccgtcgccggtggtttgggtgctatgtgacctaagttttcgtcgagtagcagagtcttgatactcccacagtcacacacttatacagcgtgtaccggaatacaaacaatgttccattacttaggtctggggcttgtaatcgtgccccggcgaaatttgttcatattactcttcatcgttgttgtacataacatctccaaaccaatattcaattttgttcattgatgttatgttcagttatttg

SEQ ID NO: 217318 - DNA, 5020 bp, Zea Mays
ttaaagccggttcaaaactgcaaagataaggctatccacgtcgcctttatatttttaaccgtccgatcatttacgaacggctacacgaactctctctgcatttccacgtactctgtcaaacgatacgccgcgatgcttccagacaagcgccatccccttcctcgccccacacgccgtcgtgttggccgcgcctctcttcaaccttttcttgagcattggcgagagcccttcacatgatccccaacttgctacgccgccggccgccgcatcggaactccttgcaccgcttgcctttcttctcccattcaaccggcaagcgttccctggctcaataacgcaactgggggatgtctgtcgctatctccatataggaaacgacaggtgcgacagatttagattttcaggtgatgcgtggtcgggatcgccggatcaatcaaaataagtgtgaaatttgagaggccgtggaacttccagatcgagtagtatccatccagatcgatatcccagaagaccaagcctggccatgaaacgcatgctaccccgatctcttcttcaccttttcttatccgcaggtaccaacaaaaaaagtgacccttttgacgacgtattgcgtgggcaaggcatgacagtgcgacaagagagaaactaacaaagagctctgttcgttctgctgattgcttatgattcgactcgcagtggcggtagctgggagagcttgggactggccagacacgaccaactcaccactgtaataagacgacttttatacatagctgacagtacgcaacctcagttcaggcgcaagctccaagcagcagagctgcagagaggcgtcagcggagcacaagctggcgtccaagcaaagcccgctgaagtgtccccccctgcctttcttctctccttcactctctcgttcgtggcgacgcttgtgcgaccactcaccgtagcccgctcgacgccagttattcgccgtgcagctcgccggcgacgagcaccctccagcctaaggaggggagccggagatgttctactcgcagttcatcttggccaagaagggccccctcgggaccatatggattgccgcacacttggagcggaagctgcgcaagaaccaggtcgcggacacggacatcggcgtctcagtagattccatcatattccctgacgttccaatcgcacttcggttatcaagtcatcttatgttaggcgtggtccactgctgttgatctacctcctgaggagtcaactgctccatatcactctataactctgcctgagacattcgatcttgatgattttgaactgccagaagctgtgtttcaaggcgatactgatcatcatgtgagcacaaaagagcagatcactttgcaagacaacccagagaaaacaggatattcaacatcccagtttggcctagatgaaagatttggtgatggcagttcatcacatattggcttggacttggaggaggaattaattctgaacaaggaccactcaattcatctcgagtctgatgatggtattattattcaaggtcggtcatcggtcccttctactgatatggagattgatgataacaaaagtacaaacataacagctgaaggatacagcaacatggacggtgggccttctagtcatgtaaagttaggtccactgaatgcagatgacctaggaggaaacagtatccgtaactggactggttacaatgtacagactcctgatttgaatgatatattattgcataataatgaggatattgcaggcccatcaacttcgtactatcaacctagcccatttacttgtgatgaacctgcatcaccagagttcattagcgctcaggccccagctacacctggtttaatggaagagacagttccttccagagtccatgaaagtcctgttctgagtccacagagaaaggcatcaccatcaactaatgatgaaactgcaaaggctgacactcctgctgcaccagcctcagattttctccattcagctacaggaaatgccagtgatgtggtgggtgctgagatgacagaacttggattggcgaaaccggtgcaagttgagtcttctgttgtgcaggactctgatgcatcggtgcaacagcacacaagtgagggtttaccatcccagggtcaagcttcacacttggaagctgctgctgataagttggtcggctctgatggtatagctgcatcggttgatgaaacggtaactgtcaatgcaaccattgaagatgtacctttggctgtaaatgattcagagccatgtgttgatggttctgctggaccatctgtggtgaacctggtacagatggatggtccattatttgatgcacaaggtacagtactaagtgcagattttcaacatgaagtccaagcaatgcaacaagtagtggcatctaacgatagactgaatgaactatcaacttcagaatttgccgagcctgagaaaatgctgacagctccgaatgctgaattcaatcatgcgattgacttggggcagataactgcggaaaaaggaacaattgaatctgatggaagtaacataataggcagcctaacaagcagaaaaagacacctggaatatagcttaccagctttagagagtgagaccactaaaaagttgcctagccgaccacatgttaaaagaaccaatgattttgttcctcatgatgatgatatactggcatctattttagtcggtaggacccctgggttcacacttgattcaacaccactaccaccaagggaatcatctctgaaacgcccaaggttggggtcgaagatgggtacactcaagagaaaagtgcagatagatgatgccatggtcctgcatgctgatactatacggcaacagttgatcaatactgaggatatacggcgcattcgtaaaaaggctccatgcactcgttccgaaatatggatgattgagaaaggttcactggaagatgatttattccacgagcccatcttttcctgcctatctgaggagctaaacaatttacacaatcggacatatgagactattgtacaccctgctgttcagagaatggaactacatggtcaattagacatgcctgaaacaataccagaatatagaaatattgctgggtttggttctgctactattgatggcccacttcacataccagatgggattcaatcagatgccatgttgtcaggcgcaaatgttgcatatggcgctacagctgcttttggtttgcaaattcctcctgactaccaggttaaccgtgcatctaatgattttgttgtcggcactcagcttcaagaggtggctaaaccttttattggtaatgagcacgaagtggcacctcctgacagagagcatgctcaagtagatacattgtatagtgaccgttttcaaggtgttccatctgatttgcagaggagtaatgatgcaaatgtttctagtcaagatgtggttctagataactctggccaagcttgtgctcatgcagtggacggcatgacaagggagtttaatcattttgttcatagagacgctaatctttttgggagtactgaggtccctgcttctgagattactggggtggaatataatcaagatgcctctggttttcctcgacaaacagaggatgacaacacggtggagtataatcaagatgcctctggttttcctcgaccaacggagggtgggaatgcggtggagtataatcaagatgtctctggttttcctcgaccaacagaggatggaaaaacggtggagtataatcaagatgcctctggttttcctcgaccaacagaggatgaaaacacggtggagtataatcaagatgcctctggttttcctcagccaaccgaggatgaaaacacggtggagtataatcaagatgcctctggttttcctcggccaacggaggatgaaaatgccgcgtctgctacgggagataattctggcttccaagaaaacaacacgggttctcatatggatctggatatgatgaatgactatgaagtgaaggaatgcaacgattttgggagtgcgattcatggcgttgatacagattttctgaactatggtgacgacgacaacgacgacgacttcgtcgacgccgacgagccaaatcccagtgagttccagtctctcgacaacagcggctggtcttctcgcaccaggggtgtcgcgagatatctcaagactctgttcgacgaggagtccggtctggggaggaagagcgtcgccatcgaccatctggtgcgcgggaagacgcggaaggaagcgtcgaggatgttcttcgagaccttggtgctgacgacgaaggactacatcagcgtggaccaaccgaaccccttcgactttgtgagcgtgaagccaggcccgaagctgctcatgtcagagttctagttcaacaaagtcagcgtaccctggcgcgatacattccctcttaccattgtatccatcatcacaccgaccaacaacaacaccgcagatatccccccccccctcctcttccaaaaccatttttgtgtatgttgttgcagttcccctcccctgtagcatctggtgcgctgatccgttgttgttgccagggcgtctgtccgagtaggatggtggttgtgttgtaccgtcggctatccaacagtatatagtagtagtatgattttagcgacactcggtgaagcccgccatgtaatctgctagggttcatgctcccctaagttactgtcgctttagactggctaaagcccgtagaggaattgtatacgagaaggacagggacagcccgagatgatgaatgatgtattgatgtgcctgttgactatgtgaggactgacggttttaactcaataattcaagtgacctttcctgtgaaccatgaatccatgccggatatgaggccgatgggcgatggtggcccagggaagaagagacgagagcaggagaggaacgagaagagaaggcgagaaatcggtagaggacgacgagtggctggcaagaggatcatgtcgtcacggtcacggttggacggcgc

SEQ ID NO: 217319 - DNA, 5175 bp, Zea Mays
cacgtactctgtcaaacgatacgccgcgatgcttccagacaagcgccatccccttcctcgccccacacgccgtcgtgttggccgcgcctctcttcaaccttttcttgagcattggcgagagcccttcacatggtgcggcgctggcatcgttgttggcgacctctgcgcggtcggatctgcaaaggttgcagctagcgcgcctacagtacgtcaacatggtgcggcatctctttttgcagatccccaacttgctacgccgccggccgccgcatcggaactccttgcaccgcttgcctttcttctcccattcaaccggcaagcgttccctggctcaataacgcaactgggggatgtctgtcgctatctccatataggaaacgacaggtgcgacagatttagattttcaggtgatgcgtggtcgggatcgccggatcaatcaaaataagtgtgaaatttgagaggccgtggaacttccagatcgagtagtatccatccagatcgatatcccagaagaccaagcctggccatgaaacgcatgctaccccgatctcttcttcaccttttcttatccgcaggtaccaacaaaaaaagtgacccttttgacgacgtattgcgtgggcaaggcatgacagtgcgacaagagagaaactaacaaagagctctgttcgttctgctgattgcttatgattcgtggcggtagctgggagagcttgggactggccagacacgaccaactcaccactgtaataagacgacttttatacatagctgacagtacgcaacctcagttcaggcgcaagctccaagcagcagagctgcagagaggcgtcagcggagcacaagctggcgtccaagcaaagcccgctgaagtgtccccccctgcctttcttctctccttcactctctcgttcgtggcgacgcttgtgcgaccactcaccgtagcccgctcgacgccagttattcgccgtgcagctcgccggcgacgagcaccctccagcctaaggaggggagccggagatgttctactcgcagttcatcttggccaagaagggccccctcgggaccatatggattgccgcacacttggagcggaagctgcgcaagaaccaggtcgcggacacggacatcggcgtctcagtagattccatcatattccctgacgttccaatcgcacttcggttatcaagtcatcttatgttaggcgtggtcagaatctattctcggaaggtcaactacctattccatgactgcagcgaagctttgctgaagataaaacaagctttcaggtccactgctgttgatctacctcctgaggagtcaactgctccatatcactctataactctgcctgagacattcgatcttgatgattttgaactgccagaagctgtgtttcaaggcgatactgatcatcatgtgagcacaaaagagcagatcactttgcaagacaacccagagaaaacaggatattcaacatcccagtttggcctagatgaaagatttggtgatggcagttcatcacatattggcttggacttggaggaggaattaattctgaacaaggaccactcaattcatctcgagtctgatgatggtattattattcaaggtcggtcatcggtcccttctactgatatggagattgatgataacaaaagtacaaacataacagctgaaggatacagcaacatggacggtgggccttctagtcatgtaaagttaggtccactgaatgcagatgacctaggaggaaacagtatccgtaactggactggttacaatgtacagactcctgatttgaatgatatattattgcataataatgaggatattgcaggcccatcaacttcgtactatcaacctagcccatttacttgtgatgaacctgcatcaccagagttcattagcgctcaggccccagctacacctggtttaatggaagagacagttccttccagagtccatgaaagtcctgttctgagtccacagagaaaggcatcaccatcaactaatgatgaaactgcaaaggctgacactcctgctgcaccagcctcagattttctccattcagctacaggaaatgccagtgatgtggtgggtgctgagatgacagaacttggattggcgaaaccggtgcaagttgagtcttctgttgtgcaggactctgatgcatcggtgcaacagcacacaagtgagggtttaccatcccagggtcaagcttcacacttggaagctgctgctgataagttggtcggctctgatggtatagctgcatcggttgatgaaacggtaactgtcaatgcaaccattgaagatgtacctttggctgtaaatgattcagagccatgtgttgatggttctgctggaccatctgtggtgaacctggtacagatggatggtccattatttgatgcacaaggtacagtactaagtgcagattttcaacatgaagtccaagcaatgcaacaagtagtggcatctaacgatagactgaatgaactatcaacttcagaatttgccgagcctgagaaaatgctgacagctccgaatgctgaattcaatcatgcgattgacttggggcagataactgcggaaaaaggaacaattgaatctgatggaagtaacataataggcagcctaacaagcagaaaaagacacctggaatatagcttaccagctttagagagtgagaccactaaaaagttgcctagccgaccacatgttaaaagaaccaatgattttgttcctcatgatgatgatatactggcatctattttagtcggtaggacccctgggttcacacttgattcaacaccactaccaccaagggaatcatctctgaaacgcccaaggttggggtcgaagatgggtacactcaagagaaaagtgcagatagatgatgccatggtcctgcatgctgatactatacggcaacagttgatcaatactgaggatatacggcgcattcgtaaaaaggctccatgcactcgttccgaaatatggatgattgagaaaggttcactggaagatgatttattccacgagcccatcttttcctgcctatctgaggagctaaacaatttacacaatcggacatatgagactattgtacaccctgctgttcagagaatggaactacatggtcaattagacatgcctgaaacaataccagaatatagaaatattgctgggtttggttctgctactattgatggcccacttcacataccagatgggattcaatcagatgccatgttgtcaggcgcaaatgttgcatatggcgctacagctgcttttggtttgcaaattcctcctgactaccaggttaaccgtgcatctaatgattttgttgtcggcactcagcttcaagaggtggctaaaccttttattggtaatgagcacgaagtggcacctcctgacagagagcatgctcaagtagatacattgtatagtgaccgttttcaaggtgttccatctgatttgcagaggagtaatgatgcaaatgtttctagtcaagatgtggttctagataactctggccaagcttgtgctcatgcagtggacggcatgacaagggagtttaatcattttgttcatagagacgctaatctttttgggagtactgaggtccctgcttctgagattactggggtggaatataatcaagatgcctctggttttcctcgacaaacagaggatgacaacacggtggagtataatcaagatgcctctggttttcctcgaccaacggagggtgggaatgcggtggagtataatcaagatgtctctggttttcctcgaccaacagaggatggaaaaacggtggagtataatcaagatgcctctggttttcctcgaccaacagaggatgaaaacacggtggagtataatcaagatgcctctggttttcctcagccaaccgaggatgaaaacacggtggagtataatcaagatgcctctggttttcctcggccaacggaggatgaaaatgccgcgtctgctacgggagataattctggcttccaagaaaacaacacgggttctcatatggatctggatatgatgaatgactatgaagtgaaggaatgcaacgattttgggagtgcgattcatggcgttgatacagattttctgaactatggtgacgacgacaacgacgacgacttcgtcgacgccgacgagccaaatcccagtgagttccagtctctcgacaacagcggctggtcttctcgcaccaggggtgtcgcgagatatctcaagactctgttcgacgaggagtccggtctggggaggaagagcgtcgccatcgaccatctggtgcgcgggaagacgcggaaggaagcgtcgaggatgttcttcgagaccttggtgctgacgacgaaggactacatcagcgtggaccaaccgaaccccttcgactttgtgagcgtgaagccaggcccgaagctgctcatgtcagagttctagttcaacaaagtcagcgtaccctggcgcgatacattccctcttaccattgtatccatcatcacaccgaccaacaacaacaccgcagatatccccccccccctcctcttccaaaaccatttttgtgtatgttgttgcagttcccctcccctgtagcatctggtgcgctgatccgttgttgttgccagggcgtctgtccgagtaggatggtggttgtgttgtaccgtcggctatccaacagtatatagtagtagtatgattttagcgacactcggtgaagcccgccatgtaatctgctagggttcatgctcccctaagttactgtcgctttagactggctaaagcccgtagaggaattgtatacgagaaggacagggacagcccgagatgatgaatgatgtattgatgtgcctgttgactatgtgaggactgacggttttaactcaataattcaagtgacctttcctgtgaaccatgaatccatgccggatatgaggtaaagatgaggaatggcctcgtacatccgtgcctttcgcgatgaaagaaagtggcttgtgatttgttttcccgttacaggccgatgggcgatggtggcccagggaagaagagacgagagcaggagaggaacgagaagagaaggcgagaaatcggtagaggacgacgagtggctggcaagaggatcatgtcgtcacggtcacggttggacggcgc

SEQ ID NO: 217320 - DNA, 5066 bp, Zea Mays
cacgtactctgtcaaacgatacgccgcgatgcttccagacaagcgccatccccttcctcgccccacacgccgtcgtgttggccgcgcctctcttcaaccttttcttgagcattggcgagagcccttcacatggtgcggcgctggcatcgttgttggcgacctctgcgcggtcggatctgcaaaggttgcagctagcgcgcctacagtacgtcaacatggtgcggcatctctttttgcagatccccaacttgctacgccgccggccgccgcatcggaactccttgcaccgcttgcctttcttctcccattcaaccggcaagcgttccctggctcaataacgcaactgggggatgtctgtcgctatctccatataggaaacgacaggtgcgacagatttagattttcaggtgatgcgtggtcgggatcgccggatcaatcaaaataagtgtgaaatttgagaggccgtggaacttccagatcgagtagtatccatccagatcgatatcccagaagaccaagcctggccatgaaacgcatgctaccccgatctcttcttcaccttttcttatccgcaggtaccaacaaaaaaagtgacccttttgacgacgtattgcgtgggcaaggcatgacagtgcgacaagagagaaactaacaaagagctctgttcgttctgctgattgcttatgattcgctccaagcagcagagctgcagagaggcgtcagcggagcacaagctggcgtccaagcaaagcccgctgaagtgtccccccctgcctttcttctctccttcactctctcgttcgtggcgacgcttgtgcgaccactcaccgtagcccgctcgacgccagttattcgccgtgcagctcgccggcgacgagcaccctccagcctaaggaggggagccggagatgttctactcgcagttcatcttggccaagaagggccccctcgggaccatatggattgccgcacacttggagcggaagctgcgcaagaaccaggtcgcggacacggacatcggcgtctcagtagattccatcatattccctgacgttccaatcgcacttcggttatcaagtcatcttatgttaggcgtggtcagaatctattctcggaaggtcaactacctattccatgactgcagcgaagctttgctgaagataaaacaagctttcaggtccactgctgttgatctacctcctgaggagtcaactgctccatatcactctataactctgcctgagacattcgatcttgatgattttgaactgccagaagctgtgtttcaaggcgatactgatcatcatgtgagcacaaaagagcagatcactttgcaagacaacccagagaaaacaggatattcaacatcccagtttggcctagatgaaagatttggtgatggcagttcatcacatattggcttggacttggaggaggaattaattctgaacaaggaccactcaattcatctcgagtctgatgatggtattattattcaaggtcggtcatcggtcccttctactgatatggagattgatgataacaaaagtacaaacataacagctgaaggatacagcaacatggacggtgggccttctagtcatgtaaagttaggtccactgaatgcagatgacctaggaggaaacagtatccgtaactggactggttacaatgtacagactcctgatttgaatgatatattattgcataataatgaggatattgcaggcccatcaacttcgtactatcaacctagcccatttacttgtgatgaacctgcatcaccagagttcattagcgctcaggccccagctacacctggtttaatggaagagacagttccttccagagtccatgaaagtcctgttctgagtccacagagaaaggcatcaccatcaactaatgatgaaactgcaaaggctgacactcctgctgcaccagcctcagattttctccattcagctacaggaaatgccagtgatgtggtgggtgctgagatgacagaacttggattggcgaaaccggtgcaagttgagtcttctgttgtgcaggactctgatgcatcggtgcaacagcacacaagtgagggtttaccatcccagggtcaagcttcacacttggaagctgctgctgataagttggtcggctctgatggtatagctgcatcggttgatgaaacggtaactgtcaatgcaaccattgaagatgtacctttggctgtaaatgattcagagccatgtgttgatggttctgctggaccatctgtggtgaacctggtacagatggatggtccattatttgatgcacaaggtacagtactaagtgcagattttcaacatgaagtccaagcaatgcaacaagtagtggcatctaacgatagactgaatgaactatcaacttcagaatttgccgagcctgagaaaatgctgacagctccgaatgctgaattcaatcatgcgattgacttggggcagataactgcggaaaaaggaacaattgaatctgatggaagtaacataataggcagcctaacaagcagaaaaagacacctggaatatagcttaccagctttagagagtgagaccactaaaaagttgcctagccgaccacatgttaaaagaaccaatgattttgttcctcatgatgatgatatactggcatctattttagtcggtaggacccctgggttcacacttgattcaacaccactaccaccaagggaatcatctctgaaacgcccaaggttggggtcgaagatgggtacactcaagagaaaagtgcagatagatgatgccatggtcctgcatgctgatactatacggcaacagttgatcaatactgaggatatacggcgcattcgtaaaaaggctccatgcactcgttccgaaatatggatgattgagaaaggttcactggaagatgatttattccacgagcccatcttttcctgcctatctgaggagctaaacaatttacacaatcggacatatgagactattgtacaccctgctgttcagagaatggaactacatggtcaattagacatgcctgaaacaataccagaatatagaaatattgctgggtttggttctgctactattgatggcccacttcacataccagatgggattcaatcagatgccatgttgtcaggcgcaaatgttgcatatggcgctacagctgcttttggtttgcaaattcctcctgactaccaggttaaccgtgcatctaatgattttgttgtcggcactcagcttcaagaggtggctaaaccttttattggtaatgagcacgaagtggcacctcctgacagagagcatgctcaagtagatacattgtatagtgaccgttttcaaggtgttccatctgatttgcagaggagtaatgatgcaaatgtttctagtcaagatgtggttctagataactctggccaagcttgtgctcatgcagtggacggcatgacaagggagtttaatcattttgttcatagagacgctaatctttttgggagtactgaggtccctgcttctgagattactggggtggaatataatcaagatgcctctggttttcctcgacaaacagaggatgacaacacggtggagtataatcaagatgcctctggttttcctcgaccaacggagggtgggaatgcggtggagtataatcaagatgtctctggttttcctcgaccaacagaggatggaaaaacggtggagtataatcaagatgcctctggttttcctcgaccaacagaggatgaaaacacggtggagtataatcaagatgcctctggttttcctcagccaaccgaggatgaaaacacggtggagtataatcaagatgcctctggttttcctcggccaacggaggatgaaaatgccgcgtctgctacgggagataattctggcttccaagaaaacaacacgggttctcatatggatctggatatgatgaatgactatgaagtgaaggaatgcaacgattttgggagtgcgattcatggcgttgatacagattttctgaactatggtgacgacgacaacgacgacgacttcgtcgacgccgacgagccaaatcccagtgagttccagtctctcgacaacagcggctggtcttctcgcaccaggggtgtcgcgagatatctcaagactctgttcgacgaggagtccggtctggggaggaagagcgtcgccatcgaccatctggtgcgcgggaagacgcggaaggaagcgtcgaggatgttcttcgagaccttggtgctgacgacgaaggactacatcagcgtggaccaaccgaaccccttcgactttgtgagcgtgaagccaggcccgaagctgctcatgtcagagttctagttcaacaaagtcagcgtaccctggcgcgatacattccctcttaccattgtatccatcatcacaccgaccaacaacaacaccgcagatatccccccccccctcctcttccaaaaccatttttgtgtatgttgttgcagttcccctcccctgtagcatctggtgcgctgatccgttgttgttgccagggcgtctgtccgagtaggatggtggttgtgttgtaccgtcggctatccaacagtatatagtagtagtatgattttagcgacactcggtgaagcccgccatgtaatctgctagggttcatgctcccctaagttactgtcgctttagactggctaaagcccgtagaggaattgtatacgagaaggacagggacagcccgagatgatgaatgatgtattgatgtgcctgttgactatgtgaggactgacggttttaactcaataattcaagtgacctttcctgtgaaccatgaatccatgccggatatgaggtaaagatgaggaatggcctcgtacatccgtgcctttcgcgatgaaagaaagtggcttgtgatttgttttcccgttacaggccgatgggcgatggtggcccagggaagaagagacgagagcaggagaggaacgagaagagaaggcgagaaatcggtagaggacgacgagtggctggcaagaggatcatgtcgtcacggtcacggttggacggcgc

SEQ ID NO: 217321 - DNA, 8212 bp, Zea Mays
cacgtactctgtcaaacgatacgccgcgatgcttccagacaagcgccatccccttcctcgccccacacgccgtcgtgttggccgcgcctctcttcaaccttttcttgagcattggcgagagcccttcacatggtgcggcgctggcatcgttgttggcgacctctgcgcggtcggatctgcaaaggttgcagctagcgcgcctacagtacgtcaacatggtgcggcatctctttttgcagatccccaacttgctacgccgccggccgccgcatcggaactccttgcaccgcttgcctttcttctcccattcaaccggcaagcgttccctggctcaataacgcaactgggggatgtctgtcgctatctccatataggaaacgacaggtgcgacagatttagattttcaggtgatgcgtggtcgggatcgccggatcaatcaaaataagtgtgaaatttgagaggccgtggaacttccagatcgagtagtatccatccagatcgatatcccagaagaccaagcctggccatgaaacgcatgctaccccgatctcttcttcaccttttcttatccgcaggtaccaacaaaaaaagtgacccttttgacgacgtattgcgtgggcaaggcatgacagtgcgacaagagagaaactaacaaagagctctgttcgttctgctgattgcttatgattcgactcgcagtggcggtagctgggagagcttgggactggccagacacgaccaactcaccactgtaataagacgacttttatacatagctgacagtacgcaacctcagttcaggcgcaaggttagtctgatgatctgccttcattttgaatctcgattttgctgcttcatgcatgtatcatttgcgtcatcgatcatgtgctttttttctaagatctgtcattcgttttgcacgcacatcattttcctttgagttacctttacaaagatgacggacttcagcaagcgtctgcatatgcaattccttttcttgcctatccatcgatttactcatagattttattttcttcttagctcgatcaaatacttacatgttcgttttttgtttctagccattgggttggaattagatgatggatcgcacataacatacatagcactcttttttagcataccacctcatgcttaacgcatttcttatatatatacacaggttaactttccaggtaactcaaaccgacacagcttaagataaagttggcctccatattaattgctacttacatattatcatcatctttttccccaaaaaatcttactagaatactaagaccatttttacacagcaaccacataaagttggacccaacatcaacaatgattttacaaactctcttgaatcacctccaaaaggttcttattatacatctccaatagaattatctaaaattaaaattatgttcgtttcttacaggttgaaacaacaacttttgaagactggccatgaatatctagatagtaattgttttgcatgtctatgacgagcatcgtcacttttggaccacgaatcttttttgtgtactgaaaccttttcagttctttatatgtttaagctatctctggctcttgaattaccctagaatctggttaaccttgtctttgctcttatatacttatttactctctaatatacatataatcatcatacatttacattatactatgctgcgctaaacggattggcacgcgcgcatgggcgcgcgctatacactagtatatgtttgatagagaacacatccaagcgtgtgagagcaatttctagtgtgttgtagtgagaggttgcattgatcgacactatattatggtcgagttgcaagttagcggtatatgttatgtttgtaggctgctgcctcttaaatggttgtaacaccaaaatattatgttggaatgtatgaaaattctccaaatgttttgaattaaaactattactaccttttaagttaattttctaaaacaaatagatgataatattaaatcttggatagttcaaatttaggcttgaattttcaaactggcctacaactttagcttataagatggcttgttgttacagcatacagttcccgtgtaagtttatgataaataactttagcttataagatgggttgttattacataaattaagatattagtttaacttaatttaaatataaacaatccgagttgaaccgagctactctggaatcctggatcaaaatgaacgtgctagtaagctactagcttttagtcatgccctaattaagaagtaacagtcaaatcacttcgccctttcgcctagagacctacaccactcctcatttgacgatgcacacgtgtaggaagatctgcatcgactatactgtaccggttatatcggtttcagccggtactgatttatattagaatcgatgtcggttgataccgatcgatcgatgcttgataacatgttaaacgattcgaccagtaccaatccaaatcacttgataatgacggattttaacgacgttataatttaattggtgtacatgtacatcgtgtcagcttatatccgttttaaaccgtttgaaattcaataaatccaaaaaacatattaactaagagaatattcctaccattttctccacagccacgtgaccagtttcacagactcacagctcaaggaggtatttaatttgccaattttgcacctcacccaataactgtcgtacatataatatagtctaacatccaagtttcgaaaagaaggcactaaaattaatttaggatgttattaaccaaaaatcattcttcaacacattcttaaacgaggtatctaaatattccaacttcttaaatattcatatttagtctctagacttagggacctcttgtgcactccttatagcctatttcgtacgtcaatcataccgtaaaatcatttaccagccacgagtgatggactttgaataattgaagccgtggaaagaatgaatttaaaattctcgttggccaagtttgaagatgacttttttcaaaaaaaagagaaaaacgaccaacctgtgattcatacaaaacgaaaatattaataaagagaataacgatgattattgaactttatcgtacaaatgaaatcaaatttaaagctgcaagtacaaatgaaaattcgagcaaataattgagaactatttactaacctaataattgaggactatttatcgtacaaatgaaaattcgagctagaatactttaaatatatttactaacctaataagtgagaactatttggagaccaaggttgattttattcccaaacgaggtgtttggttcgaggaatgaactaatccattatcatttcactcttcattttttatttggtttgaagaatgaaatgagttgatctatcaccacctcattcctcatagttatttagctagtattaatatgagaaatgtggtcatcccaccaaatttgagaaattaatccatgatgcacaaccttatttttgatgcagtgattccttaaatcaagcaaccccaatatgtatctaccaatttgctgaatctaaagaggtgtttagtttctaggtactaatttgtagtcactttattttgttctattttaggttcttaaatttgtaaatttaaactctatattgatttcaatatttgacaatttaaaaattaaattaaaataaaatagagggacttaaaattaatccatagaaactaaacacccatcagtttataatctttttttttagaaactactggacgcgtgtcgcctggaaaaggattccgcacaatcacaggagtgagagcacgaaacctgtgccatattttttttgtcttcgatttgcagctccaagcagcagagctgcagagaggcgtcagcggagcacaagctggcgtccaagcaaagcccgctgaagtgtccccccctgcctttcttctctccttcactctctcgttcgtggcgacgcttgtgcgaccactcaccgtagcccgctcgacgccagttattcgccgtgcagctcgccggcgacgagcaccctccagcctaaggaggggagccggagatgttctactcgcagttcatcttggccaagaagggccccctcgggaccatatggattgccgcacacttggagcggaagctgcgcaagaaccaggtcgcggacacggacatcggcgtctcagtagattccatcatattccctgacgttccaatcgcacttcggttatcaagtcatcttatgttaggcgtggtcagaatctattctcggaaggtcaactacctattccatgactgcagcgaagctttgctgaagataaaacaagctttcaggtccactgctgttgatctacctcctgaggagtcaactgctccatatcactctataactctgcctgagacattcgatcttgatgattttgaactgccagaagctgtgtttcaaggcgatactgatcatcatgtgagcacaaaagagcagatcactttgcaagacaacccagagaaaacaggatattcaacatcccagtttggcctagatgaaagatttggtgatggcagttcatcacatattggcttggacttggaggaggaattaattctgaacaaggaccactcaattcatctcgagtctgatgatggtattattattcaaggtcggtcatcggtcccttctactgatatggagattgatgataacaaaagtacaaacataacagctgaaggatacagcaacatggacggtgggccttctagtcatgtaaagttaggtccactgaatgcagatgacctaggaggaaacagtatccgtaactggactggttacaatgtacagactcctgatttgaatgatatattattgcataataatgaggatattgcaggcccatcaacttcgtactatcaacctagcccatttacttgtgatgaacctgcatcaccagagttcattagcgctcaggccccagctacacctggtttaatggaagagacagttccttccagagtccatgaaagtcctgttctgagtccacagagaaaggcatcaccatcaactaatgatgaaactgcaaaggctgacactcctgctgcaccagcctcagattttctccattcagctacaggaaatgccagtgatgtggtgggtgctgagatgacagaacttggattggcgaaaccggtgcaagttgagtcttctgttgtgcaggactctgatgcatcggtgcaacagcacacaagtgagggtttaccatcccagggtcaagcttcacacttggaagctgctgctgataagttggtcggctctgatggtatagctgcatcggttgatgaaacggtaactgtcaatgcaaccattgaagatgtacctttggctgtaaatgattcagagccatgtgttgatggttctgctggaccatctgtggtgaacctggtacagatggatggtccattatttgatgcacaagtactaagtgcagattttcaacatgaagtccaagcaatgcaacaagtagtggcatctaacgatagactgaatgaactatcaacttcagaatttgccgagcctgagaaaatgctgacagctccgaatgctgaattcaatcatgcgattgacttggggcagataactgcggaaaaaggaacaattgaatctgatggaagtaacataataggcagcctaacaagcagaaaaagacacctggaatatagcttaccagctttagagagtgagaccactaaaaagttgcctagccgaccacatgttaaaagaaccaatgattttgttcctcatgatgatgatatactggcatctattttagtcggtaggacccctgggttcacacttgattcaacaccactaccaccaagggaatcatctctgaaacgcccaaggttggggtcgaagatgggtacactcaagagaaaagtgcagatagatgatgccatggtcctgcatgctgatactatacggcaacagttgatcaatactgaggatatacggcgcattcgtaaaaaggctccatgcactcgttccgaaatatggatgattgagaaaggttcactggaagatgatttattccacgagcccatcttttcctgcctatctgaggagctaaacaatttacacaatcggacatatgagactattgtacaccctgctgttcagagaatggaactacatggtcaattagacatgcctgaaacaataccagaatatagaaatattgctgggtttggttctgctactattgatggcccacttcacataccagatgggattcaatcagatgccatgttgtcaggcgcaaatgttgcatatggcgctacagctgcttttggtttgcaaattcctcctgactaccaggttaaccgtgcatctaatgattttgttgtcggcactcagcttcaagaggtggctaaaccttttattggtaatgagcacgaagtggcacctcctgacagagagcatgctcaagtagatacattgtatagtgaccgttttcaaggtgttccatctgatttgcagaggagtaatgatgcaaatgtttctagtcaagatgtggttctagataactctggccaagcttgtgctcatgcagtggacggcatgacaagggagtttaatcattttgttcatagagacgctaatctttttgggagtactgaggtccctgcttctgagattactggggtggaatataatcaagatgcctctggttttcctcgacaaacagaggatgacaacacggtggagtataatcaagatgcctctggttttcctcgaccaacggagggtgggaatgcggtggagtataatcaagatgtctctggttttcctcgaccaacagaggatggaaaaacggtggagtataatcaagatgcctctggttttcctcgaccaacagaggatgaaaacacggtggagtataatcaagatgcctctggttttcctcagccaaccgaggatgaaaacacggtggagtataatcaagatgcctctggttttcctcggccaacggaggatgaaaatgccgcgtctgctacgggagataattctggcttccaagaaaacaacacgggttctcatatggatctggatatgatgaatgactatgaagtgaaggaatgcaacgattttgggagtgcgattcatggcgttgatacagattttctgaactatggtgacgacgacaacgacgacgacttcgtcgacgccgacgagccaaatcccagtgagttccagtctctcgacaacagcggctggtcttctcgcaccaggggtgtcgcgagatatctcaagactctgttcgacgaggagtccggtctggggaggaagagcgtcgccatcgaccatctggtgcgcgggaagacgcggaaggaagcgtcgaggatgttcttcgagaccttggtgctgacgacgaaggactacatcagcgtggaccaaccgaaccccttcgactttgtgagcgtgaagccaggcccgaagctgctcatgtcagagttctagttcaacaaagtcagcgtaccctggcgcgatacattccctcttaccattgtatccatcatcacaccgaccaacaacaacaccgcagatatccccccccccctcctcttccaaaaccatttttgtgtatgttgttgcagttcccctcccctgtagcatctggtgcgctgatccgttgttgttgccagggcgtctgtccgagtaggatggtggttgtgttgtaccgtcggctatccaacagtatatagtagtagtatgattttagcgacactcggtgaagcccgccatgtaatctgctagggttcatgctcccctaagttactgtcgctttagactggctaaagcccgtagaggaattgtatacgagaaggacagggacagcccgagatgatgaatgatgtattgatgtgcctgttgactatgtgaggactgacggttttaactcaataattcaagtgacctttcctgtgaaccatgaatccatgccggatatgaggtaaagatgaggaatggcctcgtacatccgtgcctttcgcgatgaaagaaagtggcttgtgatttgttttcccgttacaggccgatgggcgatggtggcccagggaagaagagacgagagcaggagaggaacgagaagagaaggcgagaaatcggtagaggacgacgagtggctggcaagaggatcatgtcgtcacggtcacggttggacggcgc

SEQ ID NO: 217322 - DNA, 8081 bp, Zea Mays
cacgtactctgtcaaacgatacgccgcgatgcttccagacaagcgccatccccttcctcgccccacacgccgtcgtgttggccgcgcctctcttcaaccttttcttgagcattggcgagagcccttcacatggtgcggcgctggcatcgttgttggcgacctctgcgcggtcggatctgcaaaggttgcagctagcgcgcctacagtacgtcaacatggtgcggcatctctttttgcagatccccaacttgctacgccgccggccgccgcatcggaactccttgcaccgcttgcctttcttctcccattcaaccggcaagcgttccctggctcaataacgcaactgggggatgtctgtcgctatctccatataggaaacgacaggtgcgacagatttagattttcaggtgatgcgtggtcgggatcgccggatcaatcaaaataagtgtgaaatttgagaggccgtggaacttccagatcgagtagtatccatccagatcgatatcccagaagaccaagcctggccatgaaacgcatgctaccccgatctcttcttcaccttttcttatccgcaggtaccaacaaaaaaagtgacccttttgacgacgtattgcgtgggcaaggcatgacagtgcgacaagagagaaactaacaaagagctctgttcgttctgctgattgcttatgattcgactcgcagtggcggtagctgggagagcttgggactggccagacacgaccaactcaccactgtaataagacgacttttatacatagctgacagtacgcaacctcagttcaggcgcaaggttagtctgatgatctgccttcattttgaatctcgattttgctgcttcatgcatgtatcatttgcgtcatcgatcatgtgctttttttctaagatctgtcattcgttttgcacgcacatcattttcctttgagttacctttacaaagatgacggacttcagcaagcgtctgcatatgcaattccttttcttgcctatccatcgatttactcatagattttattttcttcttagctcgatcaaatacttacatgttcgttttttgtttctagccattgggttggaattagatgatggatcgcacataacatacatagcactcttttttagcataccacctcatgcttaacgcatttcttatatatatacacaggttaactttccaggtaactcaaaccgacacagcttaagataaagttggcctccatattaattgctacttacatattatcatcatctttttccccaaaaaatcttactagaatactaagaccatttttacacagcaaccacataaagttggacccaacatcaacaatgattttacaaactctcttgaatcacctccaaaaggttcttattatacatctccaatagaattatctaaaattaaaattatgttcgtttcttacaggttgaaacaacaacttttgaagactggccatgaatatctagatagtactacaccatctacatagtaattgttttgcatgtctatgacgagcatcgtcacttttggaccacgaatcttttttgtgtactgaaaccttttcagttctttatatgtttaagctatctctggctcttgaattaccctagaatctggttaaccttgtctttgctcttatatacttatttactctctaatatacatataatcatcatacatttacattatactatgctgcgctaaacggattggcacgcgcgcatgggcgcgcgctatacactagtatatgtttgatagagaacacatccaagcgtgtgagagcaatttctagtgtgttgtagtgagaggttgcattgatcgacactatattatggtcgagttgcaagttagcggtatatgttatgtttgtaggctgctgcctcttaaatggttgtaacaccaaaatattatgttggaatgtatgaaaattctccaaatgttttgaattaaaactattactaccttttaagttaattttctaaaacaaatagatgataatattaaatcttggatagttcaaatttaggcttgaattttcaaactggcctacaactttagcttataagatggcttgttgttacagcatacagttcccgtgtaagtttatgataaataactttagcttataagatgggttgttattacataaattaagatattagtttaacttaatttaaatataaacaatccgagttgaaccgagctactctggaatcctggatcaaaatgaacgtgctagtaagctactagcttttagtcatgccctaattaagaagtaacagtcaaatcacttcgccctttcgcctagagacctacaccactcctcatttgacgatgcacacgtgtaggaagatctgcatcgactatactgtaccggttatatcggtttcagccggtactgatttatattagaatcgatgtcggttgataccgatcgatcgatgcttgataacatgttaaacgattcgaccagtaccaatccaaatcacttgataatgacggattttaacgacgttataatttaattggtgtacatgtacatcgtgtcagcttatatccgttttaaaccgtttgaaattcaataaatccaaaaaacatattaactaagagaatattcctaccattttctccacagccacgtgaccagtttcacagactcacagctcaaggaggtatttaatttgccaattttgcacctcacccaataactgtcgtacatataatatagtctaacatccaagtttcgaaaagaaggcactaaaattaatttaggatgttattaaccaaaaatcattcttcaacacattcttaaacgaggtatctaaatattccaacttcttaaatattcatatttagtctctagacttagggacctcttgtgcactccttatagcctatttcgtacgtcaatcataccgtaaaatcatttaccagccacgagtgatggactttgaataattgaagccgtggaaagaatgaatttaaaattctcgttggccaagtttgaagatgacttttttcaaaaaaaagagaaaaacgaccaacctgtgattcatacaaaacgaaaatattaataaagagaataacgatgattattgaactttatcgtacaaatgaaatcaaatttaaagctgcaagtacaaatgaaaattcgagcaaataattgagaactatttactaacctaataattgaggactatttatcgtacaaatgaaaattcgagctagaatactttaaatatatttactaacctaataagtgagaactatttggagaccaaggttgattttattcccaaacgaggtgtttggttcgaggaatgaactaatccattatcatttcactcttcattttttatttggtttgaagaatgaaatgagttgatctatcaccacctcattcctcatagttatttagctagtattaatatgagaaatgtggtcatcccaccaaatttgagaaattaatccatgatgcacaaccttatttttgatgcagtgattccttaaatcaagcaaccccaatatgtatctaccaatttgctgaatctaaagaggtgtttagtttctagtttataatctttttttttagaaactactggacgcgtgtcgcctggaaaaggattccgcacaatcacaggagtgagagcacgaaacctgtgccatattttttttgtcttcgatttgcagctccaagcagcagagctgcagagaggcgtcagcggagcacaagctggcgtccaagcaaagcccgctgaagtgtccccccctgcctttcttctctccttcactctctcgttcgtggcgacgcttgtgcgaccactcaccgtagcccgctcgacgccagttattcgccgtgcagctcgccggcgacgagcaccctccagcctaaggaggggagccggagatgttctactcgcagttcatcttggccaagaagggccccctcgggaccatatggattgccgcacacttggagcggaagctgcgcaagaaccaggtcgcggacacggacatcggcgtctcagtagattccatcatattccctgacgttccaatcgcacttcggttatcaagtcatcttatgttaggcgtggtcagaatctattctcggaaggtcaactacctattccatgactgcagcgaagctttgctgaagataaaacaagctttcaggtccactgctgttgatctacctcctgaggagtcaactgctccatatcactctataactctgcctgagacattcgatcttgatgattttgaactgccagaagctgtgtttcaaggcgatactgatcatcatgtgagcacaaaagagcagatcactttgcaagacaacccagagaaaacaggatattcaacatcccagtttggcctagatgaaagatttggtgatggcagttcatcacatattggcttggacttggaggaggaattaattctgaacaaggaccactcaattcatctcgagtctgatgatggtattattattcaaggtcggtcatcggtcccttctactgatatggagattgatgataacaaaagtacaaacataacagctgaaggatacagcaacatggacggtgggccttctagtcatgtaaagttaggtccactgaatgcagatgacctaggaggaaacagtatccgtaactggactggttacaatgtacagactcctgatttgaatgatatattattgcataataatgaggatattgcaggcccatcaacttcgtactatcaacctagcccatttacttgtgatgaacctgcatcaccagagttcattagcgctcaggccccagctacacctggtttaatggaagagacagttccttccagagtccatgaaagtcctgttctgagtccacagagaaaggcatcaccatcaactaatgatgaaactgcaaaggctgacactcctgctgcaccagcctcagattttctccattcagctacaggaaatgccagtgatgtggtgggtgctgagatgacagaacttggattggcgaaaccggtgcaagttgagtcttctgttgtgcaggactctgatgcatcggtgcaacagcacacaagtgagggtttaccatcccagggtcaagcttcacacttggaagctgctgctgataagttggtcggctctgatggtatagctgcatcggttgatgaaacggtaactgtcaatgcaaccattgaagatgtacctttggctgtaaatgattcagagccatgtgttgatggttctgctggaccatctgtggtgaacctggtacagatggatggtccattatttgatgcacaaggtacagtactaagtgcagattttcaacatgaagtccaagcaatgcaacaagtagtggcatctaacgatagactgaatgaactatcaacttcagaatttgccgagcctgagaaaatgctgacagctccgaatgctgaattcaatcatgcgattgacttggggcagataactgcggaaaaaggaacaattgaatctgatggaagtaacataataggcagcctaacaagcagaaaaagacacctggaatatagcttaccagctttagagagtgagaccactaaaaagttgcctagccgaccacatgttaaaagaaccaatgattttgttcctcatgatgatgatatactggcatctattttagtcggtaggacccctgggttcacacttgattcaacaccactaccaccaagggaatcatctctgaaacgcccaaggttggggtcgaagatgggtacactcaagagaaaagtgcagatagatgatgccatggtcctgcatgctgatactatacggcaacagttgatcaatactgaggatatacggcgcattcgtaaaaaggctccatgcactcgttccgaaatatggatgattgagaaaggttcactggaagatgatttattccacgagcccatcttttcctgcctatctgaggagctaaacaatttacacaatcggacatatgagactattgtacaccctgctgttcagagaatggaactacatggtcaattagacatgcctgaaacaataccagaatatagaaatattgctgggtttggttctgctactattgatggcccacttcacataccagatgggattcaatcagatgccatgttgtcaggcgcaaatgttgcatatggcgctacagctgcttttggtttgcaaattcctcctgactaccaggttaaccgtgcatctaatgattttgttgtcggcactcagcttcaagaggtggctaaaccttttattggtaatgagcacgaagtggcacctcctgacagagagcatgctcaagtagatacattgtatagtgaccgttttcaaggtgttccatctgatttgcagaggagtaatgatgcaaatgtttctagtcaagatgtggttctagataactctggccaagcttgtgctcatgcagtggacggcatgacaagggagtttaatcattttgttcatagagacgctaatctttttgggagtactgaggtccctgcttctgagattactggggtggaatataatcaagatgcctctggttttcctcgacaaacagaggatgacaacacggtggagtataatcaagatgcctctggttttcctcgaccaacggagggtgggaatgcggtggagtataatcaagatgtctctggttttcctcgaccaacagaggatggaaaaacggtggagtataatcaagatgcctctggttttcctcgaccaacagaggatgaaaacacggtggagtataatcaagatgcctctggttttcctcagccaaccgaggatgaaaacacggtggagtataatcaagatgcctctggttttcctcggccaacggaggatgaaaatgccgcgtctgctacgggagataattctggcttccaagaaaacaacacgggttctcatatggatctggatatgatgaatgactatgaagtgaaggaatgcaacgattttgggagtgcgattcatggcgttgatacagattttctgaactatggtgacgacgacaacgacgacgacttcgtcgacgccgacgagccaaatcccagtgagttccagtctctcgacaacagcggctggtcttctcgcaccaggggtgtcgcgagatatctcaagactctgttcgacgaggagtccggtctggggaggaagagcgtcgccatcgaccatctggtgcgcgggaagacgcggaaggaagcgtcgaggatgttcttcgagaccttggtgctgacgacgaaggactacatcagcgtggaccaaccgaaccccttcgactttgtgagcgtgaagccaggcccgaagctgctcatgtcagagttctagttcaacaaagtcagcgtaccctggcgcgatacattccctcttaccattgtatccatcatcacaccgaccaacaacaacaccgcagatatccccccccccctcctcttccaaaaccatttttgtgtatgttgttgcagttcccctcccctgtagcatctggtgcgctgatccgttgttgttgccagggcgtctgtccgagtaggatggtggttgtgttgtaccgtcggctatccaacagtatatagtagtagtatgattttagcgacactcggtgaagcccgccatgtaatctgctagggttcatgctcccctaagttactgtcgctttagactggctaaagcccgtagaggaattgtatacgagaaggacagggacagcccgagatgatgaatgatgtattgatgtgcctgttgactatgtgaggactgacggttttaactcaataattcaagtgacctttcctgtgaaccatgaatccatgccggatatgaggtaaagatgaggaatggcctcgtacatccgtgcctttcgcgatgaaagaaagtggcttgtgatttgttttcccgttacaggccgatgggcgatggtggcccagggaagaagagacgagagcaggagaggaacgagaagagaaggcgagaaatcggtagaggacgacgagtggctggcaagaggatcatgtcgtcacggtcacggttggacggcgc

SEQ ID NO: 217323 - DNA, 8479 bp, Zea Mays
cacgtactctgtcaaacgatacgccgcgatgcttccagacaagcgccatccccttcctcgccccacacgccgtcgtgttggccgcgcctctcttcaaccttttcttgagcattggcgagagcccttcacatgatccccaacttgctacgccgccggccgccgcatcggaactccttgcaccgcttgcctttcttctcccattcaaccggcaagcgttccctggctcaataacgcaactgggggatgtctgtcgctatctccatataggaaacgacaggtgcgacagatttagattttcaggtgatgcgtggtcgggatcgccggatcaatcaaaataagtgtgaaatttgagaggccgtggaacttccagatcgagtagtatccatccagatcgatatcccagaagaccaagcctggccatgaaacgcatgctaccccgatctcttcttcaccttttcttatccgcaggtaccaacaaaaaaagtgacccttttgacgacgtattgcgtgggcaaggcatgacagtgcgacaagagagaaactaacaaagagctctgttcgttctgctgattgcttatgattcggtaattacctctacaccatgtccttttcgatcgataatgaacaaagtatatataggtgcacgaacgtgctagatcctagattacttttagctaggtcccaagcagccgaaaatgtgtgcatgctttcagataagcaatgtctctgtctattgcacgattttttcgggcttgttgaatcgcccccgcccctaaaaataattataaggaaatgaagcctgacattcttgctcagactcgcagtggcggtagctgggagagcttgggactggccagacacgaccaactcaccactgtaataagacgacttttatacatagctgacagtacgcaacctcagttcaggcgcaaggttagtctgatgatctgccttcattttgaatctcgattttgctgcttcatgcatgtatcatttgcgtcatcgatcatgtgctttttttctaagatctgtcattcgttttgcacgcacatcattttcctttgagttacctttacaaagatgacggacttcagcaagcgtctgcatatgcaattccttttcttgcctatccatcgatttactcatagattttattttcttcttagctcgatcaaatacttacatgttcgttttttgtttctagccattgggttggaattagatgatggatcgcacataacatacatagcactcttttttagcataccacctcatgcttaacgcatttcttatatatatacacaggttaactttccaggtaactcaaaccgacacagcttaagataaagttggcctccatattaattgctacttacatattatcatcatctttttccccaaaaaatcttactagaatactaagaccatttttacacagcaaccacataaagttggacccaacatcaacaatgattttacaaactctcttgaatcacctccaaaaggttcttattatacatctccaatagaattatctaaaattaaaattatgttcgtttcttacaggttgaaacaacaacttttgaagactggccatgaatatctagatagtactacaccatctacatagtttgtaatcaatataatttgcatattattcttcgcacacctttataaccatagcacaacaggacaatagctcatcgactctttaacaacaactgatgttcacctttttctgcacaggtaattgttttgcatgtctatgacgagcatcgtcacttttggaccacgaatcttttttgtgtactgaaaccttttcagttctttatatgtttaagctatctctggctcttgaattaccctagaatctggttaaccttgtctttgctcttatatacttatttactctctaatatacatataatcatcatacatttacattatactatgctgcgctaaacggattggcacgcgcgcatgggcgcgcgctatacactagtatatgtttgatagagaacacatccaagcgtgtgagagcaatttctagtgtgttgtagtgagaggttgcattgatcgacactatattatggtcgagttgcaagttagcggtatatgttatgtttgtaggctgctgcctcttaaatggttgtaacaccaaaatattatgttggaatgtatgaaaattctccaaatgttttgaattaaaactattactaccttttaagttaattttctaaaacaaatagatgataatattaaatcttggatagttcaaatttaggcttgaattttcaaactggcctacaactttagcttataagatggcttgttgttacagcatacagttcccgtgtaagtttatgataaataactttagcttataagatgggttgttattacataaattaagatattagtttaacttaatttaaatataaacaatccgagttgaaccgagctactctggaatcctggatcaaaatgaacgtgctagtaagctactagcttttagtcatgccctaattaagaagtaacagtcaaatcacttcgccctttcgcctagagacctacaccactcctcatttgacgatgcacacgtgtaggaagatctgcatcgactatactgtaccggttatatcggtttcagccggtactgatttatattagaatcgatgtcggttgataccgatcgatcgatgcttgataacatgttaaacgattcgaccagtaccaatccaaatcacttgataatgacggattttaacgacgttataatttaattggtgtacatgtacatcgtgtcagcttatatccgttttaaaccgtttgaaattcaataaatccaaaaaacatattaactaagagaatattcctaccattttctccacagccacgtgaccagtttcacagactcacagctcaaggaggtatttaatttgccaattttgcacctcacccaataactgtcgtacatataatatagtctaacatccaagtttcgaaaagaaggcactaaaattaatttaggatgttattaaccaaaaatcattcttcaacacattcttaaacgaggtatctaaatattccaacttcttaaatattcatatttagtctctagacttagggacctcttgtgcactccttatagcctatttcgtacgtcaatcataccgtaaaatcatttaccagccacgagtgatggactttgaataattgaagccgtggaaagaatgaatttaaaattctcgttggccaagtttgaagatgacttttttcaaaaaaaagagaaaaacgaccaacctgtgattcatacaaaacgaaaatattaataaagagaataacgatgattattgaactttatcgtacaaatgaaatcaaatttaaagctgcaagtacaaatgaaaattcgagcaaataattgagaactatttactaacctaataattgaggactatttatcgtacaaatgaaaattcgagctagaatactttaaatatatttactaacctaataagtgagaactatttggagaccaaggttgattttattcccaaacgaggtgtttggttcgaggaatgaactaatccattatcatttcactcttcattttttatttggtttgaagaatgaaatgagttgatctatcaccacctcattcctcatagttatttagctagtattaatatgagaaatgtggtcatcccaccaaatttgagaaattaatccatgatgcacaaccttatttttgatgcagtgattccttaaatcaagcaaccccaatatgtatctaccaatttgctgaatctaaagaggtgtttagtttctaggtactaatttgtagtcactttattttgttctattttaggttcttaaatttgtaaatttaaactctatattgatttcaatatttgacaatttaaaaattaaattaaaataaaatagagggacttaaaattaatccatagaaactaaacacccatcagtttataatctttttttttagaaactactggacgcgtgtcgcctggaaaaggattccgcacaatcacaggagtgagagcacgaaacctgtgccatattttttttgtcttcgatttgcagctccaagcagcagagctgcagagaggcgtcagcggagcacaagctggcgtccaagcaaagcccgctgaagtgtccccccctgcctttcttctctccttcactctctcgttcgtggcgacgcttgtgcgaccactcaccgtagcccgctcgacgccagttattcgccgtgcagctcgccggcgacgagcaccctccagcctaaggaggggagccggagatgttctactcgcagttcatcttggccaagaagggccccctcgggaccatatggattgccgcacacttggagcggaagctgcgcaagaaccaggtcgcggacacggacatcggcgtctcagtagattccatcatattccctgacgttccaatcgcacttcggttatcaagtcatcttatgttaggcgtggtcagaatctattctcggaaggtcaactacctattccatgactgcagcgaagctttgctgaagataaaacaagctttcaggtccactgctgttgatctacctcctgaggagtcaactgctccatatcactctataactctgcctgagacattcgatcttgatgattttgaactgccagaagctgtgtttcaaggcgatactgatcatcatgtgagcacaaaagagcagatcactttgcaagacaacccagagaaaacaggatattcaacatcccagtttggcctagatgaaagatttggtgatggcagttcatcacatattggcttggacttggaggaggaattaattctgaacaaggaccactcaattcatctcgagtctgatgatggtattattattcaaggtcggtcatcggtcccttctactgatatggagattgatgataacaaaagtacaaacataacagctgaaggatacagcaacatggacggtgggccttctagtcatgtaaagttaggtccactgaatgcagatgacctaggaggaaacagtatccgtaactggactggttacaatgtacagactcctgatttgaatgatatattattgcataataatgaggatattgcaggcccatcaacttcgtactatcaacctagcccatttacttgtgatgaacctgcatcaccagagttcattagcgctcaggccccagctacacctggtttaatggaagagacagttccttccagagtccatgaaagtcctgttctgagtccacagagaaaggcatcaccatcaactaatgatgaaactgcaaaggctgacactcctgctgcaccagcctcagattttctccattcagctacaggaaatgccagtgatgtggtgggtgctgagatgacagaacttggattggcgaaaccggtgcaagttgagtcttctgttgtgcaggactctgatgcatcggtgcaacagcacacaagtgagggtttaccatcccagggtcaagcttcacacttggaagctgctgctgataagttggtcggctctgatggtatagctgcatcggttgatgaaacggtaactgtcaatgcaaccattgaagatgtacctttggctgtaaatgattcagagccatgtgttgatggttctgctggaccatctgtggtgaacctggtacagatggatggtccattatttgatgcacaaggtacagtactaagtgcagattttcaacatgaagtccaagcaatgcaacaagtagtggcatctaacgatagactgaatgaactatcaacttcagaatttgccgagcctgagaaaatgctgacagctccgaatgctgaattcaatcatgcgattgacttggggcagataactgcggaaaaaggaacaattgaatctgatggaagtaacataataggcagcctaacaagcagaaaaagacacctggaatatagcttaccagctttagagagtgagaccactaaaaagttgcctagccgaccacatgttaaaagaaccaatgattttgttcctcatgatgatgatatactggcatctattttagtcggtaggacccctgggttcacacttgattcaacaccactaccaccaagggaatcatctctgaaacgcccaaggttggggtcgaagatgggtacactcaagagaaaagtgcagatagatgatgccatggtcctgcatgctgatactatacggcaacagttgatcaatactgaggatatacggcgcattcgtaaaaaggctccatgcactcgttccgaaatatggatgattgagaaaggttcactggaagatgatttattccacgagcccatcttttcctgcctatctgaggagctaaacaatttacacaatcggacatatgagactattgtacaccctgctgttcagagaatggaactacatggtcaattagacatgcctgaaacaataccagaatatagaaatattgctgggtttggttctgctactattgatggcccacttcacataccagatgggattcaatcagatgccatgttgtcaggcgcaaatgttgcatatggcgctacagctgcttttggtttgcaaattcctcctgactaccaggttaaccgtgcatctaatgattttgttgtcggcactcagcttcaagaggtggctaaaccttttattggtaatgagcacgaagtggcacctcctgacagagagcatgctcaagtagatacattgtatagtgaccgttttcaaggtgttccatctgatttgcagaggagtaatgatgcaaatgtttctagtcaagatgtggttctagataactctggccaagcttgtgctcatgcagtggacggcatgacaagggagtttaatcattttgttcatagagacgctaatctttttgggagtactgaggtccctgcttctgagattactggggtggaatataatcaagatgcctctggttttcctcgacaaacagaggatgacaacacggtggagtataatcaagatgcctctggttttcctcgaccaacggagggtgggaatgcggtggagtataatcaagatgtctctggttttcctcgaccaacagaggatggaaaaacggtggagtataatcaagatgcctctggttttcctcgaccaacagaggatgaaaacacggtggagtataatcaagatgcctctggttttcctcagccaaccgaggatgaaaacacggtggagtataatcaagatgcctctggttttcctcggccaacggaggatgaaaatgccgcgtctgctacgggagataattctggcttccaagaaaacaacacgggttctcatatggatctggatatgatgaatgactatgaagtgaaggaatgcaacgattttgggagtgcgattcatggcgttgatacagattttctgaactatggtgacgacgacaacgacgacgacttcgtcgacgccgacgagccaaatcccagtgagttccagtctctcgacaacagcggctggtcttctcgcaccaggggtgtcgcgagatatctcaagactctgttcgacgaggagtccggtctggggaggaagagcgtcgccatcgaccatctggtgcgcgggaagacgcggaaggaagcgtcgaggatgttcttcgagaccttggtgctgacgacgaaggactacatcagcgtggaccaaccgaaccccttcgactttgtgagcgtgaagccaggcccgaagctgctcatgtcagagttctagttcaacaaagtcagcgtaccctggcgcgatacattccctcttaccattgtatccatcatcacaccgaccaacaacaacaccgcagatatccccccccccctcctcttccaaaaccatttttgtgtatgttgttgcagttcccctcccctgtagcatctggtgcgctgatccgttgttgttgccagggcgtctgtccgagtaggatggtggttgtgttgtaccgtcggctatccaacagtatatagtagtagtatgattttagcgacactcggtgaagcccgccatgtaatctgctagggttcatgctcccctaagttactgtcgctttagactggctaaagcccgtagaggaattgtatacgagaaggacagggacagcccgagatgatgaatgatgtattgatgtgcctgttgactatgtgaggactgacggttttaactcaataattcaagtgacctttcctgtgaaccatgaatccatgccggatatgaggtaaagatgaggaatggcctcgtacatccgtgcctttcgcgatgaaagaaagtggcttgtgatttgttttcccgttacaggccgatgggcgatggtggcccagggaagaagagacgagagcaggagaggaacgagaagagaaggcgagaaatcggtagaggacgacgagtggctggcaagaggatcatgtcgtcacggtcacggttggacggcgc

SEQ ID NO: 217324 - DNA, 5281 bp, Zea Mays
cacgtactctgtcaaacgatacgccgcgatgcttccagacaagcgccatccccttcctcgccccacacgccgtcgtgttggccgcgcctctcttcaaccttttcttgagcattggcgagagcccttcacatggtgcggcgctggcatcgttgttggcgacctctgcgcggtcggatctgcaaaggttgcagctagcgcgcctacagtacgtcaacatggtgcggcatctctttttgcagatccccaacttgctacgccgccggccgccgcatcggaactccttgcaccgcttgcctttcttctcccattcaaccggcaagcgttccctggctcaataacgcaactgggggatgtctgtcgctatctccatataggaaacgacaggtgcgacagatttagattttcaggtgatgcgtggtcgggatcgccggatcaatcaaaataagtgtgaaatttgagaggccgtggaacttccagatcgagtagtatccatccagatcgatatcccagaagaccaagcctggccatgaaacgcatgctaccccgatctcttcttcaccttttcttatccgcaggtaccaacaaaaaaagtgacccttttgacgacgtattgcgtgggcaaggcatgacagtgcgacaagagagaaactaacaaagagctctgttcgttctgctgattgcttatgattcgactcgcagtggcggtagctgggagagcttgggactggccagacacgaccaactcaccactgtaataagacgacttttatacatagctgacagtacgcaacctcagttcaggcgcaagaaactactggacgcgtgtcgcctggaaaaggattccgcacaatcacaggagtgagagcacgaaacctgtgccatattttttttgtcttcgatttgcagctccaagcagcagagctgcagagaggcgtcagcggagcacaagctggcgtccaagcaaagcccgctgaagtgtccccccctgcctttcttctctccttcactctctcgttcgtggcgacgcttgtgcgaccactcaccgtagcccgctcgacgccagttattcgccgtgcagctcgccggcgacgagcaccctccagcctaaggaggggagccggagatgttctactcgcagttcatcttggccaagaagggccccctcgggaccatatggattgccgcacacttggagcggaagctgcgcaagaaccaggtcgcggacacggacatcggcgtctcagtagattccatcatattccctgacgttccaatcgcacttcggttatcaagtcatcttatgttaggcgtggtcagaatctattctcggaaggtcaactacctattccatgactgcagcgaagctttgctgaagataaaacaagctttcaggtccactgctgttgatctacctcctgaggagtcaactgctccatatcactctataactctgcctgagacattcgatcttgatgattttgaactgccagaagctgtgtttcaaggcgatactgatcatcatgtgagcacaaaagagcagatcactttgcaagacaacccagagaaaacaggatattcaacatcccagtttggcctagatgaaagatttggtgatggcagttcatcacatattggcttggacttggaggaggaattaattctgaacaaggaccactcaattcatctcgagtctgatgatggtattattattcaaggtcggtcatcggtcccttctactgatatggagattgatgataacaaaagtacaaacataacagctgaaggatacagcaacatggacggtgggccttctagtcatgtaaagttaggtccactgaatgcagatgacctaggaggaaacagtatccgtaactggactggttacaatgtacagactcctgatttgaatgatatattattgcataataatgaggatattgcaggcccatcaacttcgtactatcaacctagcccatttacttgtgatgaacctgcatcaccagagttcattagcgctcaggccccagctacacctggtttaatggaagagacagttccttccagagtccatgaaagtcctgttctgagtccacagagaaaggcatcaccatcaactaatgatgaaactgcaaaggctgacactcctgctgcaccagcctcagattttctccattcagctacaggaaatgccagtgatgtggtgggtgctgagatgacagaacttggattggcgaaaccggtgcaagttgagtcttctgttgtgcaggactctgatgcatcggtgcaacagcacacaagtgagggtttaccatcccagggtcaagcttcacacttggaagctgctgctgataagttggtcggctctgatggtatagctgcatcggttgatgaaacggtaactgtcaatgcaaccattgaagatgtacctttggctgtaaatgattcagagccatgtgttgatggttctgctggaccatctgtggtgaacctggtacagatggatggtccattatttgatgcacaaggtacagtactaagtgcagattttcaacatgaagtccaagcaatgcaacaagtagtggcatctaacgatagactgaatgaactatcaacttcagaatttgccgagcctgagaaaatgctgacagctccgaatgctgaattcaatcatgcgattgacttggggcagataactgcggaaaaaggaacaattgaatctgatggaagtaacataataggcagcctaacaagcagaaaaagacacctggaatatagcttaccagctttagagagtgagaccactaaaaagttgcctagccgaccacatgttaaaagaaccaatgattttgttcctcatgatgatgatatactggcatctattttagtcggtaggacccctgggttcacacttgattcaacaccactaccaccaagggaatcatctctgaaacgcccaaggttggggtcgaagatgggtacactcaagagaaaagtgcagatagatgatgccatggtcctgcatgctgatactatacggcaacagttgatcaatactgaggatatacggcgcattcgtaaaaaggctccatgcactcgttccgaaatatggatgattgagaaaggttcactggaagatgatttattccacgagcccatcttttcctgcctatctgaggagctaaacaatttacacaatcggacatatgagactattgtacaccctgctgttcagagaatggaactacatggtcaattagacatgcctgaaacaataccagaatatagaaatattgctgggtttggttctgctactattgatggcccacttcacataccagatgggattcaatcagatgccatgttgtcaggcgcaaatgttgcatatggcgctacagctgcttttggtttgcaaattcctcctgactaccaggttaaccgtgcatctaatgattttgttgtcggcactcagcttcaagaggtggctaaaccttttattggtaatgagcacgaagtggcacctcctgacagagagcatgctcaagtagatacattgtatagtgaccgttttcaaggtgttccatctgatttgcagaggagtaatgatgcaaatgtttctagtcaagatgtggttctagataactctggccaagcttgtgctcatgcagtggacggcatgacaagggagtttaatcattttgttcatagagacgctaatctttttgggagtactgaggtccctgcttctgagattactggggtggaatataatcaagatgcctctggttttcctcgacaaacagaggatgacaacacggtggagtataatcaagatgcctctggttttcctcgaccaacggagggtgggaatgcggtggagtataatcaagatgtctctggttttcctcgaccaacagaggatggaaaaacggtggagtataatcaagatgcctctggttttcctcgaccaacagaggatgaaaacacggtggagtataatcaagatgcctctggttttcctcagccaaccgaggatgaaaacacggtggagtataatcaagatgcctctggttttcctcggccaacggaggatgaaaatgccgcgtctgctacgggagataattctggcttccaagaaaacaacacgggttctcatatggatctggatatgatgaatgactatgaagtgaaggaatgcaacgattttgggagtgcgattcatggcgttgatacagattttctgaactatggtgacgacgacaacgacgacgacttcgtcgacgccgacgagccaaatcccagtgagttccagtctctcgacaacagcggctggtcttctcgcaccaggggtgtcgcgagatatctcaagactctgttcgacgaggagtccggtctggggaggaagagcgtcgccatcgaccatctggtgcgcgggaagacgcggaaggaagcgtcgaggatgttcttcgagaccttggtgctgacgacgaaggactacatcagcgtggaccaaccgaaccccttcgactttgtgagcgtgaagccaggcccgaagctgctcatgtcagagttctagttcaacaaagtcagcgtaccctggcgcgatacattccctcttaccattgtatccatcatcacaccgaccaacaacaacaccgcagatatccccccccccctcctcttccaaaaccatttttgtgtatgttgttgcagttcccctcccctgtagcatctggtgcgctgatccgttgttgttgccagggcgtctgtccgagtaggatggtggttgtgttgtaccgtcggctatccaacagtatatagtagtagtatgattttagcgacactcggtgaagcccgccatgtaatctgctagggttcatgctcccctaagttactgtcgctttagactggctaaagcccgtagaggaattgtatacgagaaggacagggacagcccgagatgatgaatgatgtattgatgtgcctgttgactatgtgaggactgacggttttaactcaataattcaagtgacctttcctgtgaaccatgaatccatgccggatatgaggtaaagatgaggaatggcctcgtacatccgtgcctttcgcgatgaaagaaagtggcttgtgatttgttttcccgttacaggccgatgggcgatggtggcccagggaagaagagacgagagcaggagaggaacgagaagagaaggcgagaaatcggtagaggacgacgagtggctggcaagaggatcatgtcgtcacggtcacggttggacggcgc

SEQ ID NO: 217325 - DNA, 5177 bp, Zea Mays
cacgtactctgtcaaacgatacgccgcgatgcttccagacaagcgccatccccttcctcgccccacacgccgtcgtgttggccgcgcctctcttcaaccttttcttgagcattggcgagagcccttcacatggtgcggcgctggcatcgttgttggcgacctctgcgcggtcggatctgcaaaggttgcagctagcgcgcctacagtacgtcaacatggtgcggcatctctttttgcagatccccaacttgctacgccgccggccgccgcatcggaactccttgcaccgcttgcctttcttctcccattcaaccggcaagcgttccctggctcaataacgcaactgggggatgtctgtcgctatctccatataggaaacgacaggtgcgacagatttagattttcaggtgatgcgtggtcgggatcgccggatcaatcaaaataagtgtgaaatttgagaggccgtggaacttccagatcgagtagtatccatccagatcgatatcccagaagaccaagcctggccatgaaacgcatgctaccccgatctcttcttcaccttttcttatccgcaggtaccaacaaaaaaagtgacccttttgacgacgtattgcgtgggcaaggcatgacagtgcgacaagagagaaactaacaaagagctctgttcgttctgctgattgcttatgattcgactcgcagtggcggtagctgggagagcttgggactggccagacacgaccaactcaccactgtaataagacgacttttatacatagctgacagtacgcaacctcagttcaggcgcaagctccaagcagcagagctgcagagaggcgtcagcggagcacaagctggcgtccaagcaaagcccgctgaagtgtccccccctgcctttcttctctccttcactctctcgttcgtggcgacgcttgtgcgaccactcaccgtagcccgctcgacgccagttattcgccgtgcagctcgccggcgacgagcaccctccagcctaaggaggggagccggagatgttctactcgcagttcatcttggccaagaagggccccctcgggaccatatggattgccgcacacttggagcggaagctgcgcaagaaccaggtcgcggacacggacatcggcgtctcagtagattccatcatattccctgacgttccaatcgcacttcggttatcaagtcatcttatgttaggcgtggtcagaatctattctcggaaggtcaactacctattccatgactgcagcgaagctttgctgaagataaaacaagctttcaggtccactgctgttgatctacctcctgaggagtcaactgctccatatcactctataactctgcctgagacattcgatcttgatgattttgaactgccagaagctgtgtttcaaggcgatactgatcatcatgtgagcacaaaagagcagatcactttgcaagacaacccagagaaaacaggatattcaacatcccagtttggcctagatgaaagatttggtgatggcagttcatcacatattggcttggacttggaggaggaattaattctgaacaaggaccactcaattcatctcgagtctgatgatggtattattattcaaggtcggtcatcggtcccttctactgatatggagattgatgataacaaaagtacaaacataacagctgaaggatacagcaacatggacggtgggccttctagtcatgtaaagttaggtccactgaatgcagatgacctaggaggaaacagtatccgtaactggactggttacaatgtacagactcctgatttgaatgatatattattgcataataatgaggatattgcaggcccatcaacttcgtactatcaacctagcccatttacttgtgatgaacctgcatcaccagagttcattagcgctcaggccccagctacacctggtttaatggaagagacagttccttccagagtccatgaaagtcctgttctgagtccacagagaaaggcatcaccatcaactaatgatgaaactgcaaaggctgacactcctgctgcaccagcctcagattttctccattcagctacaggaaatgccagtgatgtggtgggtgctgagatgacagaacttggattggcgaaaccggtgcaagttgagtcttctgttgtgcaggactctgatgcatcggtgcaacagcacacaagtgagggtttaccatcccagggtcaagcttcacacttggaagctgctgctgataagttggtcggctctgatggtatagctgcatcggttgatgaaacggtaactgtcaatgcaaccattgaagatgtacctttggctgtaaatgattcagagccatgtgttgatggttctgctggaccatctgtggtgaacctggtacagatggatggtccattatttgatgcacaagtactaagtgcagattttcaacatgaagtccaagcaatgcaacaagtagtggcatctaacgatagactgaatgaactatcaacttcagaatttgccgagcctgagaaaatgctgacagctccgaatgctgaattcaatcatgcgattgacttggggcagataactgcggaaaaaggaacaattgaatctgatggaagtaacataataggcagcctaacaagcagaaaaagacacctggaatatagcttaccagctttagagagtgagaccactaaaaagttgcctagccgaccacatgttaaaagaaccaatgattttgttcctcatgatgatgatatactggcatctattttagtcggtaggacccctgggttcacacttgattcaacaccactaccaccaagggaatcatctctgaaacgcccaaggttggggtcgaagatgggtacactcaagagaaaagtgcagatagatgatgccatggtcctgcatgctgatactatacggcaacagttgatcaatactgaggatatacggcgcattcgtaaaaaggctccatgcactcgttccgaaatatggatgattgagaaaggttcactggaagatgatttattccacgagcccatcttttcctgcctatctgaggagctaaacaatttacacaatcggacatatgagactattgtacaccctgctgttcagagaatggaactacatggtcaattagacatgcctgaaacaataccagaatatagaaatattgctgggtttggttctgctactattgatggcccacttcacataccagatgggattcaatcagatgccatgttgtcaggcgcaaatgttgcatatggcgctacagctgcttttggtttgcaaattcctcctgactaccaggttaaccgtgcatctaatgattttgttgtcggcactcagcttcaagaggtggctaaaccttttattggtaatgagcacgaagtggcacctcctgacagagagcatgctcaagtagatacattgtatagtgaccgttttcaaggtgttccatctgatttgcagaggagtaatgatgcaaatgtttctagtcaagatgtggttctagataactctggccaagcttgtgctcatgcagtggacggcatgacaagggagtttaatcattttgttcatagagacgctaatctttttgggagtactgaggtccctgcttctgagattactggggtggaatataatcaagatgcctctggttttcctcgacaaacagaggatgacaacacggtggagtataatcaagatgcctctggttttcctcgaccaacggagggtgggaatgcggtggagtataatcaagatgtctctggttttcctcgaccaacagaggatggaaaaacggtggagtataatcaagatgcctctggttttcctcgaccaacagaggatgaaaacacggtggagtataatcaagatgcctctggttttcctcagccaaccgaggatgaaaacacggtggagtataatcaagatgcctctggttttcctcggccaacggaggatgaaaatgccgcgtctgctacgggagataattctggcttccaagaaaacaacacgggttctcatatggatctggatatgatgaatgactatgaagtgaaggaatgcaacgattttgggagtgcgattcatggcgttgatacagattttctgaactatggtgacgacgacaacgacgacgacttcgtcgacgccgacgagccaaatcccagtgagttccagtctctcgacaacagcggctggtcttctcgcaccaggggtgtcgcgagatatctcaagactctgttcgacgaggagtccggtctggggaggaagagcgtcgccatcgaccatctggtgcgcgggaagacgcggaaggaagcgtcgaggatgttcttcgagaccttggtgctgacgacgaaggactacatcagcgtggaccaaccgaaccccttcgactttgtgagcgtgaagccaggcccgaagctgctcatgtcagagttctagttcaacaaagtcagcgtaccctggcgcgatacattccctcttaccattgtatccatcatcacaccgaccaacaacaacaccgcagatatccccccccccctcctcttccaaaaccatttttgtgtatgttgttgcagttcccctcccctgtagcatctggtgcgctgatccgttgttgttgccagggcgtctgtccgagtaggatggtggttgtgttgtaccgtcggctatccaacagtatatagtagtagtatgattttagcgacactcggtgaagcccgccatgtaatctgctagggttcatgctcccctaagttactgtcgctttagactggctaaagcccgtagaggaattgtatacgagaaggacagggacagcccgagatgatgaatgatgtattgatgtgcctgttgactatgtgaggactgacggttttaactcaataattcaagtgacctttcctgtgaaccatgaatccatgccggatatgaggtaaagatgaggaatggcctcgtacatccgtgcctttcgcgatgaaagaaagtggcttgtgatttgttttcccgttacaggccgatgggcgatggtggcccagggaagaagagacgagagcaggagaggaacgagaagagaaggcgagaaatcggtagaggacgacgagtggctggcaagaggatcatgtcgtcacggtcacggttggacggcgc

SEQ ID NO: 217326 - DNA, 6145 bp, Zea Mays
cacgtactctgtcaaacgatacgccgcgatgcttccagacaagcgccatccccttcctcgccccacacgccgtcgtgttggccgcgcctctcttcaaccttttcttgagcattggcgagagcccttcacatggtgcggcgctggcatcgttgttggcgacctctgcgcggtcggatctgcaaaggttgcagctagcgcgcctacagtacgtcaacatggtgcggcatctctttttgcagatccccaacttgctacgccgccggccgccgcatcggaactccttgcaccgcttgcctttcttctcccattcaaccggcaagcgttccctggctcaataacgcaactgggggatgtctgtcgctatctccatataggaaacgacaggtgcgacagatttagattttcaggtgatgcgtggtcgggatcgccggatcaatcaaaataagtgtgaaatttgagaggccgtggaacttccagatcgagtagtatccatccagatcgatatcccagaagaccaagcctggccatgaaacgcatgctaccccgatctcttcttcaccttttcttatccgcaggtaccaacaaaaaaagtgacccttttgacgacgtattgcgtgggcaaggcatgacagtgcgacaagagagaaactaacaaagagctctgttcgttctgctgattgcttatgattcgactcgcagtggcggtagctgggagagcttgggactggccagacacgaccaactcaccactgtaataagacgacttttatacatagctgacagtacgcaacctcagttcaggcgcaaggttagtctgatgatctgccttcattttgaatctcgattttgctgcttcatgcatgtatcatttgcgtcatcgatcatgtgctttttttctaagatctgtcattcgttttgcacgcacatcattttcctttgagttacctttacaaagatgacggacttcagcaagcgtctgcatatgcaattccttttcttgcctatccatcgatttactcatagattttattttcttcttagctcgatcaaatacttacatgttcgttttttgtttctagccattgggttggaattagatgatggatcgcacataacatacatagcactcttttttagcataccacctcatgcttaacgcatttcttatatatatacacaggttaactttccaggtaactcaaaccgacacagcttaagataaagttggcctccatattaattgctacttacatattatcatcatctttttccccaaaaaatcttactagaatactaagaccatttttacacagcaaccacataaagttggacccaacatcaacaatgattttacaaactctcttgaatcacctccaaaaggttcttattatacatctccaatagaattatctaaaattaaaattatgttcgtttcttacaggttgaaacaacaacttttgaagactggccatgaatatctagatagtactacaccatctacatagtttgtaatcaatataatttgcatattattcttcgcacacctttataaccatagcacaacaggacaatagctcatcgactctttaacaacaactgatgttcacctttttctgcacagaaactactggacgcgtgtcgcctggaaaaggattccgcacaatcacaggagtgagagcacgaaacctgtgccatattttttttgtcttcgatttgcagctccaagcagcagagctgcagagaggcgtcagcggagcacaagctggcgtccaagcaaagcccgctgaagtgtccccccctgcctttcttctctccttcactctctcgttcgtggcgacgcttgtgcgaccactcaccgtagcccgctcgacgccagttattcgccgtgcagctcgccggcgacgagcaccctccagcctaaggaggggagccggagatgttctactcgcagttcatcttggccaagaagggccccctcgggaccatatggattgccgcacacttggagcggaagctgcgcaagaaccaggtcgcggacacggacatcggcgtctcagtagaaaacatacaaagttgcaaacatgtaccacagaaagcaaagcatactcaagattccatcatattccctgacgttccaatcgcacttcggttatcaagtcatcttatgttaggcgtggtcagaatctattctcggaaggtcaactacctattccatgactgcagcgaagctttgctgaagataaaacaagctttcaggtccactgctgttgatctacctcctgaggagtcaactgctccatatcactctataactctgcctgagacattcgatcttgatgattttgaactgccagaagctgtgtttcaaggcgatactgatcatcatgtgagcacaaaagagcagatcactttgcaagacaacccagagaaaacaggatattcaacatcccagtttggcctagatgaaagatttggtgatggcagttcatcacatattggcttggacttggaggaggaattaattctgaacaaggaccactcaattcatctcgagtctgatgatggtattattattcaaggtcggtcatcggtcccttctactgatatggagattgatgataacaaaagtacaaacataacagctgaaggatacagcaacatggacggtgggccttctagtcatgtaaagttaggtccactgaatgcagatgacctaggaggaaacagtatccgtaactggactggttacaatgtacagactcctgatttgaatgatatattattgcataataatgaggatattgcaggcccatcaacttcgtactatcaacctagcccatttacttgtgatgaacctgcatcaccagagttcattagcgctcaggccccagctacacctggtttaatggaagagacagttccttccagagtccatgaaagtcctgttctgagtccacagagaaaggcatcaccatcaactaatgatgaaactgcaaaggctgacactcctgctgcaccagcctcagattttctccattcagctacaggaaatgccagtgatgtggtgggtgctgagatgacagaacttggattggcgaaaccggtgcaagttgagtcttctgttgtgcaggactctgatgcatcggtgcaacagcacacaagtgagggtttaccatcccagggtcaagcttcacacttggaagctgctgctgataagttggtcggctctgatggtatagctgcatcggttgatgaaacggtaactgtcaatgcaaccattgaagatgtacctttggctgtaaatgattcagagccatgtgttgatggttctgctggaccatctgtggtgaacctggtacagatggatggtccattatttgatgcacaaggtacagtactaagtgcagattttcaacatgaagtccaagcaatgcaacaagtagtggcatctaacgatagactgaatgaactatcaacttcagaatttgccgagcctgagaaaatgctgacagctccgaatgctgaattcaatcatgcgattgacttggggcagataactgcggaaaaaggaacaattgaatctgatggaagtaacataataggcagcctaacaagcagaaaaagacacctggaatatagcttaccagctttagagagtgagaccactaaaaagttgcctagccgaccacatgttaaaagaaccaatgattttgttcctcatgatgatgatatactggcatctattttagtcggtaggacccctgggttcacacttgattcaacaccactaccaccaagggaatcatctctgaaacgcccaaggttggggtcgaagatgggtacactcaagagaaaagtgcagatagatgatgccatggtcctgcatgctgatactatacggcaacagttgatcaatactgaggatatacggcgcattcgtaaaaaggctccatgcactcgttccgaaatatggatgattgagaaaggttcactggaagatgatttattccacgagcccatcttttcctgcctatctgaggagctaaacaatttacacaatcggacatatgagactattgtacaccctgctgttcagagaatggaactacatggtcaattagacatgcctgaaacaataccagaatatagaaatattgctgggtttggttctgctactattgatggcccacttcacataccagatgggattcaatcagatgccatgttgtcaggcgcaaatgttgcatatggcgctacagctgcttttggtttgcaaattcctcctgactaccaggttaaccgtgcatctaatgattttgttgtcggcactcagcttcaagaggtggctaaaccttttattggtaatgagcacgaagtggcacctcctgacagagagcatgctcaagtagatacattgtatagtgaccgttttcaaggtgttccatctgatttgcagaggagtaatgatgcaaatgtttctagtcaagatgtggttctagataactctggccaagcttgtgctcatgcagtggacggcatgacaagggagtttaatcattttgttcatagagacgctaatctttttgggagtactgaggtccctgcttctgagattactggggtggaatataatcaagatgcctctggttttcctcgacaaacagaggatgacaacacggtggagtataatcaagatgcctctggttttcctcgaccaacggagggtgggaatgcggtggagtataatcaagatgtctctggttttcctcgaccaacagaggatggaaaaacggtggagtataatcaagatgcctctggttttcctcgaccaacagaggatgaaaacacggtggagtataatcaagatgcctctggttttcctcagccaaccgaggatgaaaacacggtggagtataatcaagatgcctctggttttcctcggccaacggaggatgaaaatgccgcgtctgctacgggagataattctggcttccaagaaaacaacacgggttctcatatggatctggatatgatgaatgactatgaagtgaaggaatgcaacgattttgggagtgcgattcatggcgttgatacagattttctgaactatggtgacgacgacaacgacgacgacttcgtcgacgccgacgagccaaatcccagtgagttccagtctctcgacaacagcggctggtcttctcgcaccaggggtgtcgcgagatatctcaagactctgttcgacgaggagtccggtctggggaggaagagcgtcgccatcgaccatctggtgcgcgggaagacgcggaaggaagcgtcgaggatgttcttcgagaccttggtgctgacgacgaaggactacatcagcgtggaccaaccgaaccccttcgactttgtgagcgtgaagccaggcccgaagctgctcatgtcagagttctagttcaacaaagtcagcgtaccctggcgcgatacattccctcttaccattgtatccatcatcacaccgaccaacaacaacaccgcagatatccccccccccctcctcttccaaaaccatttttgtgtatgttgttgcagttcccctcccctgtagcatctggtgcgctgatccgttgttgttgccagggcgtctgtccgagtaggatggtggttgtgttgtaccgtcggctatccaacagtatatagtagtagtatgattttagcgacactcggtgaagcccgccatgtaatctgctagggttcatgctcccctaagttactgtcgctttagactggctaaagcccgtagaggaattgtatacgagaaggacagggacagcccgagatgatgaatgatgtattgatgtgcctgttgactatgtgaggactgacggttttaactcaataattcaagtgacctttcctgtgaaccatgaatccatgccggatatgaggtaaagatgaggaatggcctcgtacatccgtgcctttcgcgatgaaagaaagtggcttgtgatttgttttcccgttacaggccgatgggcgatggtggcccagggaagaagagacgagagcaggagaggaacgagaagagaaggcgagaaatcggtagaggacgacgagtggctggcaagaggatcatgtcgtcacggtcacggttggacggcgc

SEQ ID NO: 217327 - DNA, 8061 bp, Zea Mays
cacgtactctgtcaaacgatacgccgcgatgcttccagacaagcgccatccccttcctcgccccacacgccgtcgtgttggccgcgcctctcttcaaccttttcttgagcattggcgagagcccttcacatggtgcggcgctggcatcgttgttggcgacctctgcgcggtcggatctgcaaaggttgcagctagcgcgcctacagtacgtcaacatggtgcggcatctctttttgcagatccccaacttgctacgccgccggccgccgcatcggaactccttgcaccgcttgcctttcttctcccattcaaccggcaagcgttccctggctcaataacgcaactgggggatgtctgtcgctatctccatataggaaacgacaggtgcgacagatttagattttcaggtgatgcgtggtcgggatcgccggatcaatcaaaataagtgtgaaatttgagaggccgtggaacttccagatcgagtagtatccatccagatcgatatcccagaagaccaagcctggccatgaaacgcatgctaccccgatctcttcttcaccttttcttatccgcaggtaccaacaaaaaaagtgacccttttgacgacgtattgcgtgggcaaggcatgacagtgcgacaagagagaaactaacaaagagctctgttcgttctgctgattgcttatgattcgactcgcagtggcggtagctgggagagcttgggactggccagacacgaccaactcaccactgtaataagacgacttttatacatagctgacagtacgcaacctcagttcaggcgcaaggttagtctgatgatctgccttcattttgaatctcgattttgctgcttcatgcatgtatcatttgcgtcatcgatcatgtgctttttttctaagatctgtcattcgttttgcacgcacatcattttcctttgagttacctttacaaagatgacggacttcagcaagcgtctgcatatgcaattccttttcttgcctatccatcgatttactcatagattttattttcttcttagctcgatcaaatacttacatgttcgttttttgtttctagccattgggttggaattagatgatggatcgcacataacatacatagcactcttttttagcataccacctcatgcttaacgcatttcttatatatatacacaggttaactttccaggtaactcaaaccgacacagcttaagataaagttggcctccatattaattgctacttacatattatcatcatctttttccccaaaaaatcttactagaatactaagaccatttttacacagcaaccacataaagttggacccaacatcaacaatgattttacaaactctcttgaatcacctccaaaaggttcttattatacatctccaatagaattatctaaaattaaaattatgttcgtttcttacaggttgaaacaacaacttttgaagactggccatgaatatctagatagtactacaccatctacatagtaattgttttgcatgtctatgacgagcatcgtcacttttggaccacgaatcttttttgtgtactgaaaccttttcagttctttatatgtttaagctatctctggctcttgaattaccctagaatctggttaaccttgtctttgctcttatatacttatttactctctaatatacatataatcatcatacatttacattatactatgctgcgctaaacggattggcacgcgcgcatgggcgcgcgctatacactagtatatgtttgatagagaacacatccaagcgtgtgagagcaatttctagtgtgttgtagtgagaggttgcattgatcgacactatattatggtcgagttgcaagttagcggtatatgttatgtttgtaggctgctgcctcttaaatggttgtaacaccaaaatattatgttggaatgtatgaaaattctccaaatgttttgaattaaaactattactaccttttaagttaattttctaaaacaaatagatgataatattaaatcttggatagttcaaatttaggcttgaattttcaaactggcctacaactttagcttataagatggcttgttgttacagcatacagttcccgtgtaagtttatgataaataactttagcttataagatgggttgttattacataaattaagatattagtttaacttaatttaaatataaacaatccgagttgaaccgagctactctggaatcctggatcaaaatgaacgtgctagtaagctactagcttttagtcatgccctaattaagaagtaacagtcaaatcacttcgccctttcgcctagagacctacaccactcctcatttgacgatgcacacgtgtaggaagatctgcatcgactatactgtaccggttatatcggtttcagccggtactgatttatattagaatcgatgtcggttgataccgatcgatcgatgcttgataacatgttaaacgattcgaccagtaccaatccaaatcacttgataatgacggattttaacgacgttataatttaattggtgtacatgtacatcgtgtcagcttatatccgttttaaaccgtttgaaattcaataaatccaaaaaacatattaactaagagaatattcctaccattttctccacagccacgtgaccagtttcacagactcacagctcaaggaggtatttaatttgccaattttgcacctcacccaataactgtcgtacatataatatagtctaacatccaagtttcgaaaagaaggcactaaaattaatttaggatgttattaaccaaaaatcattcttcaacacattcttaaacgaggtatctaaatattccaacttcttaaatattcatatttagtctctagacttagggacctcttgtgcactccttatagcctatttcgtacgtcaatcataccgtaaaatcatttaccagccacgagtgatggactttgaataattgaagccgtggaaagaatgaatttaaaattctcgttggccaagtttgaagatgacttttttcaaaaaaaagagaaaaacgaccaacctgtgattcatacaaaacgaaaatattaataaagagaataacgatgattattgaactttatcgtacaaatgaaatcaaatttaaagctgcaagtacaaatgaaaattcgagcaaataattgagaactatttactaacctaataattgaggactatttatcgtacaaatgaaaattcgagctagaatactttaaatatatttactaacctaataagtgagaactatttggagaccaaggttgattttattcccaaacgaggtgtttggttcgaggaatgaactaatccattatcatttcactcttcattttttatttggtttgaagaatgaaatgagttgatctatcaccacctcattcctcatagttatttagctagtattaatatgagaaatgtggtcatcccaccaaatttgagaaattaatccatgatgcacaaccttatttttgatgcagtgattccttaaatcaagcaaccccaatatgtatctaccaatttgctgaatctaaagaggtgtttagtttctagaaactactggacgcgtgtcgcctggaaaaggattccgcacaatcacaggagtgagagcacgaaacctgtgccatattttttttgtcttcgatttgcagctccaagcagcagagctgcagagaggcgtcagcggagcacaagctggcgtccaagcaaagcccgctgaagtgtccccccctgcctttcttctctccttcactctctcgttcgtggcgacgcttgtgcgaccactcaccgtagcccgctcgacgccagttattcgccgtgcagctcgccggcgacgagcaccctccagcctaaggaggggagccggagatgttctactcgcagttcatcttggccaagaagggccccctcgggaccatatggattgccgcacacttggagcggaagctgcgcaagaaccaggtcgcggacacggacatcggcgtctcagtagattccatcatattccctgacgttccaatcgcacttcggttatcaagtcatcttatgttaggcgtggtcagaatctattctcggaaggtcaactacctattccatgactgcagcgaagctttgctgaagataaaacaagctttcaggtccactgctgttgatctacctcctgaggagtcaactgctccatatcactctataactctgcctgagacattcgatcttgatgattttgaactgccagaagctgtgtttcaaggcgatactgatcatcatgtgagcacaaaagagcagatcactttgcaagacaacccagagaaaacaggatattcaacatcccagtttggcctagatgaaagatttggtgatggcagttcatcacatattggcttggacttggaggaggaattaattctgaacaaggaccactcaattcatctcgagtctgatgatggtattattattcaaggtcggtcatcggtcccttctactgatatggagattgatgataacaaaagtacaaacataacagctgaaggatacagcaacatggacggtgggccttctagtcatgtaaagttaggtccactgaatgcagatgacctaggaggaaacagtatccgtaactggactggttacaatgtacagactcctgatttgaatgatatattattgcataataatgaggatattgcaggcccatcaacttcgtactatcaacctagcccatttacttgtgatgaacctgcatcaccagagttcattagcgctcaggccccagctacacctggtttaatggaagagacagttccttccagagtccatgaaagtcctgttctgagtccacagagaaaggcatcaccatcaactaatgatgaaactgcaaaggctgacactcctgctgcaccagcctcagattttctccattcagctacaggaaatgccagtgatgtggtgggtgctgagatgacagaacttggattggcgaaaccggtgcaagttgagtcttctgttgtgcaggactctgatgcatcggtgcaacagcacacaagtgagggtttaccatcccagggtcaagcttcacacttggaagctgctgctgataagttggtcggctctgatggtatagctgcatcggttgatgaaacggtaactgtcaatgcaaccattgaagatgtacctttggctgtaaatgattcagagccatgtgttgatggttctgctggaccatctgtggtgaacctggtacagatggatggtccattatttgatgcacaaggtacagtactaagtgcagattttcaacatgaagtccaagcaatgcaacaagtagtggcatctaacgatagactgaatgaactatcaacttcagaatttgccgagcctgagaaaatgctgacagctccgaatgctgaattcaatcatgcgattgacttggggcagataactgcggaaaaaggaacaattgaatctgatggaagtaacataataggcagcctaacaagcagaaaaagacacctggaatatagcttaccagctttagagagtgagaccactaaaaagttgcctagccgaccacatgttaaaagaaccaatgattttgttcctcatgatgatgatatactggcatctattttagtcggtaggacccctgggttcacacttgattcaacaccactaccaccaagggaatcatctctgaaacgcccaaggttggggtcgaagatgggtacactcaagagaaaagtgcagatagatgatgccatggtcctgcatgctgatactatacggcaacagttgatcaatactgaggatatacggcgcattcgtaaaaaggctccatgcactcgttccgaaatatggatgattgagaaaggttcactggaagatgatttattccacgagcccatcttttcctgcctatctgaggagctaaacaatttacacaatcggacatatgagactattgtacaccctgctgttcagagaatggaactacatggtcaattagacatgcctgaaacaataccagaatatagaaatattgctgggtttggttctgctactattgatggcccacttcacataccagatgggattcaatcagatgccatgttgtcaggcgcaaatgttgcatatggcgctacagctgcttttggtttgcaaattcctcctgactaccaggttaaccgtgcatctaatgattttgttgtcggcactcagcttcaagaggtggctaaaccttttattggtaatgagcacgaagtggcacctcctgacagagagcatgctcaagtagatacattgtatagtgaccgttttcaaggtgttccatctgatttgcagaggagtaatgatgcaaatgtttctagtcaagatgtggttctagataactctggccaagcttgtgctcatgcagtggacggcatgacaagggagtttaatcattttgttcatagagacgctaatctttttgggagtactgaggtccctgcttctgagattactggggtggaatataatcaagatgcctctggttttcctcgacaaacagaggatgacaacacggtggagtataatcaagatgcctctggttttcctcgaccaacggagggtgggaatgcggtggagtataatcaagatgtctctggttttcctcgaccaacagaggatggaaaaacggtggagtataatcaagatgcctctggttttcctcgaccaacagaggatgaaaacacggtggagtataatcaagatgcctctggttttcctcagccaaccgaggatgaaaacacggtggagtataatcaagatgcctctggttttcctcggccaacggaggatgaaaatgccgcgtctgctacgggagataattctggcttccaagaaaacaacacgggttctcatatggatctggatatgatgaatgactatgaagtgaaggaatgcaacgattttgggagtgcgattcatggcgttgatacagattttctgaactatggtgacgacgacaacgacgacgacttcgtcgacgccgacgagccaaatcccagtgagttccagtctctcgacaacagcggctggtcttctcgcaccaggggtgtcgcgagatatctcaagactctgttcgacgaggagtccggtctggggaggaagagcgtcgccatcgaccatctggtgcgcgggaagacgcggaaggaagcgtcgaggatgttcttcgagaccttggtgctgacgacgaaggactacatcagcgtggaccaaccgaaccccttcgactttgtgagcgtgaagccaggcccgaagctgctcatgtcagagttctagttcaacaaagtcagcgtaccctggcgcgatacattccctcttaccattgtatccatcatcacaccgaccaacaacaacaccgcagatatccccccccccctcctcttccaaaaccatttttgtgtatgttgttgcagttcccctcccctgtagcatctggtgcgctgatccgttgttgttgccagggcgtctgtccgagtaggatggtggttgtgttgtaccgtcggctatccaacagtatatagtagtagtatgattttagcgacactcggtgaagcccgccatgtaatctgctagggttcatgctcccctaagttactgtcgctttagactggctaaagcccgtagaggaattgtatacgagaaggacagggacagcccgagatgatgaatgatgtattgatgtgcctgttgactatgtgaggactgacggttttaactcaataattcaagtgacctttcctgtgaaccatgaatccatgccggatatgaggtaaagatgaggaatggcctcgtacatccgtgcctttcgcgatgaaagaaagtggcttgtgatttgttttcccgttacaggccgatgggcgatggtggcccagggaagaagagacgagagcaggagaggaacgagaagagaaggcgagaaatcggtagaggacgacgagtggctggcaagaggatcatgtcgtcacggtcacggttggacggcgc

SEQ ID NO: 217328 - DNA, 7535 bp, Zea Mays
cacgtactctgtcaaacgatacgccgcgatgcttccagacaagcgccatccccttcctcgccccacacgccgtcgtgttggccgcgcctctcttcaaccttttcttgagcattggcgagagcccttcacatggtgcggcgctggcatcgttgttggcgacctctgcgcggtcggatctgcaaaggttgcagctagcgcgcctacagtacgtcaacatggtgcggcatctctttttgcagatccccaacttgctacgccgccggccgccgcatcggaactccttgcaccgcttgcctttcttctcccattcaaccggcaagcgttccctggctcaataacgcaactgggggatgtctgtcgctatctccatataggaaacgacaggtgcgacagatttagattttcaggtgatgcgtggtcgggatcgccggatcaatcaaaataagtgtgaaatttgagaggccgtggaacttccagatcgagtagtatccatccagatcgatatcccagaagaccaagcctggccatgaaacgcatgctaccccgatctcttcttcaccttttcttatccgcaggtaccaacaaaaaaagtgacccttttgacgacgtattgcgtgggcaaggcatgacagtgcgacaagagagaaactaacaaagagctctgttcgttctgctgattgcttatgattcgactcgcagtggcggtagctgggagagcttgggactggccagacacgaccaactcaccactgtaataagacgacttttatacatagctgacagtacgcaacctcagttcaggcgcaaggtaattgttttgcatgtctatgacgagcatcgtcacttttggaccacgaatcttttttgtgtactgaaaccttttcagttctttatatgtttaagctatctctggctcttgaattaccctagaatctggttaaccttgtctttgctcttatatacttatttactctctaatatacatataatcatcatacatttacattatactatgctgcgctaaacggattggcacgcgcgcatgggcgcgcgctatacactagtatatgtttgatagagaacacatccaagcgtgtgagagcaatttctagtgtgttgtagtgagaggttgcattgatcgacactatattatggtcgagttgcaagttagcggtatatgttatgtttgtaggctgctgcctcttaaatggttgtaacaccaaaatattatgttggaatgtatgaaaattctccaaatgttttgaattaaaactattactaccttttaagttaattttctaaaacaaatagatgataatattaaatcttggatagttcaaatttaggcttgaattttcaaactggcctacaactttagcttataagatggcttgttgttacagcatacagttcccgtgtaagtttatgataaataactttagcttataagatgggttgttattacataaattaagatattagtttaacttaatttaaatataaacaatccgagttgaaccgagctactctggaatcctggatcaaaatgaacgtgctagtaagctactagcttttagtcatgccctaattaagaagtaacagtcaaatcacttcgccctttcgcctagagacctacaccactcctcatttgacgatgcacacgtgtaggaagatctgcatcgactatactgtaccggttatatcggtttcagccggtactgatttatattagaatcgatgtcggttgataccgatcgatcgatgcttgataacatgttaaacgattcgaccagtaccaatccaaatcacttgataatgacggattttaacgacgttataatttaattggtgtacatgtacatcgtgtcagcttatatccgttttaaaccgtttgaaattcaataaatccaaaaaacatattaactaagagaatattcctaccattttctccacagccacgtgaccagtttcacagactcacagctcaaggaggtatttaatttgccaattttgcacctcacccaataactgtcgtacatataatatagtctaacatccaagtttcgaaaagaaggcactaaaattaatttaggatgttattaaccaaaaatcattcttcaacacattcttaaacgaggtatctaaatattccaacttcttaaatattcatatttagtctctagacttagggacctcttgtgcactccttatagcctatttcgtacgtcaatcataccgtaaaatcatttaccagccacgagtgatggactttgaataattgaagccgtggaaagaatgaatttaaaattctcgttggccaagtttgaagatgacttttttcaaaaaaaagagaaaaacgaccaacctgtgattcatacaaaacgaaaatattaataaagagaataacgatgattattgaactttatcgtacaaatgaaatcaaatttaaagctgcaagtacaaatgaaaattcgagcaaataattgagaactatttactaacctaataattgaggactatttatcgtacaaatgaaaattcgagctagaatactttaaatatatttactaacctaataagtgagaactatttggagaccaaggttgattttattcccaaacgaggtgtttggttcgaggaatgaactaatccattatcatttcactcttcattttttatttggtttgaagaatgaaatgagttgatctatcaccacctcattcctcatagttatttagctagtattaatatgagaaatgtggtcatcccaccaaatttgagaaattaatccatgatgcacaaccttatttttgatgcagtgattccttaaatcaagcaaccccaatatgtatctaccaatttgctgaatctaaagaggtgtttagtttctaggtactaatttgtagtcactttattttgttctattttaggttcttaaatttgtaaatttaaactctatattgatttcaatatttgacaatttaaaaattaaattaaaataaaatagagggacttaaaattaatccatagaaactaaacacccatcagtttataatctttttttttagaaactactggacgcgtgtcgcctggaaaaggattccgcacaatcacaggagtgagagcacgaaacctgtgccatattttttttgtcttcgatttgcagctccaagcagcagagctgcagagaggcgtcagcggagcacaagctggcgtccaagcaaagcccgctgaagtgtccccccctgcctttcttctctccttcactctctcgttcgtggcgacgcttgtgcgaccactcaccgtagcccgctcgacgccagttattcgccgtgcagctcgccggcgacgagcaccctccagcctaaggaggggagccggagatgttctactcgcagttcatcttggccaagaagggccccctcgggaccatatggattgccgcacacttggagcggaagctgcgcaagaaccaggtcgcggacacggacatcggcgtctcagtagattccatcatattccctgacgttccaatcgcacttcggttatcaagtcatcttatgttaggcgtggtcagaatctattctcggaaggtcaactacctattccatgactgcagcgaagctttgctgaagataaaacaagctttcaggtccactgctgttgatctacctcctgaggagtcaactgctccatatcactctataactctgcctgagacattcgatcttgatgattttgaactgccagaagctgtgtttcaaggcgatactgatcatcatgtgagcacaaaagagcagatcactttgcaagacaacccagagaaaacaggatattcaacatcccagtttggcctagatgaaagatttggtgatggcagttcatcacatattggcttggacttggaggaggaattaattctgaacaaggaccactcaattcatctcgagtctgatgatggtattattattcaaggtcggtcatcggtcccttctactgatatggagattgatgataacaaaagtacaaacataacagctgaaggatacagcaacatggacggtgggccttctagtcatgtaaagttaggtccactgaatgcagatgacctaggaggaaacagtatccgtaactggactggttacaatgtacagactcctgatttgaatgatatattattgcataataatgaggatattgcaggcccatcaacttcgtactatcaacctagcccatttacttgtgatgaacctgcatcaccagagttcattagcgctcaggccccagctacacctggtttaatggaagagacagttccttccagagtccatgaaagtcctgttctgagtccacagagaaaggcatcaccatcaactaatgatgaaactgcaaaggctgacactcctgctgcaccagcctcagattttctccattcagctacaggaaatgccagtgatgtggtgggtgctgagatgacagaacttggattggcgaaaccggtgcaagttgagtcttctgttgtgcaggactctgatgcatcggtgcaacagcacacaagtgagggtttaccatcccagggtcaagcttcacacttggaagctgctgctgataagttggtcggctctgatggtatagctgcatcggttgatgaaacggtaactgtcaatgcaaccattgaagatgtacctttggctgtaaatgattcagagccatgtgttgatggttctgctggaccatctgtggtgaacctggtacagatggatggtccattatttgatgcacaagtactaagtgcagattttcaacatgaagtccaagcaatgcaacaagtagtggcatctaacgatagactgaatgaactatcaacttcagaatttgccgagcctgagaaaatgctgacagctccgaatgctgaattcaatcatgcgattgacttggggcagataactgcggaaaaaggaacaattgaatctgatggaagtaacataataggcagcctaacaagcagaaaaagacacctggaatatagcttaccagctttagagagtgagaccactaaaaagttgcctagccgaccacatgttaaaagaaccaatgattttgttcctcatgatgatgatatactggcatctattttagtcggtaggacccctgggttcacacttgattcaacaccactaccaccaagggaatcatctctgaaacgcccaaggttggggtcgaagatgggtacactcaagagaaaagtgcagatagatgatgccatggtcctgcatgctgatactatacggcaacagttgatcaatactgaggatatacggcgcattcgtaaaaaggctccatgcactcgttccgaaatatggatgattgagaaaggttcactggaagatgatttattccacgagcccatcttttcctgcctatctgaggagctaaacaatttacacaatcggacatatgagactattgtacaccctgctgttcagagaatggaactacatggtcaattagacatgcctgaaacaataccagaatatagaaatattgctgggtttggttctgctactattgatggcccacttcacataccagatgggattcaatcagatgccatgttgtcaggcgcaaatgttgcatatggcgctacagctgcttttggtttgcaaattcctcctgactaccaggttaaccgtgcatctaatgattttgttgtcggcactcagcttcaagaggtggctaaaccttttattggtaatgagcacgaagtggcacctcctgacagagagcatgctcaagtagatacattgtatagtgaccgttttcaaggtgttccatctgatttgcagaggagtaatgatgcaaatgtttctagtcaagatgtggttctagataactctggccaagcttgtgctcatgcagtggacggcatgacaagggagtttaatcattttgttcatagagacgctaatctttttgggagtactgaggtccctgcttctgagattactggggtggaatataatcaagatgcctctggttttcctcgacaaacagaggatgacaacacggtggagtataatcaagatgcctctggttttcctcgaccaacggagggtgggaatgcggtggagtataatcaagatgtctctggttttcctcgaccaacagaggatggaaaaacggtggagtataatcaagatgcctctggttttcctcgaccaacagaggatgaaaacacggtggagtataatcaagatgcctctggttttcctcagccaaccgaggatgaaaacacggtggagtataatcaagatgcctctggttttcctcggccaacggaggatgaaaatgccgcgtctgctacgggagataattctggcttccaagaaaacaacacgggttctcatatggatctggatatgatgaatgactatgaagtgaaggaatgcaacgattttgggagtgcgattcatggcgttgatacagattttctgaactatggtgacgacgacaacgacgacgacttcgtcgacgccgacgagccaaatcccagtgagttccagtctctcgacaacagcggctggtcttctcgcaccaggggtgtcgcgagatatctcaagactctgttcgacgaggagtccggtctggggaggaagagcgtcgccatcgaccatctggtgcgcgggaagacgcggaaggaagcgtcgaggatgttcttcgagaccttggtgctgacgacgaaggactacatcagcgtggaccaaccgaaccccttcgactttgtgagcgtgaagccaggcccgaagctgctcatgtcagagttctagttcaacaaagtcagcgtaccctggcgcgatacattccctcttaccattgtatccatcatcacaccgaccaacaacaacaccgcagatatccccccccccctcctcttccaaaaccatttttgtgtatgttgttgcagttcccctcccctgtagcatctggtgcgctgatccgttgttgttgccagggcgtctgtccgagtaggatggtggttgtgttgtaccgtcggctatccaacagtatatagtagtagtatgattttagcgacactcggtgaagcccgccatgtaatctgctagggttcatgctcccctaagttactgtcgctttagactggctaaagcccgtagaggaattgtatacgagaaggacagggacagcccgagatgatgaatgatgtattgatgtgcctgttgactatgtgaggactgacggttttaactcaataattcaagtgacctttcctgtgaaccatgaatccatgccggatatgaggtaaagatgaggaatggcctcgtacatccgtgcctttcgcgatgaaagaaagtggcttgtgatttgttttcccgttacaggccgatgggcgatggtggcccagggaagaagagacgagagcaggagaggaacgagaagagaaggcgagaaatcggtagaggacgacgagtggctggcaagaggatcatgtcgtcacggtcacggttggacggcgc

SEQ ID NO: 217329 - DNA, 7963 bp, Zea Mays
cacgtactctgtcaaacgatacgccgcgatgcttccagacaagcgccatccccttcctcgccccacacgccgtcgtgttggccgcgcctctcttcaaccttttcttgagcattggcgagagcccttcacatggtgcggcgctggcatcgttgttggcgacctctgcgcggtcggatctgcaaaggttgcagctagcgcgcctacagtacgtcaacatggtgcggcatctctttttgcagatccccaacttgctacgccgccggccgccgcatcggaactccttgcaccgcttgcctttcttctcccattcaaccggcaagcgttccctggctcaataacgcaactgggggatgtctgtcgctatctccatataggaaacgacaggtgcgacagatttagattttcaggtgatgcgtggtcgggatcgccggatcaatcaaaataagtgtgaaatttgagaggccgtggaacttccagatcgagtagtatccatccagatcgatatcccagaagaccaagcctggccatgaaacgcatgctaccccgatctcttcttcaccttttcttatccgcaggtaccaacaaaaaaagtgacccttttgacgacgtattgcgtgggcaaggcatgacagtgcgacaagagagaaactaacaaagagctctgttcgttctgctgattgcttatgattcgactcgcagtggcggtagctgggagagcttgggactggccagacacgaccaactcaccactgtaataagacgacttttatacatagctgacagtacgcaacctcagttcaggcgcaaggttagtctgatgatctgccttcattttgaatctcgattttgctgcttcatgcatgtatcatttgcgtcatcgatcatgtgctttttttctaagatctgtcattcgttttgcacgcacatcattttcctttgagttacctttacaaagatgacggacttcagcaagcgtctgcatatgcaattccttttcttgcctatccatcgatttactcatagattttattttcttcttagctcgatcaaatacttacatgttcgttttttgtttctagccattgggttggaattagatgatggatcgcacataacatacatagcactcttttttagcataccacctcatgcttaacgcatttcttatatatatacacaggttaactttccaggtaactcaaaccgacacagcttaagataaagttggcctccatattaattgctacttacatattatcatcatctttttccccaaaaaatcttactagaatactaagaccatttttacacagcaaccacataaagttggacccaacatcaacaatgattttacaaactctcttgaatcacctccaaaaggttcttattatacatctccaatagaattatctaaaattaaaattatgttcgtttcttacaggttgaaacaacaacttttgaagactggccatgaatatctagatagtactacaccatctacatagtaattgttttgcatgtctatgacgagcatcgtcacttttggaccacgaatcttttttgtgtactgaaaccttttcagttctttatatgtttaagctatctctggctcttgaattaccctagaatctggttaaccttgtctttgctcttatatacttatttactctctaatatacatataatcatcatacatttacattatactatgctgcgctaaacggattggcacgcgcgcatgggcgcgcgctatacactagtatatgtttgatagagaacacatccaagcgtgtgagagcaatttctagtgtgttgtagtgagaggttgcattgatcgacactatattatggtcgagttgcaagttagcggtatatgttatgtttgtaggctgctgcctcttaaatggttgtaacaccaaaatattatgttggaatgtatgaaaattctccaaatgttttgaattaaaactattactaccttttaagttaattttctaaaacaaatagatgataatattaaatcttggatagttcaaatttaggcttgaattttcaaactggcctacaactttagcttataagatggcttgttgttacagcatacagttcccgtgtaagtttatgataaataactttagcttataagatgggttgttattacataaattaagatattagtttaacttaatttaaatataaacaatccgagttgaaccgagctactctggaatcctggatcaaaatgaacgtgctagtaagctactagcttttagtcatgccctaattaagaagtaacagtcaaatcacttcgccctttcgcctagagacctacaccactcctcatttgacgatgcacacgtgtaggaagatctgcatcgactatactgtaccggttatatcggtttcagccggtactgatttatattagaatcgatgtcggttgataccgatcgatcgatgcttgataacatgttaaacgattcgaccagtaccaatccaaatcacttgataatgacggattttaacgacgttataatttaattggtgtacatgtacatcgtgtcagcttatatccgttttaaaccgtttgaaattcaataaatccaaaaaacatattaactaagagaatattcctaccattttctccacagccacgtgaccagtttcacagactcacagctcaaggaggtatttaatttgccaattttgcacctcacccaataactgtcgtacatataatatagtctaacatccaagtttcgaaaagaaggcactaaaattaatttaggatgttattaaccaaaaatcattcttcaacacattcttaaacgaggtatctaaatattccaacttcttaaatattcatatttagtctctagacttagggacctcttgtgcactccttatagcctatttcgtacgtcaatcataccgtaaaatcatttaccagccacgagtgatggactttgaataattgaagccgtggaaagaatgaatttaaaattctcgttggccaagtttgaagatgacttttttcaaaaaaaagagaaaaacgaccaacctgtgattcatacaaaacgaaaatattaataaagagaataacgatgattattgaactttatcgtacaaatgaaatcaaatttaaagctgcaagtacaaatgaaaattcgagcaaataattgagaactatttactaacctaataattgaggactatttatcgtacaaatgaaaattcgagctagaatactttaaatatatttactaacctaataagtgagaactatttggagaccaaggttgattttattcccaaacgaggtgtttggttcgaggaatgaactaatccattatcatttcactcttcattttttatttggtttgaagaatgaaatgagttgatctatcaccacctcattcctcatagttatttagctagtattaatatgagaaatgtggtcatcccaccaaatttgagaaattaatccatgatgcacaaccttatttttgatgcagtgattccttaaatcaagcaaccccaatatgtatctaccaatttgctgaatctaaagaggtgtttagtttctagctccaagcagcagagctgcagagaggcgtcagcggagcacaagctggcgtccaagcaaagcccgctgaagtgtccccccctgcctttcttctctccttcactctctcgttcgtggcgacgcttgtgcgaccactcaccgtagcccgctcgacgccagttattcgccgtgcagctcgccggcgacgagcaccctccagcctaaggaggggagccggagatgttctactcgcagttcatcttggccaagaagggccccctcgggaccatatggattgccgcacacttggagcggaagctgcgcaagaaccaggtcgcggacacggacatcggcgtctcagtagattccatcatattccctgacgttccaatcgcacttcggttatcaagtcatcttatgttaggcgtggtcagaatctattctcggaaggtcaactacctattccatgactgcagcgaagctttgctgaagataaaacaagctttcaggtccactgctgttgatctacctcctgaggagtcaactgctccatatcactctataactctgcctgagacattcgatcttgatgattttgaactgccagaagctgtgtttcaaggcgatactgatcatcatgtgagcacaaaagagcagatcactttgcaagacaacccagagaaaacaggatattcaacatcccagtttggcctagatgaaagatttggtgatggcagttcatcacatattggcttggacttggaggaggaattaattctgaacaaggaccactcaattcatctcgagtctgatgatggtattattattcaaggtcggtcatcggtcccttctactgatatggagattgatgataacaaaagtacaaacataacagctgaaggatacagcaacatggacggtgggccttctagtcatgtaaagttaggtccactgaatgcagatgacctaggaggaaacagtatccgtaactggactggttacaatgtacagactcctgatttgaatgatatattattgcataataatgaggatattgcaggcccatcaacttcgtactatcaacctagcccatttacttgtgatgaacctgcatcaccagagttcattagcgctcaggccccagctacacctggtttaatggaagagacagttccttccagagtccatgaaagtcctgttctgagtccacagagaaaggcatcaccatcaactaatgatgaaactgcaaaggctgacactcctgctgcaccagcctcagattttctccattcagctacaggaaatgccagtgatgtggtgggtgctgagatgacagaacttggattggcgaaaccggtgcaagttgagtcttctgttgtgcaggactctgatgcatcggtgcaacagcacacaagtgagggtttaccatcccagggtcaagcttcacacttggaagctgctgctgataagttggtcggctctgatggtatagctgcatcggttgatgaaacggtaactgtcaatgcaaccattgaagatgtacctttggctgtaaatgattcagagccatgtgttgatggttctgctggaccatctgtggtgaacctggtacagatggatggtccattatttgatgcacaaggtacagtactaagtgcagattttcaacatgaagtccaagcaatgcaacaagtagtggcatctaacgatagactgaatgaactatcaacttcagaatttgccgagcctgagaaaatgctgacagctccgaatgctgaattcaatcatgcgattgacttggggcagataactgcggaaaaaggaacaattgaatctgatggaagtaacataataggcagcctaacaagcagaaaaagacacctggaatatagcttaccagctttagagagtgagaccactaaaaagttgcctagccgaccacatgttaaaagaaccaatgattttgttcctcatgatgatgatatactggcatctattttagtcggtaggacccctgggttcacacttgattcaacaccactaccaccaagggaatcatctctgaaacgcccaaggttggggtcgaagatgggtacactcaagagaaaagtgcagatagatgatgccatggtcctgcatgctgatactatacggcaacagttgatcaatactgaggatatacggcgcattcgtaaaaaggctccatgcactcgttccgaaatatggatgattgagaaaggttcactggaagatgatttattccacgagcccatcttttcctgcctatctgaggagctaaacaatttacacaatcggacatatgagactattgtacaccctgctgttcagagaatggaactacatggtcaattagacatgcctgaaacaataccagaatatagaaatattgctgggtttggttctgctactattgatggcccacttcacataccagatgggattcaatcagatgccatgttgtcaggcgcaaatgttgcatatggcgctacagctgcttttggtttgcaaattcctcctgactaccaggttaaccgtgcatctaatgattttgttgtcggcactcagcttcaagaggtggctaaaccttttattggtaatgagcacgaagtggcacctcctgacagagagcatgctcaagtagatacattgtatagtgaccgttttcaaggtgttccatctgatttgcagaggagtaatgatgcaaatgtttctagtcaagatgtggttctagataactctggccaagcttgtgctcatgcagtggacggcatgacaagggagtttaatcattttgttcatagagacgctaatctttttgggagtactgaggtccctgcttctgagattactggggtggaatataatcaagatgcctctggttttcctcgacaaacagaggatgacaacacggtggagtataatcaagatgcctctggttttcctcgaccaacggagggtgggaatgcggtggagtataatcaagatgtctctggttttcctcgaccaacagaggatggaaaaacggtggagtataatcaagatgcctctggttttcctcgaccaacagaggatgaaaacacggtggagtataatcaagatgcctctggttttcctcagccaaccgaggatgaaaacacggtggagtataatcaagatgcctctggttttcctcggccaacggaggatgaaaatgccgcgtctgctacgggagataattctggcttccaagaaaacaacacgggttctcatatggatctggatatgatgaatgactatgaagtgaaggaatgcaacgattttgggagtgcgattcatggcgttgatacagattttctgaactatggtgacgacgacaacgacgacgacttcgtcgacgccgacgagccaaatcccagtgagttccagtctctcgacaacagcggctggtcttctcgcaccaggggtgtcgcgagatatctcaagactctgttcgacgaggagtccggtctggggaggaagagcgtcgccatcgaccatctggtgcgcgggaagacgcggaaggaagcgtcgaggatgttcttcgagaccttggtgctgacgacgaaggactacatcagcgtggaccaaccgaaccccttcgactttgtgagcgtgaagccaggcccgaagctgctcatgtcagagttctagttcaacaaagtcagcgtaccctggcgcgatacattccctcttaccattgtatccatcatcacaccgaccaacaacaacaccgcagatatccccccccccctcctcttccaaaaccatttttgtgtatgttgttgcagttcccctcccctgtagcatctggtgcgctgatccgttgttgttgccagggcgtctgtccgagtaggatggtggttgtgttgtaccgtcggctatccaacagtatatagtagtagtatgattttagcgacactcggtgaagcccgccatgtaatctgctagggttcatgctcccctaagttactgtcgctttagactggctaaagcccgtagaggaattgtatacgagaaggacagggacagcccgagatgatgaatgatgtattgatgtgcctgttgactatgtgaggactgacggttttaactcaataattcaagtgacctttcctgtgaaccatgaatccatgccggatatgaggtaaagatgaggaatggcctcgtacatccgtgcctttcgcgatgaaagaaagtggcttgtgatttgttttcccgttacaggccgatgggcgatggtggcccagggaagaagagacgagagcaggagaggaacgagaagagaaggcgagaaatcggtagaggacgacgagtggctggcaagaggatcatgtcgtcacggtcacggttggacggcgc

SEQ ID NO: 217330 - DNA, 7541 bp, Zea Mays
cacgtactctgtcaaacgatacgccgcgatgcttccagacaagcgccatccccttcctcgccccacacgccgtcgtgttggccgcgcctctcttcaaccttttcttgagcattggcgagagcccttcacatggtgcggcgctggcatcgttgttggcgacctctgcgcggtcggatctgcaaaggttgcagctagcgcgcctacagtacgtcaacatggtgcggcatctctttttgcagatccccaacttgctacgccgccggccgccgcatcggaactccttgcaccgcttgcctttcttctcccattcaaccggcaagcgttccctggctcaataacgcaactgggggatgtctgtcgctatctccatataggaaacgacaggtgcgacagatttagattttcaggtgatgcgtggtcgggatcgccggatcaatcaaaataagtgtgaaatttgagaggccgtggaacttccagatcgagtagtatccatccagatcgatatcccagaagaccaagcctggccatgaaacgcatgctaccccgatctcttcttcaccttttcttatccgcaggtaccaacaaaaaaagtgacccttttgacgacgtattgcgtgggcaaggcatgacagtgcgacaagagagaaactaacaaagagctctgttcgttctgctgattgcttatgattcgactcgcagtggcggtagctgggagagcttgggactggccagacacgaccaactcaccactgtaataagacgacttttatacatagctgacagtacgcaacctcagttcaggcgcaaggtaattgttttgcatgtctatgacgagcatcgtcacttttggaccacgaatcttttttgtgtactgaaaccttttcagttctttatatgtttaagctatctctggctcttgaattaccctagaatctggttaaccttgtctttgctcttatatacttatttactctctaatatacatataatcatcatacatttacattatactatgctgcgctaaacggattggcacgcgcgcatgggcgcgcgctatacactagtatatgtttgatagagaacacatccaagcgtgtgagagcaatttctagtgtgttgtagtgagaggttgcattgatcgacactatattatggtcgagttgcaagttagcggtatatgttatgtttgtaggctgctgcctcttaaatggttgtaacaccaaaatattatgttggaatgtatgaaaattctccaaatgttttgaattaaaactattactaccttttaagttaattttctaaaacaaatagatgataatattaaatcttggatagttcaaatttaggcttgaattttcaaactggcctacaactttagcttataagatggcttgttgttacagcatacagttcccgtgtaagtttatgataaataactttagcttataagatgggttgttattacataaattaagatattagtttaacttaatttaaatataaacaatccgagttgaaccgagctactctggaatcctggatcaaaatgaacgtgctagtaagctactagcttttagtcatgccctaattaagaagtaacagtcaaatcacttcgccctttcgcctagagacctacaccactcctcatttgacgatgcacacgtgtaggaagatctgcatcgactatactgtaccggttatatcggtttcagccggtactgatttatattagaatcgatgtcggttgataccgatcgatcgatgcttgataacatgttaaacgattcgaccagtaccaatccaaatcacttgataatgacggattttaacgacgttataatttaattggtgtacatgtacatcgtgtcagcttatatccgttttaaaccgtttgaaattcaataaatccaaaaaacatattaactaagagaatattcctaccattttctccacagccacgtgaccagtttcacagactcacagctcaaggaggtatttaatttgccaattttgcacctcacccaataactgtcgtacatataatatagtctaacatccaagtttcgaaaagaaggcactaaaattaatttaggatgttattaaccaaaaatcattcttcaacacattcttaaacgaggtatctaaatattccaacttcttaaatattcatatttagtctctagacttagggacctcttgtgcactccttatagcctatttcgtacgtcaatcataccgtaaaatcatttaccagccacgagtgatggactttgaataattgaagccgtggaaagaatgaatttaaaattctcgttggccaagtttgaagatgacttttttcaaaaaaaagagaaaaacgaccaacctgtgattcatacaaaacgaaaatattaataaagagaataacgatgattattgaactttatcgtacaaatgaaatcaaatttaaagctgcaagtacaaatgaaaattcgagcaaataattgagaactatttactaacctaataattgaggactatttatcgtacaaatgaaaattcgagctagaatactttaaatatatttactaacctaataagtgagaactatttggagaccaaggttgattttattcccaaacgaggtgtttggttcgaggaatgaactaatccattatcatttcactcttcattttttatttggtttgaagaatgaaatgagttgatctatcaccacctcattcctcatagttatttagctagtattaatatgagaaatgtggtcatcccaccaaatttgagaaattaatccatgatgcacaaccttatttttgatgcagtgattccttaaatcaagcaaccccaatatgtatctaccaatttgctgaatctaaagaggtgtttagtttctaggtactaatttgtagtcactttattttgttctattttaggttcttaaatttgtaaatttaaactctatattgatttcaatatttgacaatttaaaaattaaattaaaataaaatagagggacttaaaattaatccatagaaactaaacacccatcagtttataatctttttttttagaaactactggacgcgtgtcgcctggaaaaggattccgcacaatcacaggagtgagagcacgaaacctgtgccatattttttttgtcttcgatttgcagctccaagcagcagagctgcagagaggcgtcagcggagcacaagctggcgtccaagcaaagcccgctgaagtgtccccccctgcctttcttctctccttcactctctcgttcgtggcgacgcttgtgcgaccactcaccgtagcccgctcgacgccagttattcgccgtgcagctcgccggcgacgagcaccctccagcctaaggaggggagccggagatgttctactcgcagttcatcttggccaagaagggccccctcgggaccatatggattgccgcacacttggagcggaagctgcgcaagaaccaggtcgcggacacggacatcggcgtctcagtagattccatcatattccctgacgttccaatcgcacttcggttatcaagtcatcttatgttaggcgtggtcagaatctattctcggaaggtcaactacctattccatgactgcagcgaagctttgctgaagataaaacaagctttcaggtccactgctgttgatctacctcctgaggagtcaactgctccatatcactctataactctgcctgagacattcgatcttgatgattttgaactgccagaagctgtgtttcaaggcgatactgatcatcatgtgagcacaaaagagcagatcactttgcaagacaacccagagaaaacaggatattcaacatcccagtttggcctagatgaaagatttggtgatggcagttcatcacatattggcttggacttggaggaggaattaattctgaacaaggaccactcaattcatctcgagtctgatgatggtattattattcaaggtcggtcatcggtcccttctactgatatggagattgatgataacaaaagtacaaacataacagctgaaggatacagcaacatggacggtgggccttctagtcatgtaaagttaggtccactgaatgcagatgacctaggaggaaacagtatccgtaactggactggttacaatgtacagactcctgatttgaatgatatattattgcataataatgaggatattgcaggcccatcaacttcgtactatcaacctagcccatttacttgtgatgaacctgcatcaccagagttcattagcgctcaggccccagctacacctggtttaatggaagagacagttccttccagagtccatgaaagtcctgttctgagtccacagagaaaggcatcaccatcaactaatgatgaaactgcaaaggctgacactcctgctgcaccagcctcagattttctccattcagctacaggaaatgccagtgatgtggtgggtgctgagatgacagaacttggattggcgaaaccggtgcaagttgagtcttctgttgtgcaggactctgatgcatcggtgcaacagcacacaagtgagggtttaccatcccagggtcaagcttcacacttggaagctgctgctgataagttggtcggctctgatggtatagctgcatcggttgatgaaacggtaactgtcaatgcaaccattgaagatgtacctttggctgtaaatgattcagagccatgtgttgatggttctgctggaccatctgtggtgaacctggtacagatggatggtccattatttgatgcacaaggtacagtactaagtgcagattttcaacatgaagtccaagcaatgcaacaagtagtggcatctaacgatagactgaatgaactatcaacttcagaatttgccgagcctgagaaaatgctgacagctccgaatgctgaattcaatcatgcgattgacttggggcagataactgcggaaaaaggaacaattgaatctgatggaagtaacataataggcagcctaacaagcagaaaaagacacctggaatatagcttaccagctttagagagtgagaccactaaaaagttgcctagccgaccacatgttaaaagaaccaatgattttgttcctcatgatgatgatatactggcatctattttagtcggtaggacccctgggttcacacttgattcaacaccactaccaccaagggaatcatctctgaaacgcccaaggttggggtcgaagatgggtacactcaagagaaaagtgcagatagatgatgccatggtcctgcatgctgatactatacggcaacagttgatcaatactgaggatatacggcgcattcgtaaaaaggctccatgcactcgttccgaaatatggatgattgagaaaggttcactggaagatgatttattccacgagcccatcttttcctgcctatctgaggagctaaacaatttacacaatcggacatatgagactattgtacaccctgctgttcagagaatggaactacatggtcaattagacatgcctgaaacaataccagaatatagaaatattgctgggtttggttctgctactattgatggcccacttcacataccagatgggattcaatcagatgccatgttgtcaggcgcaaatgttgcatatggcgctacagctgcttttggtttgcaaattcctcctgactaccaggttaaccgtgcatctaatgattttgttgtcggcactcagcttcaagaggtggctaaaccttttattggtaatgagcacgaagtggcacctcctgacagagagcatgctcaagtagatacattgtatagtgaccgttttcaaggtgttccatctgatttgcagaggagtaatgatgcaaatgtttctagtcaagatgtggttctagataactctggccaagcttgtgctcatgcagtggacggcatgacaagggagtttaatcattttgttcatagagacgctaatctttttgggagtactgaggtccctgcttctgagattactggggtggaatataatcaagatgcctctggttttcctcgacaaacagaggatgacaacacggtggagtataatcaagatgcctctggttttcctcgaccaacggagggtgggaatgcggtggagtataatcaagatgtctctggttttcctcgaccaacagaggatggaaaaacggtggagtataatcaagatgcctctggttttcctcgaccaacagaggatgaaaacacggtggagtataatcaagatgcctctggttttcctcagccaaccgaggatgaaaacacggtggagtataatcaagatgcctctggttttcctcggccaacggaggatgaaaatgccgcgtctgctacgggagataattctggcttccaagaaaacaacacgggttctcatatggatctggatatgatgaatgactatgaagtgaaggaatgcaacgattttgggagtgcgattcatggcgttgatacagattttctgaactatggtgacgacgacaacgacgacgacttcgtcgacgccgacgagccaaatcccagtgagttccagtctctcgacaacagcggctggtcttctcgcaccaggggtgtcgcgagatatctcaagactctgttcgacgaggagtccggtctggggaggaagagcgtcgccatcgaccatctggtgcgcgggaagacgcggaaggaagcgtcgaggatgttcttcgagaccttggtgctgacgacgaaggactacatcagcgtggaccaaccgaaccccttcgactttgtgagcgtgaagccaggcccgaagctgctcatgtcagagttctagttcaacaaagtcagcgtaccctggcgcgatacattccctcttaccattgtatccatcatcacaccgaccaacaacaacaccgcagatatccccccccccctcctcttccaaaaccatttttgtgtatgttgttgcagttcccctcccctgtagcatctggtgcgctgatccgttgttgttgccagggcgtctgtccgagtaggatggtggttgtgttgtaccgtcggctatccaacagtatatagtagtagtatgattttagcgacactcggtgaagcccgccatgtaatctgctagggttcatgctcccctaagttactgtcgctttagactggctaaagcccgtagaggaattgtatacgagaaggacagggacagcccgagatgatgaatgatgtattgatgtgcctgttgactatgtgaggactgacggttttaactcaataattcaagtgacctttcctgtgaaccatgaatccatgccggatatgaggtaaagatgaggaatggcctcgtacatccgtgcctttcgcgatgaaagaaagtggcttgtgatttgttttcccgttacaggccgatgggcgatggtggcccagggaagaagagacgagagcaggagaggaacgagaagagaaggcgagaaatcggtagaggacgacgagtggctggcaagaggatcatgtcgtcacggtcacggttggacggcgc

SEQ ID NO: 217331 - DNA, 6254 bp, Zea Mays
cacgtactctgtcaaacgatacgccgcgatgcttccagacaagcgccatccccttcctcgccccacacgccgtcgtgttggccgcgcctctcttcaaccttttcttgagcattggcgagagcccttcacatgatccccaacttgctacgccgccggccgccgcatcggaactccttgcaccgcttgcctttcttctcccattcaaccggcaagcgttccctggctcaataacgcaactgggggatgtctgtcgctatctccatataggaaacgacaggtgcgacagatttagattttcaggtgatgcgtggtcgggatcgccggatcaatcaaaataagtgtgaaatttgagaggccgtggaacttccagatcgagtagtatccatccagatcgatatcccagaagaccaagcctggccatgaaacgcatgctaccccgatctcttcttcaccttttcttatccgcaggtaccaacaaaaaaagtgacccttttgacgacgtattgcgtgggcaaggcatgacagtgcgacaagagagaaactaacaaagagctctgttcgttctgctgattgcttatgattcggtaattacctctacaccatgtccttttcgatcgataatgaacaaagtatatataggtgcacgaacgtgctagatcctagattacttttagctaggtcccaagcagccgaaaatgtgtgcatgctttcagataagcaatgtctctgtctattgcacgattttttcgggcttgttgaatcgcccccgcccctaaaaataattataaggaaatgaagcctgacattcttgctcagactcgcagtggcggtagctgggagagcttgggactggccagacacgaccaactcaccactgtaataagacgacttttatacatagctgacagtacgcaacctcagttcaggcgcaaggttagtctgatgatctgccttcattttgaatctcgattttgctgcttcatgcatgtatcatttgcgtcatcgatcatgtgctttttttctaagatctgtcattcgttttgcacgcacatcattttcctttgagttacctttacaaagatgacggacttcagcaagcgtctgcatatgcaattccttttcttgcctatccatcgatttactcatagattttattttcttcttagctcgatcaaatacttacatgttcgttttttgtttctagccattgggttggaattagatgatggatcgcacataacatacatagcactcttttttagcataccacctcatgcttaacgcatttcttatatatatacacaggttaactttccaggtaactcaaaccgacacagcttaagataaagttggcctccatattaattgctacttacatattatcatcatctttttccccaaaaaatcttactagaatactaagaccatttttacacagcaaccacataaagttggacccaacatcaacaatgattttacaaactctcttgaatcacctccaaaaggttcttattatacatctccaatagaattatctaaaattaaaattatgttcgtttcttacaggttgaaacaacaacttttgaagactggccatgaatatctagatagtactacaccatctacatagtttgtaatcaatataatttgcatattattcttcgcacacctttataaccatagcacaacaggacaatagctcatcgactctttaacaacaactgatgttcacctttttctgcacaggtaattgttttgcatgtctatgacgagcatcgtcacttttggaccacgaatcttttttgttgattccttaaatcaagcaaccccaatatgtatctaccaatttgctgaatctaaagaggtgtttagtttctagctccaagcagcagagctgcagagaggcgtcagcggagcacaagctggcgtccaagcaaagcccgctgaagtgtccccccctgcctttcttctctccttcactctctcgttcgtggcgacgcttgtgcgaccactcaccgtagcccgctcgacgccagttattcgccgtgcagctcgccggcgacgagcaccctccagcctaaggaggggagccggagatgttctactcgcagttcatcttggccaagaagggccccctcgggaccatatggattgccgcacacttggagcggaagctgcgcaagaaccaggtcgcggacacggacatcggcgtctcagtagattccatcatattccctgacgttccaatcgcacttcggttatcaagtcatcttatgttaggcgtggtcagaatctattctcggaaggtcaactacctattccatgactgcagcgaagctttgctgaagataaaacaagctttcaggtccactgctgttgatctacctcctgaggagtcaactgctccatatcactctataactctgcctgagacattcgatcttgatgattttgaactgccagaagctgtgtttcaaggcgatactgatcatcatgtgagcacaaaagagcagatcactttgcaagacaacccagagaaaacaggatattcaacatcccagtttggcctagatgaaagatttggtgatggcagttcatcacatattggcttggacttggaggaggaattaattctgaacaaggaccactcaattcatctcgagtctgatgatggtattattattcaaggtcggtcatcggtcccttctactgatatggagattgatgataacaaaagtacaaacataacagctgaaggatacagcaacatggacggtgggccttctagtcatgtaaagttaggtccactgaatgcagatgacctaggaggaaacagtatccgtaactggactggttacaatgtacagactcctgatttgaatgatatattattgcataataatgaggatattgcaggcccatcaacttcgtactatcaacctagcccatttacttgtgatgaacctgcatcaccagagttcattagcgctcaggccccagctacacctggtttaatggaagagacagttccttccagagtccatgaaagtcctgttctgagtccacagagaaaggcatcaccatcaactaatgatgaaactgcaaaggctgacactcctgctgcaccagcctcagattttctccattcagctacaggaaatgccagtgatgtggtgggtgctgagatgacagaacttggattggcgaaaccggtgcaagttgagtcttctgttgtgcaggactctgatgcatcggtgcaacagcacacaagtgagggtttaccatcccagggtcaagcttcacacttggaagctgctgctgataagttggtcggctctgatggtatagctgcatcggttgatgaaacggtaactgtcaatgcaaccattgaagatgtacctttggctgtaaatgattcagagccatgtgttgatggttctgctggaccatctgtggtgaacctggtacagatggatggtccattatttgatgcacaaggtacagtactaagtgcagattttcaacatgaagtccaagcaatgcaacaagtagtggcatctaacgatagactgaatgaactatcaacttcagaatttgccgagcctgagaaaatgctgacagctccgaatgctgaattcaatcatgcgattgacttggggcagataactgcggaaaaaggaacaattgaatctgatggaagtaacataataggcagcctaacaagcagaaaaagacacctggaatatagcttaccagctttagagagtgagaccactaaaaagttgcctagccgaccacatgttaaaagaaccaatgattttgttcctcatgatgatgatatactggcatctattttagtcggtaggacccctgggttcacacttgattcaacaccactaccaccaagggaatcatctctgaaacgcccaaggttggggtcgaagatgggtacactcaagagaaaagtgcagatagatgatgccatggtcctgcatgctgatactatacggcaacagttgatcaatactgaggatatacggcgcattcgtaaaaaggctccatgcactcgttccgaaatatggatgattgagaaaggttcactggaagatgatttattccacgagcccatcttttcctgcctatctgaggagctaaacaatttacacaatcggacatatgagactattgtacaccctgctgttcagagaatggaactacatggtcaattagacatgcctgaaacaataccagaatatagaaatattgctgggtttggttctgctactattgatggcccacttcacataccagatgggattcaatcagatgccatgttgtcaggcgcaaatgttgcatatggcgctacagctgcttttggtttgcaaattcctcctgactaccaggttaaccgtgcatctaatgattttgttgtcggcactcagcttcaagaggtggctaaaccttttattggtaatgagcacgaagtggcacctcctgacagagagcatgctcaagtagatacattgtatagtgaccgttttcaaggtgttccatctgatttgcagaggagtaatgatgcaaatgtttctagtcaagatgtggttctagataactctggccaagcttgtgctcatgcagtggacggcatgacaagggagtttaatcattttgttcatagagacgctaatctttttgggagtactgaggtccctgcttctgagattactggggtggaatataatcaagatgcctctggttttcctcgacaaacagaggatgacaacacggtggagtataatcaagatgcctctggttttcctcgaccaacggagggtgggaatgcggtggagtataatcaagatgtctctggttttcctcgaccaacagaggatggaaaaacggtggagtataatcaagatgcctctggttttcctcgaccaacagaggatgaaaacacggtggagtataatcaagatgcctctggttttcctcagccaaccgaggatgaaaacacggtggagtataatcaagatgcctctggttttcctcggccaacggaggatgaaaatgccgcgtctgctacgggagataattctggcttccaagaaaacaacacgggttctcatatggatctggatatgatgaatgactatgaagtgaaggaatgcaacgattttgggagtgcgattcatggcgttgatacagattttctgaactatggtgacgacgacaacgacgacgacttcgtcgacgccgacgagccaaatcccagtgagttccagtctctcgacaacagcggctggtcttctcgcaccaggggtgtcgcgagatatctcaagactctgttcgacgaggagtccggtctggggaggaagagcgtcgccatcgaccatctggtgcgcgggaagacgcggaaggaagcgtcgaggatgttcttcgagaccttggtgctgacgacgaaggactacatcagcgtggaccaaccgaaccccttcgactttgtgagcgtgaagccaggcccgaagctgctcatgtcagagttctagttcaacaaagtcagcgtaccctggcgcgatacattccctcttaccattgtatccatcatcacaccgaccaacaacaacaccgcagatatccccccccccctcctcttccaaaaccatttttgtgtatgttgttgcagttcccctcccctgtagcatctggtgcgctgatccgttgttgttgccagggcgtctgtccgagtaggatggtggttgtgttgtaccgtcggctatccaacagtatatagtagtagtatgattttagcgacactcggtgaagcccgccatgtaatctgctagggttcatgctcccctaagttactgtcgctttagactggctaaagcccgtagaggaattgtatacgagaaggacagggacagcccgagatgatgaatgatgtattgatgtgcctgttgactatgtgaggactgacggttttaactcaataattcaagtgacctttcctgtgaaccatgaatccatgccggatatgaggtaaagatgaggaatggcctcgtacatccgtgcctttcgcgatgaaagaaagtggcttgtgatttgttttcccgttacaggccgatgggcgatggtggcccagggaagaagagacgagagcaggagaggaacgagaagagaaggcgagaaatcggtagaggacgacgagtggctggcaagaggatcatgtcgtcacggtcacggttggacggcgc

SEQ ID NO: 217332 - DNA, 8170 bp, Zea Mays
cacgtactctgtcaaacgatacgccgcgatgcttccagacaagcgccatccccttcctcgccccacacgccgtcgtgttggccgcgcctctcttcaaccttttcttgagcattggcgagagcccttcacatggtgcggcgctggcatcgttgttggcgacctctgcgcggtcggatctgcaaaggttgcagctagcgcgcctacagtacgtcaacatggtgcggcatctctttttgcagatccccaacttgctacgccgccggccgccgcatcggaactccttgcaccgcttgcctttcttctcccattcaaccggcaagcgttccctggctcaataacgcaactgggggatgtctgtcgctatctccatataggaaacgacaggtgcgacagatttagattttcaggtgatgcgtggtcgggatcgccggatcaatcaaaataagtgtgaaatttgagaggccgtggaacttccagatcgagtagtatccatccagatcgatatcccagaagaccaagcctggccatgaaacgcatgctaccccgatctcttcttcaccttttcttatccgcaggtaccaacaaaaaaagtgacccttttgacgacgtattgcgtgggcaaggcatgacagtgcgacaagagagaaactaacaaagagctctgttcgttctgctgattgcttatgattcgtggcggtagctgggagagcttgggactggccagacacgaccaactcaccactgtaataagacgacttttatacatagctgacagtacgcaacctcagttcaggcgcaaggttagtctgatgatctgccttcattttgaatctcgattttgctgcttcatgcatgtatcatttgcgtcatcgatcatgtgctttttttctaagatctgtcattcgttttgcacgcacatcattttcctttgagttacctttacaaagatgacggacttcagcaagcgtctgcatatgcaattccttttcttgcctatccatcgatttactcatagattttattttcttcttagctcgatcaaatacttacatgttcgttttttgtttctagccattgggttggaattagatgatggatcgcacataacatacatagcactcttttttagcataccacctcatgcttaacgcatttcttatatatatacacaggttaactttccaggtaactcaaaccgacacagcttaagataaagttggcctccatattaattgctacttacatattatcatcatctttttccccaaaaaatcttactagaatactaagaccatttttacacagcaaccacataaagttggacccaacatcaacaatgattttacaaactctcttgaatcacctccaaaaggttcttattatacatctccaatagaattatctaaaattaaaattatgttcgtttcttacaggttgaaacaacaacttttgaagactggccatgaatatctagatagtactacaccatctacatagtttgtaatcaatataatttgcatattattcttcgcacacctttataaccatagcacaacaggacaatagctcatcgactctttaacaacaactgatgttcacctttttctgcacaggtaattgttttgcatgtctatgacgagcatcgtcacttttggaccacgaatcttttttgtgtactgaaaccttttcagttctttatatgtttaagctatctctggctcttgaattaccctagaatctggttaaccttgtctttgctcttatatacttatttactctctaatatacatataatcatcatacatttacattatactatgctgcgctaaacggattggcacgcgcgcatgggcgcgcgctatacactagtatatgtttgatagagaacacatccaagcgtgtgagagcaatttctagtgtgttgtagtgagaggttgcattgatcgacactatattatggtcgagttgcaagttagcggtatatgttatgtttgtaggctgctgcctcttaaatggttgtaacaccaaaatattatgttggaatgtatgaaaattctccaaatgttttgaattaaaactattactaccttttaagttaattttctaaaacaaatagatgataatattaaatcttggatagttcaaatttaggcttgaattttcaaactggcctacaactttagcttataagatggcttgttgttacagcatacagttcccgtgtaagtttatgataaataactttagcttataagatgggttgttattacataaattaagatattagtttaacttaatttaaatataaacaatccgagttgaaccgagctactctggaatcctggatcaaaatgaacgtgctagtaagctactagcttttagtcatgccctaattaagaagtaacagtcaaatcacttcgccctttcgcctagagacctacaccactcctcatttgacgatgcacacgtgtaggaagatctgcatcgactatactgtaccggttatatcggtttcagccggtactgatttatattagaatcgatgtcggttgataccgatcgatcgatgcttgataacatgttaaacgattcgaccagtaccaatccaaatcacttgataatgacggattttaacgacgttataatttaattggtgtacatgtacatcgtgtcagcttatatccgttttaaaccgtttgaaattcaataaatccaaaaaacatattaactaagagaatattcctaccattttctccacagccacgtgaccagtttcacagactcacagctcaaggaggtatttaatttgccaattttgcacctcacccaataactgtcgtacatataatatagtctaacatccaagtttcgaaaagaaggcactaaaattaatttaggatgttattaaccaaaaatcattcttcaacacattcttaaacgaggtatctaaatattccaacttcttaaatattcatatttagtctctagacttagggacctcttgtgcactccttatagcctatttcgtacgtcaatcataccgtaaaatcatttaccagccacgagtgatggactttgaataattgaagccgtggaaagaatgaatttaaaattctcgttggccaagtttgaagatgacttttttcaaaaaaaagagaaaaacgaccaacctgtgattcatacaaaacgaaaatattaataaagagaataacgatgattattgaactttatcgtacaaatgaaatcaaatttaaagctgcaagtacaaatgaaaattcgagcaaataattgagaactatttactaacctaataattgaggactatttatcgtacaaatgaaaattcgagctagaatactttaaatatatttactaacctaataagtgagaactatttggagaccaaggttgattttattcccaaacgaggtgtttggttcgaggaatgaactaatccattatcatttcactcttcattttttatttggtttgaagaatgaaatgagttgatctatcaccacctcattcctcatagttatttagctagtattaatatgagaaatgtggtcatcccaccaaatttgagaaattaatccatgatgcacaaccttatttttgatgcagtgattccttaaatcaagcaaccccaatatgtatctaccaatttgctgaatctaaagaggtgtttagtttctagaaactactggacgcgtgtcgcctggaaaaggattccgcacaatcacaggagtgagagcacgaaacctgtgccatattttttttgtcttcgatttgcagctccaagcagcagagctgcagagaggcgtcagcggagcacaagctggcgtccaagcaaagcccgctgaagtgtccccccctgcctttcttctctccttcactctctcgttcgtggcgacgcttgtgcgaccactcaccgtagcccgctcgacgccagttattcgccgtgcagctcgccggcgacgagcaccctccagcctaaggaggggagccggagatgttctactcgcagttcatcttggccaagaagggccccctcgggaccatatggattgccgcacacttggagcggaagctgcgcaagaaccaggtcgcggacacggacatcggcgtctcagtagattccatcatattccctgacgttccaatcgcacttcggttatcaagtcatcttatgttaggcgtggtcagaatctattctcggaaggtcaactacctattccatgactgcagcgaagctttgctgaagataaaacaagctttcaggtccactgctgttgatctacctcctgaggagtcaactgctccatatcactctataactctgcctgagacattcgatcttgatgattttgaactgccagaagctgtgtttcaaggcgatactgatcatcatgtgagcacaaaagagcagatcactttgcaagacaacccagagaaaacaggatattcaacatcccagtttggcctagatgaaagatttggtgatggcagttcatcacatattggcttggacttggaggaggaattaattctgaacaaggaccactcaattcatctcgagtctgatgatggtattattattcaaggtcggtcatcggtcccttctactgatatggagattgatgataacaaaagtacaaacataacagctgaaggatacagcaacatggacggtgggccttctagtcatgtaaagttaggtccactgaatgcagatgacctaggaggaaacagtatccgtaactggactggttacaatgtacagactcctgatttgaatgatatattattgcataataatgaggatattgcaggcccatcaacttcgtactatcaacctagcccatttacttgtgatgaacctgcatcaccagagttcattagcgctcaggccccagctacacctggtttaatggaagagacagttccttccagagtccatgaaagtcctgttctgagtccacagagaaaggcatcaccatcaactaatgatgaaactgcaaaggctgacactcctgctgcaccagcctcagattttctccattcagctacaggaaatgccagtgatgtggtgggtgctgagatgacagaacttggattggcgaaaccggtgcaagttgagtcttctgttgtgcaggactctgatgcatcggtgcaacagcacacaagtgagggtttaccatcccagggtcaagcttcacacttggaagctgctgctgataagttggtcggctctgatggtatagctgcatcggttgatgaaacggtaactgtcaatgcaaccattgaagatgtacctttggctgtaaatgattcagagccatgtgttgatggttctgctggaccatctgtggtgaacctggtacagatggatggtccattatttgatgcacaaggtacagtactaagtgcagattttcaacatgaagtccaagcaatgcaacaagtagtggcatctaacgatagactgaatgaactatcaacttcagaatttgccgagcctgagaaaatgctgacagctccgaatgctgaattcaatcatgcgattgacttggggcagataactgcggaaaaaggaacaattgaatctgatggaagtaacataataggcagcctaacaagcagaaaaagacacctggaatatagcttaccagctttagagagtgagaccactaaaaagttgcctagccgaccacatgttaaaagaaccaatgattttgttcctcatgatgatgatatactggcatctattttagtcggtaggacccctgggttcacacttgattcaacaccactaccaccaagggaatcatctctgaaacgcccaaggttggggtcgaagatgggtacactcaagagaaaagtgcagatagatgatgccatggtcctgcatgctgatactatacggcaacagttgatcaatactgaggatatacggcgcattcgtaaaaaggctccatgcactcgttccgaaatatggatgattgagaaaggttcactggaagatgatttattccacgagcccatcttttcctgcctatctgaggagctaaacaatttacacaatcggacatatgagactattgtacaccctgctgttcagagaatggaactacatggtcaattagacatgcctgaaacaataccagaatatagaaatattgctgggtttggttctgctactattgatggcccacttcacataccagatgggattcaatcagatgccatgttgtcaggcgcaaatgttgcatatggcgctacagctgcttttggtttgcaaattcctcctgactaccaggttaaccgtgcatctaatgattttgttgtcggcactcagcttcaagaggtggctaaaccttttattggtaatgagcacgaagtggcacctcctgacagagagcatgctcaagtagatacattgtatagtgaccgttttcaaggtgttccatctgatttgcagaggagtaatgatgcaaatgtttctagtcaagatgtggttctagataactctggccaagcttgtgctcatgcagtggacggcatgacaagggagtttaatcattttgttcatagagacgctaatctttttgggagtactgaggtccctgcttctgagattactggggtggaatataatcaagatgcctctggttttcctcgacaaacagaggatgacaacacggtggagtataatcaagatgcctctggttttcctcgaccaacggagggtgggaatgcggtggagtataatcaagatgtctctggttttcctcgaccaacagaggatggaaaaacggtggagtataatcaagatgcctctggttttcctcgaccaacagaggatgaaaacacggtggagtataatcaagatgcctctggttttcctcagccaaccgaggatgaaaacacggtggagtataatcaagatgcctctggttttcctcggccaacggaggatgaaaatgccgcgtctgctacgggagataattctggcttccaagaaaacaacacgggttctcatatggatctggatatgatgaatgactatgaagtgaaggaatgcaacgattttgggagtgcgattcatggcgttgatacagattttctgaactatggtgacgacgacaacgacgacgacttcgtcgacgccgacgagccaaatcccagtgagttccagtctctcgacaacagcggctggtcttctcgcaccaggggtgtcgcgagatatctcaagactctgttcgacgaggagtccggtctggggaggaagagcgtcgccatcgaccatctggtgcgcgggaagacgcggaaggaagcgtcgaggatgttcttcgagaccttggtgctgacgacgaaggactacatcagcgtggaccaaccgaaccccttcgactttgtgagcgtgaagccaggcccgaagctgctcatgtcagagttctagttcaacaaagtcagcgtaccctggcgcgatacattccctcttaccattgtatccatcatcacaccgaccaacaacaacaccgcagatatccccccccccctcctcttccaaaaccatttttgtgtatgttgttgcagttcccctcccctgtagcatctggtgcgctgatccgttgttgttgccagggcgtctgtccgagtaggatggtggttgtgttgtaccgtcggctatccaacagtatatagtagtagtatgattttagcgacactcggtgaagcccgccatgtaatctgctagggttcatgctcccctaagttactgtcgctttagactggctaaagcccgtagaggaattgtatacgagaaggacagggacagcccgagatgatgaatgatgtattgatgtgcctgttgactatgtgaggactgacggttttaactcaataattcaagtgacctttcctgtgaaccatgaatccatgccggatatgaggtaaagatgaggaatggcctcgtacatccgtgcctttcgcgatgaaagaaagtggcttgtgatttgttttcccgttacaggccgatgggcgatggtggcccagggaagaagagacgagagcaggagaggaacgagaagagaaggcgagaaatcggtagaggacgacgagtggctggcaagaggatcatgtcgtcacggtcacggttggacggcgc

SEQ ID NO: 217333 - DNA, 1980 bp, Zea Mays
gaaggggaggaatcccttcctccgcgagtcgcgagccgtggagatccgtcccactccacccctccgctccgccccagacctcgctacaaacctgccgcgaaaatagcagccgcccgtttgctctctcccgtctccgcactcctcccgcgatgagcgacccgcggggccgcgccgccggtcccgaccgctacggggacgaaccgcacgacctcccgctcgccgaggacgcaaacggcgaggaagcgtggcagacgcccgagaaagaggcggttgccgtgtcggaaggggccgctgcgcggagtggggatacgaccccggacgctgaacaggagagcgatgacggagaggaaggagtgggctccccggatcaggcggaacccaatgcgagcggggagggcgtaccgcccgtggccgcgactgtggagccggatgggattgttagcggcgcaaaggtggagacgaacagcgaggacgccatcagccatgacgccgacgaggaggagaaggacgacgacgatgactccacccaggatgcgtctccgatagccgaggtgaatgtggagggcgagagtggcgccgttcaccgcttggaggtggaaccggacccctttctcgatggagatgcctctgggacggaggaggagcaagccgcgttcatggtggagctggagcgcttccataaggagcacagtctcgagttcaagccgcccaagttctatggcaagggcctcaactgcctcaagttatggaggcaggtcgcccacctgggaggccacgagcaggtaacggtttgtaaactatggcgtcaagttggagagactttcaggccgccaaagacctgcacgactgtttcttggtcatttcgaattttctatgagaaggcacttcttgaatacgaaaaacacaaagtccggactggtcagcttcagataccaccgcctggtttaccacagcctagtggtgctgaccgtgaggtagttgtaaatcaatcatcttctgccagagttagaagggatgttgcagcacgtgctatgcagggttggcatgctcaccgcctccttgccaatggcacttatggggataacattttgaaggacaaagattcaatgccatcttcaagtcgtgataacctaaaaagctttggggtgctcaagagaaagaaagcatctagtccagagtatgctctcaagtcgtcctgctcaaaaataaataagtctgaggaagattctatggtcattgacgttggagaaccagccgactgggtgaagatcaatgtgcggcagactaaagattgctttgaagtctatgcactagttcctggacttctacgtgaggaggtgcatgttcaatcagatcctgctggacgtctggttatcacaggggatccagagcagcctgataatccttgggagatcactccgttcaagaaggtggtcaacttgccatcaagaatcaatcctcaccaaacatccgctgttgtcacgcttcatggtcagctgtttgtgcgtgcaccatttgggtcatcctgatatgtagatatgaaatcatttttagttcagttttgttgactgtggcgcctcttcaccggtgatattccttgatatcactagggtttatgtcagttctgttgaggaaataggatttcatttgagcagatacatgatgtcaagctgacttagcagaactcttctgtagttggatgctggttgctggtgttgcgatctgttgccaccttgtttattgttacagtagtagccataaaattagttggttcatgtgtgtattccagtttcatagagaaaggacatgttggtcgtagtagggctaatttgacattatggttactaattattctttaaatacctctctggatcactccagggcgccctaaagctgcattttttatttatttatgaagctaactgatgtctctttgtggcagaaatcaactgtgtttcagtgacagaaattaacgcctag

SEQ ID NO: 217334 - DNA, 1861 bp, Zea Mays
gaaggggaggaatcccttcctccgcgagtcgcgagccgtggagatccgtcccactccacccctccgctccgccccagacctcgctacaaacctgccgcgaaaatagcagccgcccgtttgctctctcccgtctccgcactcctcccgcgatgagcgacccgcggggccgcgccgccggtcccgaccgctacggggacgaaccgcacgacctcccgctcgccgaggacgcaaacggcgaggaagcgtggcagacgcccgagaaagaggcggttgccgtgtcggaaggggccgctgcgcggagtggggatacgaccccggacgctgaacaggagagcgatgacggagaggaaggagtgggctccccggatcaggcggaacccaatgcgagcggggagggcgtaccgcccgtggccgcgactgtggagccggatgggattgttagcggcgcaaaggtggagacgaacagcgaggacgccatcagccatgacgccgacgaggaggagaaggacgacgacgatgactccacccaggatgcgtctccgatagccgaggtgaatgtggagggcgagagtggcgccgttcaccgcttggaggtggaaccggacccctttctcgatggagatgcctctgggacggaggaggagcaagccgcgttcatggtggagctggagcgcttccataaggagcacagtctcgagttcaagccgcccaagttctatggcaagggcctcaactgcctcaagttatggaggcaggtcgcccacctgggaggccacgagcaggtaacggtttgtaaactatggcgtcaagttggagagactttcaggccgccaaagacctgcacgactgtttcttggtcatttcgaattttctatgagaaggcacttcttgaatacgaaaaacacaaagtccggactggtcagcttcagataccaccgcctggtttaccacagcctagtggtgctgaccgtgaggtagttgtaaatcaatcatcttctgccagagttagaagggatgttgcagcacgtgctatgcagggttggcatgctcaccgcctccttgccaatggcacttatggggataacattttgaaggacaaagattcaatgccatcttcaagtcgtgataacctaaaaagctttggggtgctcaagagaaagaaagcatctagtccagagtatgctctcaagtcgtcctgctcaaaaataaataagtctgaggaagattctatggtcattgacgttggagaaccagccgactgggtgaagatcaatgtgcggcagactaaagattgctttgaagtctatgcactagttcctggacttctacgtgaggaggtgcatgttcaatcagatcctgctggacgtctggttatcacaggggatccagagcagcctgataatccttgggagatcactccgttcaagaaggtggtcaacttgccatcaagaatcaatcctcaccaaacatccgctgttgtcacgcttcatgggtttatgtcagttctgttgaggaaataggatttcatttgagcagatacatgatgtcaagctgacttagcagaactcttctgtagttggatgctggttgctggtgttgcgatctgttgccaccttgtttattgttacagtagtagccataaaattagttggttcatgtgtgtattccagtttcatagagaaaggacatgttggtcgtagtagggctaatttgacattatggttactaattattctttaaatacctctctggatcactccagggcgccctaaagctgcattttttatttatttatgaagctaactgatgtctctttgtggcagaaatcaactgtgtttcagtgacagaaattaacgcctag

SEQ ID NO: 217335 - DNA, 5117 bp, Zea Mays
ccgcgctgtgtcaaggaaaaagaggggagcgaggagatatttatatatatatatatataatatcgctatatacgtgtacatataaaataacaataataattttcgctttcgctacggccctgctagctagctagctctgagtgctgcgcggcgcgatatatactttgggacaacgacgacgacgacgccgccgagaaaattcttggatttccagaaggccccgatcgatcgaccgaggcggcgaatcatccgtccactcgctggcctcaccacctccccgtgcgcagccgtcgtcgtcctctcctcccttatcgatcgggttccggttccggccgctcaactcttctagtcttcttccttcctttccttcctttctcccccgtcccgctctggcctcctgcgtcctgctgccctgtgattgaagcaggcaacggccggctgttgggacggtagataaatagtaaatcggttgatactactgctgctgctgctattaaccgctcgggctggccggggcccccctcctcctcctgttgcttcgattccatcacacatcagcttggtgcattcgtcttcctgcttcctccttgcttcgtctctcttcagttcagtctccccttggagcgaggatgccttgtgcagcctggtctgcagggcggggctgagtcgtcgtcgtcggtgcaaagacgactgagggaaatatatatatatgtcagctgctgctgtagctctggaggaacctgctgtacaaatggtgatggtgagcgtggcgagcccgaggagcccggcggtgcggtcggaggaggacctgggcccggcgtggctgcggccgctgctgggcacgagcttcttcgtgccgtgccggctgcacccggagctgagcaagaacgagtgcaacctcttctgcctcggctgctgcacgggcgacgccctctgcgcctactgcctgccggcgcaccgagaccaccacgtcgtccagatacgtcggtcgtcgtaccacaacgtgatccgggtgtcggaggtggggaagctgatcgacatctcccacgtgcagacgtacgtgatcaacagcgccaagatcgtgttcctcaacggccgcccgcaggccaggcccggcaagggcgtcaccaacacctgccagatctgctgccggagcctcccggactcctttccgcttctgctccctcggatgcaaggttcctcttctgtttactcatctatttcttcttcttcttcttcttgtttttttgttcccctctccctctctctctttctctctctacgagagctatagtggccgcattttttgtctgaggctgggtacgggccagcgccaccactagccaccaccaagcaacaaggggggcggatcggaaagcagacgaatcctaccgcggaagcggagaagggaattgtggaggcaactagagagcggattgcctgcctgccaagctctagctagcctaatcaagcacacgcatcgggtcctaattaattaagggaaaaaaacattctacggcatgccactccttctcatatatagcacaaaggctattttgatactacattaataagtgctgctgctggcaagatgtctttctcatagcacaaaagccatatatattagctacgaactaattaactaatcaagacacactcgatcgatcgatcgatcgagcaaaaaggggcgcgcggcagtttgacgcgatcacatttttggccccggttgccaactctttctctctcgacaagaattgagctggtttattctctcgagaaatttttggatatcgcaagaaattctcgagagtgatatggtggggaaaacttgcatggtaagtctattcttcttcttgttgttgttgctgattattattttctgtggatatggcattctacggatatgtctcaaatattgcacttaaattcgcacttttaatctgggtgcgttggtacgtgtgcagccaaattgaatgggtccacagcgatacctctccccgctgtagtccatttccttgaagatatatagttgagctaggccacgggtggtgtacatttggtatctttgttgaggtgatcgattgcaacagtatttagttctaacaccatttagttctaacaccacctaaccagctaacctgtagtttttcttgctattaaggatgcagcaaaccattgcattgcactcatatcacatcgcacgtgcaacagtatttgctcgatttgtttgaaccaaaaaaaaacttaagttcaaaggaaaatgtggggaattcgacgacactacttctctcctgacagtctggcacacaaaactacaccaggtcggtctcaatcaagcatacaagtaggagccgactgtaattgtctctcgttcaattgcgtatacgtctgcctgcaggattcaattcggactcaagacttgtctgatcctaaataccaagactacggatcctatctaaaagcttctcaaaccactgcacaatcacagcaaaccaaaaaaaaacaaaaaagattaaccaacggccgggttctcacccaaattaataatgcagcaagcaataaaataatcttgccttgatatctctcttgtctaacgaactgttgcactaggcaataatatgtataaagtttttcgctctacggagttgaattgaagctctctatctctcccccccccccccctgttgctctagtttaggataaagctgctttcggggcccgggggggaggagtagtaggtagactcgatacatcaggatgcttacgatcttctgtcgcgaatgcacttccttttcgttttcttttgcagcggagaccgcgaattcttatccagttaacccttctaccccacttggaaaggaatagaaaaagagtgtgcgttatctatccggccggatgaagttggctgtgctagctgcttctctctggcagtgatagatcgatgctctactcaatcaccttgtttaatttgctgcttgcgtggtttgggtatgtatatatagagctatcaacaagcttgttttttgttgatccttgcaaatttttaatgggatcagacaatgagaaaaatgacgatcatttagtttcggatcagataataggggggttctcacttatgcgcgctatgcctagaaaatgtggttaattttggctggtggtcagggttaattaggtcatagaattaatacctgaactatttcctagctaaaaacatcagctgttcagcagatgtttttttttggcagctgctccgtctctcatagaatcactatacggacagccatatatcatcagctgcattttctacaagcaatcgtctaaactgaccctaattaattactccttccgtttctctttatttgtcatccaatagttcaaatttgtactaacggacgacatatattaaggaacggagggagtagttcagtttgctgggctatgtatgtacacaggggcgattccagggaggggcacaggggggcaacgtcccccctaatcctccccaaattccataggagctactacttttttagctaatcaccatgtaaataatataaaatacctcttaatagtcccccctcaacctgatttaccccctcaaactcaaattctggcttcgccccatgtacatacatacattcatgcgtgaatctagagactgcaggattatatattttcccttatatctacaaacccagttcagtttgcaagctttgaagaatgactatagggcggaagctaaccgacgtcagtttgacaaggacttgttgaggttttgctgtgctgcctgttcgcacttagtgcagtgacgacagatccacggataataataacgcgctccatcatggagcgaggttccctttctctctctctttttcacacgtcctctctctccctcatcgcctcacttcaccgattccttagccgacagctactcttgtggccatgaaaatttccttctgctaatcaacctgggagggatgcagtgggacccgagcctgacgttcgccatacggccgaaacgcgggcagggatccggcgacgacggcggctccggctccgacgactcgttcagccccaagaagccacggaggatggccgggttcgacctcggccgcttcgagcggccgggcggcatccggtggtccgacgacgagggcagcaggtccaacaacgggctcatcacgccggggacaccgccgatcaaccggtgccggccgtccaggaggaagggcatcccccaccgcgccccgttctacggttagctcgctcgtctaagctcctccagcggttggagtgcaacacccagtcgtcgtcgtcgtcaacctttaaaataatacagtaaaactcttcagccagcacgagatgatgctgtgtgacactcatcaggtctgagcagtgaagtgatccaaaatctgctgctggtggtaggtcaccatatatagctaggtacatatgtttagagctatagcttgttacataatagatatatagttgtatacatgcatacatacactacacaaataatgtaggcgaaagatatatgtacatgccagtatattgacaagggttgtcagtatctgtatagacataatctcaaaaaaggagatagaaacgtaggtagggtttggatttcattattagcttggctagtagtagtagtggtcgagattgatatgtgaaaaggaacaagcatcatgtatttatctcagtttgtagtatttgcctgcttgcctccgccacccaatgcgtttattagcgttgtggtgcgaagctaagagtttttgttaatctcctccttaattaggagcttaatctgatgtaaacagagtgtatgtatgtatgtatatacacacacaagtatggcgtatgtatatgtttgtgtaccatcagaaattgaagaaagatatggggaagaaataccttgtgggggtgtatgtaaggctatatctagcattttagttatcatcatccccatatttaaactccactctatggacaatatagtttacagtacaaaataatgttttgagtgaccatatgagtgaactgttagaaacggtctaacttacgacctaaaaaaatgtttgtcaatttatatatgagtgataaggtgc

SEQ ID NO: 217336 - DNA, 2350 bp, Zea Mays
ctctctctccgcgctgtgtcaaggaaaaagaggggagcgaggagatatttatatatatatatatataatatcgctatatacgtgtacatataaaataacaataataattttcgctttcgctacggccctgctagctagctagctctgagtgctgcgcggcgcgatatatactttgggacaacgacgacgacgacgccgccgagaaaattcttggatttccagaaggccccgatcgatcgaccgaggcggcgaatcatccgtccactcgctggcctcaccacctccccgtgcgcagccgtcgtcgtcctctcctcccttatcgatcgggttccggttccggccgctcaactcttctagtcttcttccttcctttccttcctttctcccccgtcccgctctggcctcctgcgtcctgctgccctgtgattgaagcaggcaacggccggctgttgggacggtagataaatagtaaatcggttgatactactgctgctgctgctattaaccgctcgggctggccggggcccccctcctcctcctgttgcttcgattccatcacacatcagcttggtgcattcgtcttcctgcttcctccttgcttcgtctctcttcagttcagtctccccttggagcgaggatgccttgtgcagcctggtctgcagggcggggctgagtcgtcgtcgtcggtgcaaagacgactgagggaaatatatatatatgtcagctgctgctgtagctctggaggaacctgctgtacaaatggtgatggtgagcgtggcgagcccgaggagcccggcggtgcggtcggaggaggacctgggcccggcgtggctgcggccgctgctgggcacgagcttcttcgtgccgtgccggctgcacccggagctgagcaagaacgagtgcaacctcttctgcctcggctgctgcacgggcgacgccctctgcgcctactgcctgccggcgcaccgagaccaccacgtcgtccagatacgtcggtcgtcgtaccacaacgtgatccgggtgtcggaggtggggaagctgatcgacatctcccacgtgcagacgtacgtgatcaacagcgccaagatcgtgttcctcaacggccgcccgcaggccaggcccggcaagggcgtcaccaacacctgccagatctgctgccggagcctcccggactcctttccgcttctgctccctcggatgcaagctgggagggatgcagtgggacccgagcctgacgttcgccatacggccgaaacgcgggcagggatccggcgacgacggcggctccggctccgacgactcgttcagccccaagaagccacggaggatggccgggttcgacctcggccgcttcgagcggccgggcggcatccggtggtccgacgacgagggcagcaggtccaacaacgggctcatcacgccggggacaccgccgatcaaccggtgccggccgtccaggaggaagggcatcccccaccgcgccccgttctacggttagctcgctcgtctaagctcctccagcggttggagtgcaacacccagtcgtcgtcgtcgtcaacctttaaaataatacagtaaaactcttcagccagcacgagatgatgctgtgtgacactcatcaggtctgagcagtgaagtgatccaaaatctgctgctggtggtaggtcaccatatatagctaggtacatatgtttagagctatagcttgttacataatagatatatagttgtatacatgcatacatacactacacaaataatgtaggcgaaagatatatgtacatgccagtatattgacaagggttgtcagtatctgtatagacataatctcaaaaaaggagatagaaacgtaggtagggtttggatttcattattagcttggctagtagtagtagtggtcgagattgatatgtgaaaaggaacaagcatcatgtatttatctcagtttgtagtatttgcctgcttgcctccgccacccaatgcgtttattagcgttgtggtgcgaagctaagagtttttgttaatctcctccttaattaggagcttaatctgatgtaaacagagtgtatgtatgtatgtatatacacacacaagtatggcgtatgtatatgtttgtgtaccatcagaaattgaagaaagatatggggaagaaataccttgtgggggtgtatgtaaggctatatctagcattttagttatcatcatccccatatttaaactccactctatggacaatatagtttacagtacaaaataatgttttgagtgaccatatgagtgaactgttagaaacggtctaacttacgacctaaaaaaatgtttgtcaatttatatatgagtgataaggtgc

SEQ ID NO: 217337 - DNA, 2106 bp, Zea Mays
atgctactacgggtctacgccgagggggagggagggaaagcgcgctttgcagtctcctactgcatatcccgtttccctgagtctatttctcctccgtctgattactgatgggtctggtgcaggcgcggggcatggtcgacaggttccggatgcgcgccaagggcggcgacggcggcaatggctgcgtcagcctccggcgctctaggtccaaccgccacggcatgcctgacggtggtaatggagggaagggtggtgatgtaattcttgagtgctcacggtctatctgggatttcagtggcttgcagcatcacatgagaggaggccgaggtggcaatggagtttctaagaatcagataggaacaagaggcacagtgattcatcttgtcgaaggggagcaaccttctctcacagtaaataaaccgaccagagctctagatccctgggacatacctagtgctgaagaacactcttcagatttgtaccagattgctaatatagtgacagaaggttttgatggtggcttgccccatcagcatattgcccctaagcataacactgatggaaatgacactgtaaagggaagcaacagtaactcggataatccaaaatactttcatacatgctccaaggctcagttctcaaacacaaatcgtgatgtaagaatctattcatgtcaagagggcacagatgaaaaagatcagactgaaagtggggatgaagaattttgggaggatgaagacgagtttgacatggatgaggaggaagaagaggatgagagggaagaacaagatgtgcaatattgtattgctgagatgacaaaacctgggcagcagttaatcatagcacgaggaggcaaaggtggactggggaatgcttttatcatgaaggagatgcggccatccaaagcaaacagacaagagaagatagcccatttgagtactgggcagccaggaactcagagcttgcttatcctggaactgaagagcattgcagatgttggtctggttgggttgcccaatgctgggaagagcacattgctcagtgctctctctagggcgcacccagagatcgccgactatgagttcaccacgctgaggcccaacattggtagcctgatctacgaggactacttctcggttaaagtggctgatatacctggactgatcaaaggagcacatgagaaccgtggcctgggtcatgctttcctaaggcacatagagcgcaccaaagttatcgcctatgtgcttgaccttgcagccacacttaatggcaggaaaggtgtcccaccttgggagcagctgcacgatttggtcgcagagctggagcattaccaagaaggaatgactcggcggccatcactgattgtcgcaaacaagatagacgaagagggagctgaagagatgtgccaggagctgaagaggagagtgcagggagttccaatatttccagtttgcgccatcttgcaagagggggtgccagatctgagagtgggtctaaggaaccttatggatgactcagatccacagggcaaaaattttgagaaaaatgactgttgaatgagattctattttttttctttctcatgacactaacacatatgagtgtgcggggattagatctgcaaatattgatgactctggctattcctttcttgttgtgttgatgacaataattgaacatttgtaatcttatcattcttgtgaaagagcagaaatactatagggtttgtttcagggcagcagcagctgaaacattgggcttggtcagtaaataaacagaactgcatctgtacttggtaaaatcaacaagtcaaagaattagagcctgtttttctctattctgggagctagttctcaatgtcactgtaatctgcacgtctctgacttcctaacttctaagcatgctactactgtatccctttgtaatttaatcagctgtaccatccaatactctgtttacatttgtagtaacactttgcaaagaaactattatgttggagtttctttgcttttataaatgttatgtttttgtttaatcagctgtaccattcaatactctgtttacatcctagcttgtggaggagtcaatctccttgccgtcatattc

SEQ ID NO: 217338 - DNA, 1944 bp, Zea Mays
gaaagacacaggccggcccaggcgcccagcccgcctgccggccgatctaaacgtcctccgctttcgcctccgccaccgccgcctttctcgccttcgcgcctcctccaccgccgcctttctcgccttcgcgcctcctcgaccgcgtcgtcccgtgatatcgcctcccctggcagattcgccaatcacattcgagcttccagttggaggagatcggctacgtttcctgtaggttccaatggtgcagcttccgggctccaagaagcggcacgccgagatggccacggcggcgaccgtgaaggcggaggtggagggtttgggctgcggcgatggttctcctcacaagcatgtcaagccaatgccgcagccgccgccgcagccgccacctcccgaggacttgccctttgatgtgcttgatggacctagcccattgggtctgcgactaagaaaaagtcgatctctggtggaccttattcaatgtaagctttttcaggataaatctgcccatgaacagtttgatgggcacaacaatgtttctgatacacccatgaagaaagaggttagatctggggctccaacagctggtgaacggatgaaagcttcaaattttcctgcaaatgttttgagaattggtagttgggagtacatttctcactacgaaggtgatttggtcgcaaagtgctactttgcaaagcataagcttgtttgggaggtcctacataatggtctcaagagtaagatagaaattcagtggtcggacattattgctttgaaggcaacctgcccagagaatgaacaagaaggggtcttagatctagtgttggctcgcccgccacttttcttcaaagaaactgatcctcagccaaggaaacatacactatggcaggctgcatcagattttactgatggacaggcaagctccaaaaggagacacatcttgcggtgcccctcgagtttgttaagcaggaattttgaaaagctcattcaatgtgatcaacgtctacgtgaattgagccagcagccagctgccatattgcaaaacccaggttttgaacctaagcgatctatttttcaaaatccaaatgaatcgaaggactgccttgatattggtggcttgaagtttgaacataaagctactttgcccaagttcactgctcccctctcaacacgtgtcttttcatcactgtccaataatgttggacgaccaataaacataggatttggtgctggacattttgggggcaatgttcctgaagaatcaaagaattgcaatcaatggaatcaattgatagtgcctggattggaggcactgcaaggtgatgaaaggagtgcaggtggtcctcctttgacaactaacgatgcaatttccaaaaaagcctgggaagatcttgttcaacaccttttcagcgacacaccgagtctgccagccttagatgataataatttgacgtcaagggttgactccctttactcgttgcttgagaaagacacagctccacccgccatgcgcgaccctgaatgcagtagtgatggtggggacatcggcgcaatccaagtggattctgatggctttaaggggaggctcgacccatcgcctccaggaatttccagaaacgattctctcgatgagctgcttctgaacctccccaaaatagcttctattccacagttcttgttcaacaggacagaagattctgatgaataaagcgcgcagtcaacttgtggtcttcaaccctaggactaaagcagcaaattgtgaatatgagcaatgagtcagcgacgctaggattctattctacttcttccccgtagataattcagtagattggtgcagcaaaaacgtctgctcattatttcactagctgagaaactccacatgcaacattggaataacattttgtttacgtttggatggcattttaaatactactcttttccttgtcggat

SEQ ID NO: 217339 - DNA, 1413 bp, Zea Mays
ctcgcacggtcgcacggcacggggaggagcaagaacacccagcccactgcccacgccgtgctggaagtggtccgtgctccggcagcggcggcgggaggaagagggaagcgaggggatggcgcagccgagcaaggagccgtgcaagaaggaggcgtgcgacatccaggcctgcctctccaagaacatgttcgactccaggaagtgtgtgagagttattcagttacttcagtcatgttgtgagcagtgtgagtacaaatcaacacactgtggttccttgtccggattactcaagaacatttctaagtgaggaacaataccgacatactttactgcagccattgaataaaagtttcttttaggttagtttagtactttatggggctcacggcaatctctcttacggatcaagaattctggtagctgccctccctgatttcagtaacatgttgcagctcgtcaaagtttaagcaaaacccaaggcataaccagactctcgacagtgactcagctgcgtcagatgggcggcgccttccgcgacggggcggcgccggacttgtgcgccaggaagagcttcttgagcagcctgagcatcatgaggaggcccatcctccgccggcggacgacggcgtgcttgcgcgtctccaaggcgccgtcgagccagggctccctcgcggccgcccacgacggcgtccccctggtgagcgggcagggctgcgcggcccgtgcgagctcctcgttgaagtcctcccacagcatgtccatcttgtcctccaccgcgaacctcgccgagccgtggcggccacccagctgctgctggtcgccgcccgcggcttgctgctccacggccgagacgctcctccggtggtcgtgctcgtgcactgccgccgtgccaacaacgccgccgggaacgagcagccacggcgacgcggaggcggagaagtcggcgttgcattgctcgagtgggaagctggggaatgcgaactcttccattgcaaatctctttctctctctctaggtctgagctgtgagctctgactctattgtggaagcctgtgttggaatggaagatgtatatgggtggttgcaacttgtttatctaccgcctcttgacatggaaatgactagaaatagaggaccggaggaaagggatgtgggttaatctaattaattgcttctgtagttgaaactgaagtggtggtcggcaaatggggttattataacatggtgatggcggttggtaagatgcttggcaagggaggttgctgtgtcaagtaatgccaatcagacaagcactaaccgcaaaagaaaggggcctacctgtacgatgcttaataattacatggccattatatatatatatatatatagagagagctaaagtctaggagcagaagataataactgaatgagcct

SEQ ID NO: 217340 - DNA, 2663 bp, Zea Mays
tgaactcgcacggtcgcacggcacggggaggagcaagaacacccagcccactgcccacgccgtgctggaagtggtccgtgctccggcagcggcggcgggaggaagagggaagcgaggggatggcgcagccgagcaaggagccgtgcaagaaggaggcgtgcgacatccaggcctgcctctccaagaacatgttcgactccaggaagtgtgtgagagttattcagttacttcagtcatgttgtgagcagtgtgagtacaaatcaacacactgtggttccttgtccggattactcaagaacatttctaagtgaggaacaataccgacatactttactgcagccattgaataaaagtttcttttaggttagtttagtactttatggggctcacggcaatctctcttacggatcaaggttccagtttcgatgctatttaagaatgtttcttcttcaaacatgattcgcggggcttcaataatgcagacacccctcaacctgcagaatgatgctctggtcgctgagttgtatggtaccgagtggaaacagcaaagtggtttgttaatgatcgattttaatgcctgtatacctatggtatccttcgtagttcgtgtgctcttctacacatgtaaccccatgttcccgtcttgaaccgcaaaataagtgaaccccatgcacatggagatattttggtgaccccaaagttgtgtataccatttcattgctttaccctaccatgttctgtggcaagagaatcaaatctggataaacatctgggatgataatttatctcttgggcaagaacttgtgatgtaagatatgattcaaataaacaactttgtggggtcatttcagtatcacagttggcaaaaaaaaatggcaggtccaggtttctgggaaataccagttgaagcaattcagtttttgtgttgtactgccacgtacatgcgttgtctaagccaacaaaccttttggcttttgcttgtgaaatgaaacttgtgtgttctgtgtgatgcaatacctaccactagcaggcaagtgtataagctggtatgcatgcgatggcttgaagctgacacgctcagtacattctctacaactaattcttgttgtctacttgggaccaaccagttggttggtgtgtcgtctaccgccacggctgcactccacatgtcccttctttatcatgttgctcatcttcgatagatgtcatgattcagtgaattaagcatttatatttgagaaaggggaccggttttatgaataaaaaaaatgacaggattgtatatttgtatacgcaaaccgctttaattcttctttagacgggctagcgacatctaaacggccgaaagcagcagcagaaaaaggtgtgactaggagtccatattttgaatttgggaaatgcggatcctccccccttttttttgtcattttcgcaactgtagcagagtcagatattcttaatttgtgcacagttcactacttcactctaacagttgtgtcttcacttgagctgatgatgttgagttggagttgagcagattacacagcacgctttgcaaggcggcattctaacgagttgtgtagctttggaaaaagctaaggaacttgacaaaggatgcaaaaatgtgactgattttacaaataatattgttcaatgcagaattctggtagctgccctccctgatttcagtaacatgttgcagctcgtcaaagtttaagcaaaacccaaggcataaccagactctcgacagtgactcagctgcgtcagatgggcggcgccttccgcgacggggcggcgccggacttgtgcgccaggaagagcttcttgagcagcctgagcatcatgaggaggcccatcctccgccggcggacgacggcgtgcttgcgcgtctccaaggcgccgtcgagccagggctccctcgcggccgcccacgacggcgtccccctggtgagcgggcagggctgcgcggcccgtgcgagctcctcgttgaagtcctcccacagcatgtccatcttgtcctccaccgcgaacctcgccgagccgtggcggccacccagctgctgctggtcgccgcccgcggcttgctgctccacggccgagacgctcctccggtggtcgtgctcgtgcactgccgccgtgccaacaacgccgccgggaacgagcagccacggcgacgcggaggcggagaagtcggcgttgcattgctcgagtgggaagctggggaatgcgaactcttccattgcaaatctctttctctctctctaggtctgagctgtgagctctgactctattgtggaagcctgtgttggaatggaagatgtatatgggtggttgcaacttgtttatctaccgcctcttgacatggaaatgactagaaatagaggaccggaggaaagggatgtgggttaatctaattaattgcttctgtagttgaaactgaagtggtggtcggcaaatggggttattataacatggtgatggcggttggtaagatgcttggcaagggaggttgctgtgtcaagtaatgccaatcagacaagcactaaccgcaaaagaaaggggcctacctgtacgatgcttaataattacatggccattatatatatatatatatatagagagagctaaagtctaggagcagaagataataactgaatgagcct

SEQ ID NO: 217341 - DNA, 2825 bp, Zea Mays
tttctacatacgacagcttcatcagtggtccagattattcctcctttcccatctaataaatttgacaactgacaagagcagcatctgagttggagggatagaaaaatctcagcatctgcgccattttctactacttatccttggggttgaactgtctaacggttctaccattgtgctatctcctttgtttgtcttctccacaaccatatatacaccaacttgccaaggaaggcttcatggccatggcttacctccccgttttcgtcttcctgttcatggttgtcttatgccaatccgatgacaggctaacacctgcaaagccactcttgcccaacgaggtgctcatctcaggcggtggtgtctttgctcttggcttcttctccctgaagaactcttcaaggtcttatgtcggcatatggtacaacaacattcccgagcgcacatacgtgtggattgccaaccgcgacaacccaattaccaccaatgtgcctgggaagctagtttttaccaacagttctgaccttgtcttgttagactccacaggccgcaccatctggacgacgacaaacaactataccgcaggaggaggcggtgaaactgcttccatcctgctcgactcggggaacttggttatccggttgccaaatggcaccgacatatgggagagcttcagttacccgactgacacaattgtccccaatgtaaatttttcactgaacgtagcttccagcgctacgctccttgttgcctggaagggacctgatgacccatccagtagtgatttctccatgggtggcgaccctagctcaggtctccagattatcgtttggaatgggacacagccatactggagaagagccgcatggggtggtgaactggtgcacggcatattccaaaacaacacaagcttcatgatgtaccagacagttgtcgatacaggagacgggtattacatgcaattgactgtgcctgatggctcacctagcatacgcttaactttggattacacaggcatgtccactttccgaagatggaacaacaacacgtcttcgtggaaaatctttagccaattcccctatccatcatgtgacaggtatgcctcttgtggcccatttggctactgcgatgacacagtacctgttcctgcatgcaagtgccttgatggttttgagcccaatggtcttgattcttccaaaggatgtcggagaaaggatgagctgaaatgtggtgacggagatagtttcttcaccttgcccagcatgaagactcctgacaagttcttatacatcaagaacagaagccttgaccaatgcgctgcagagtgcagggacaactgctcatgcacagcgtatgcttatgctaacctgcaaaatgttgacaccacgattgacacgacaaggtgcttggtctcaatcatgcacagcgctgcctcaatcggtctcaattctaggcaaagaccatccaatgtgtgtaagaataagaagagtaccacattgaagattgtactcccgattatggctggtttgattcttctaataacatgcacatggcttgtattcaagccaaaagacaaacacaaaagcaagaaaagtcagtacacactgcaacactcggatgcttccaacaggtttgagaacgaaaatttggaatttccatcaattgccttagaagacatcatcgttgcgacaaacgacttctctgattttaacatgcttggaaaaggtggattcggaaaagtttacaaggcaatgttggaaggtggcaaggaagtagctgtcaaaaggctcagtaaaggctctacacagggggtcgaggaatttagaaatgaagtagttctgattgctaaactgcagcacagaaacttagttagacttcttgattgctgcattcataaagatgagaagttactgatatatgaatacttaccaaacaaaagcttggacgccttcctttttgatgctacaaggaaatctttgcttgattggccatcccgtttcaaaataattaaaggtgtagcacgaggacttctttatctccaccaggattcaagattaacgataattcatagagatctcaaagcaagcaacatcttgttagacacagaaatgagtcccaagatatcggatttcggtatggcgaggatttttggtggaaatgagcaacatgcaaacactactcgagttgttggaacatatggttacatgtctcctgaatatgctatggaaggctcattctctgtcaagtctgacacctatagctttggtgttctactactggagattgtaagcggcttaaagattggctcaccccatctgataatggactatccaaatctcattgcttatgcatggagcttatgggaaggtggaaatgcaagggaattggtggactcgtcggttctggtgagttgtccacttcaggaagctgtacgatgcatccacttgggtcttttatgtgtccaagacagtccaaatgcgaggccgctcatgtcatccattgtgttcatgctagaaaatgaaacagccccggttcctaccccaaaaagacctgtatattttactactaggaattatgaaactaatcagtcagatcaatacatgcgaagatcgctgaataacatgagtatcacaactctagaggggcgttaaatgtttagtttcattgttcgctattttggtaaacttttgtttaatgtgtgccattaaacaattacattaggtttgtattaatacaattacgctagccgttcaggtttgtacatagaaaatgttccattaaatctgttgtacaccatcggttcggtgggttgtattgatatattctcg

SEQ ID NO: 217342 - DNA, 1213 bp, Zea Mays
cattggtcttgacaaaatttaatttatgaactgccagattcacaccctcttctggaaggattcgaacagagagaaccagatgatccctgtccatatcttctttccatatggaccccaggtgaaactgcacaatcgatcgatgcccccaagacattctgtgattcaggggagacgggtagactatgtggaagttcaacatgctttagttgcaacaatatacgagaaatgcaggctcagaaagtcagaggaacacttttgataccatgccgaacagcaatgagaggaagcttcccacttaatgggacgtattttcaagttaatgaggtatttgctgaccattgctcaagtcaaaatccaattgatgtcccacgaagttggatttgggacctcccaagacgaactgtttactttggaacctcagttcctacaatattcagaggtttaacgactgaagagatacaacgatgcttttggagaggatttgtttgcgtgaggggctttgataggacagtgagggcaccaaggcccctttatgcaaggttgcattttcctgtcagcaaggttgttagaggcaaaaagcctggagcagcaagagcagaagaataatagtacattgaagaaatataggggtgctaaccagacgaggatggatagcccgaaatgagatgctgacccaataggtcgccaaatcacctccaaattctaacccaatgacttccatctgtaatgaatggcaataccttgaaaacctgtgatggagatgttttgtggcgacatgatctcttaaattagattccgtctttggtaacagcctagctgttcttgttgagtcgcatattctttattctgaagatcaatatagcaaatgggagaaaaaacatagtgcacagtcgagctgttctaattgtacctcttgtgagtggaatcagttgttgtacaacaggaagatggacctatctgtacaatggtcgtacatgttctttgatcatagtataaacaatgtaagcctcatcagccgttatttgattgtttcaaaacaaaggaaaagcattttcaattcatctgttcaaagactatttccttttccccccttctatcttgagatggaaactgactaattttttacttgtggggatctgacagtgaatatatcaaaataatatggaataatttgtctcttctataatgtaatgctggtaggggggaaaaatac

SEQ ID NO: 217343 - DNA, 6901 bp, Zea Mays
ggccccgcctcggcgcgaggtaaaaacacgtgccggggctgccgcctggccgtggcatcgccctggctggcggtgaaacccatcgcattcgcatcgcacgcgcggcgcgccaggggagatcattcacaggggcaaggctaccactggagggggcctacgcagcagtgagaggcttctacagctcgtcgtacccactcctcttttctcactctactactagactggtgtctctctcaccccaaggagagtcgcagcgacccagccttctccctccctctctctcctctctctctcttcttgcgccgcttttccttcgctgctccgcgcggctccggcgggcggtgcgggaggaagaggagggggcggaggggccggaagttttccggccgaggagcccagcgggaggatcgaagaggaggcactggtccggggctgtccactgcatcgggttcttcgaagttggggggaccacgggactcgaagggagcgcccgatctgctccgccggcgaggtgaagtcagctgatatgatgtacctcatttggataacaatttgactggcaccagattttacagaaatatgcaggaggggctagggcaaaggatgcatgtacctcatggtatcaatctgtgtatcgcaacttcttccatgccctttcaggcgcaatctttcattgagcccagtaccggacaagtgaaccctcctgtaacatctgaaaacttatctgctaactcacaagctgttaatgatgctggagcagttgaaggtactgacatgaacgaaaaatcggttcaaaaacctaagaggaaaaaacataggccaaaggtcattaaagaaggacaatcagcaaagctgcagaagcctaaaactcccaagcctcccaaggaaaatgggaatcagcctactggaaaaagaaagtatgtcaggaggaagggactaagtgcaccagctgaacaaattccactatgtgctgatacacacactagagctaaaccaggagtagtccaaagatgtttggactttgatgtggaggaccagcatggacatttggatctggtaccgcaaacccaggaaacagagatacagactggtcctgcggacacacaaccatcaatatctggagttgaaagaagtaatgttcaaatatcataccattggggtggtacaagcagttctattagttcagttgacccaatagctggtatacacggattacaggcagactgcaattctaaaagagtcagttttgatctgaacaattctatagtaagtcagctgccaaccaattattctagtccaatggacagctctgaacaatttttcaattttgatttaagagaagaagttcgaacaaaccagttattgcctcatctaaccagctcggtagatcacacacgacacccctcggtcaattttgaccaatacataagcacatctcaagattgtccagaaaaatcacccagacattatcagatggtcagtagttatagaattctagaaaatatgacaacagcttctcagtataccgaaagggtgtctatggggggcaatttcaaccctgaagcttgtatgggcgaagatgcaataatcaaacaaatggcccaaagctatagacctctagaaagtccatttgtacctcccaatcataatgaaagggatatgatgaacggaaatctgaacgagtttcctgtgaagaatgattacttgaagttttctaccaatagtaactaccaaactggagcaggttttgatcattgttctccagactattcagatgttcttgcaatgggtacaaaaagagaacatgatgctatcagtggccatcagatttctcttggcattgactttattaactcaaatagaacaaggaagttctgtagtgatgaccccctttccactagctctcaaacatcttactgtcctcaatcatgcaaaaggatgaggccagaggatcatagcaatcagctccatggaactatgggtaagctttcttccgcatcagcattttctgatggtttgaacacaaataaagtttcagctatgaaccctagaattggtaccttggctgacgtacaattgttgatggcccttgagaaatcaaaagcttcacaacaaatgtttgagtttgactatgttacgtcacaaaataacatgatccatgaacgtactgggcttgctctgcaaaatattgctgacaaaggatttattgctctacctaataaacagttcccaagcttcgctgcacagaacatacctttgcctggcagtactgtgaaccaattgggagaaagtaataccttgaggaatggagtgcatcaaattcaaccttgggaaattacatataggctacatgactctagagacaatttttctttaccagggaacacacagttctcgaatggcacagtgaatccatcctcagaaaactatattcagagtaatgctattcatgaacatcaatgcttagaaaacgttgtggctaaggtgccagttttgtctgaaacacaaaatacttccactcaagagggccataaccactgcactgctgctactactgatgagcatatcagaactacaagtgatgaagttgttagatccctcacccgacgtgcaagccaaccaactacaaatgggaactacaatattaaatcttctagagtaactgcagaagcaaactgcactgagaagccaagaaaaaggggtcgtccaagaaaagtagtaaaccccaatggggagccaaaagaaagaggtactaaagggaaacaaaatgttggtcatgcagaacttatatcaccaaaaggttcatgtgctgactttttaaaaactaatggtattacttatgcttctgaatcttccactggaattactcctaggatgtcaactgtggagttgaaaagttctgaccaagataaggagattcatggaggtgccatgcctcaagctacagcagcatcagttgatcctttagatggcataattgaaaagattaagctcttaaccataaacggaccagacaagggtgtgtcagaggtacctaaaaatgctcttgttccttatgaaggtgaatttagtgcactgattgcatttgaggggaaggcaaagaaaagccgtcctcgggccaaagtgaacatcgatccagtcaccactatgatgtggaacttattaatggggccagatatgggtgatgatgccgaagggttagacaaggataaagagaagtggcttgatgaagaaagaagagtgttcagaggacgggttgattcattcattgctcgtatgcatctagttcagggggataggcgtttctctcgatggaaaggatcagtcgtggattcagtcgtgggtgtatttcttacccagaatgtttcagatcatctttctagttctgctttcatggcggttgctgccaaatttcctgttaagatagaggtccctaaaaaacctgtggctgagatgtctcatactcctgaacagaaggatagttgttctggactgtttggtgattctatcaaattgcagggcaatatatacattgaagagataagtgacattaaatcgttaattactacagaagataatgaagaaagtaataataacgaattgattggaaactctgctgggaatggagtaaactgtgcaactggaggatgccatgtctcttatagtaagtcactaactggatcccatggaaatgggctatcaggatctgtttttccaactaccggcttttcaggtgtggtagaaactgaagatggatcactggaggatgttatttcttctcaaaattctgctgtttcttcccagaattccccagattatgttgttcgtagaaccgatccaataggttctagttcgttacaaaatttcactgaagagggctgtattatgagaaatatgtccaatgggactggcatctctactgactatacattgtttctgccaattcaagatccaaaaggcatgctcggattatcagaatattgtggacttaatcctcttccagtttcaggtgtgaacaaggacatgttgcttgatctaaacagatcatatcagccattacatacttatatgccctatgatcagaatagtgagtctgatttcacaggtgtgtcatgtttgaaccatatgggtaaatcattccacacaggccctgataaagtgaatctttccagtgttacacagtctgaggctagtctttaccctattgatcctttagaacaaggcgacttttcaccactaattaaacaaaacttccaaccattacatagttcagacgaagtgccatttttcaaggagcactcttcatgtaatgattttttgaggaacaaaactgaagctcattttctggaaccacttgtctgttcaaatcctcaagaggtgtacacaacctcaacagatcaaatgggtgctgaacaatctcaatcaggatgtggccaaaagtacaatgatgccagagttcagacagcatcacatgaaaggcatcagtcttcaaccttgtgtgataaccagaactcttgttcggtggtgttgcaaggagttgcttcagactcaacacagaagttcgttgatactcaaaaggggccgtcaaaagctcgacaaaatggatcaaaagctaaggtacggggccgacctaaaaagaaaactgatgactgggacagtttacggaaaaaagtgctttctaatggtggggacaaacaaagaagtcatgatgcaagggatactgttgattgggaggcagttaggcaagcagaagtacgggaaatatctgaaaccatcagagagagaggaatgaataatatgctagcagaacggataaaggaattcttgaaccgattggtgacagaccatggaagcattgatcttgaatggctaagagatgttcaaccagacaaagcaaaggacttccttctaagcattagagggcttggactcaaaagtgttgagtgtgttcgcctcttgacactacatcatatggcttttccagtggacacaaatgttggtcggatatgtgtgaggcttggatgggtgccacttcaaccactgccagagtctcttcagttgcacctcttggaaatgtatcccatgctggagcacatacagaagtacctctggcctcgactatgcaaactagatcaacgtacattgtatgagcttcactaccaaatgattacttttggaaaggttttctgcacaaaaagtaagcctaattgcaattcatgtccaatgagagctgaatgtaagcactttgctagtgcatttgcaagtgctaggcttgctcttcctgcacctgaagaaaaatgtttggttacattggaagatccaaatgttgtagagttttctcaccaaacatacataaactcagggagtgttggccaacttgagtggagtgcaaattatcctaaacatgctgtttctggtaatcatcagccaatcatcgaggaaccactgagcccagaatgtgaaactgaaaatatagaggcacatgagggtgcaattgaggatttcttttgtgaagaatctgatgaaattcctaccattaatcttaatatcgaggagttcacacaaaacttgaaggactatatgcaagcaaacaatgttgagattgaatatgctgacatgtcaaaggcattggttgccatcacgcctgatgctgcttccattccaactccaaagctcaagaatgtcaatcgtctgaggacagaacaccaagtttatgaactgccagattcacaccctcttctggaaggattcgaacagagagaaccagatgatccctgtccatatcttctttccatatggaccccaggtgaaactgcacaatcgatcgatgcccccaagacattctgtgattcaggggagacgggtagactatgtggaagttcaacatgctttagttgcaacaatatacgagaaatgcaggctcagaaagtcagaggaacacttttgataccatgccgaacagcaatgagaggaagcttcccacttaatgggacgtattttcaagttaatgaggtatttgctgaccattgctcaagtcaaaatccaattgatgtcccacgaagttggatttgggacctcccaagacgaactgtttactttggaacctcagttcctacaatattcagaggtttaacgactgaagagatacaacgatgcttttggagaggatttgtttgcgtgaggggctttgataggacagtgagggcaccaaggcccctttatgcaaggttgcattttcctgtcagcaaggttgttagaggcaaaaagcctggagcagcaagagcagaagaataatagtacattgaagaaatataggggtgctaaccagacgaggatggatagcccgaaatgagatgctgacccaataggtcgccaaatcacctccaaattctaacccaatgacttccatctgtaatgaatggcaataccttgaaaacctgtgatggagatgttttgtggcgacatgatctcttaaattagattccgtctttggtaacagcctagctgttcttgttgagtcgcatattctttattctgaagatcaatatagcaaatgggagaaaaaacatagtgcacagtcgagctgttctaattgtacctcttgtgagtggaatcagttgttgtacaacaggaagatggacctatctgtacaatggtcgtacatgttctttgatcatagtataaacaatgtaagcctcatcagccgttatttgattgtttcaaaacaaaggaaaagcattttcaattcatctgttcaaagactatttccttttccccccttctatcttgagatggaaactgactaattttttacttgtggggatctgacagtgaatatatcaaaataatatggaataatttgtctcttctataatgtaatgctggtaggggggaaaaatac

SEQ ID NO: 217344 - DNA, 6844 bp, Zea Mays
ggccccgcctcggcgcgaggtaaaaacacgtgccggggctgccgcctggccgtggcatcgccctggctggcggtgaaacccatcgcattcgcatcgcacgcgcggcgcgccaggggagatcattcacaggggcaaggctaccactggagggggcctacgcagcagtgagaggcttctacagctcgtcgtacccactcctcttttctcactctactactagactggtgtctctctcaccccaaggagagtcgcagcgacccagccttctccctccctctctctcctctctctctcttcttgcgccgcttttccttcgctgctccgcgcggctccggcgggcggtgcgggaggaagaggagggggcggaggggccggaagttttccggccgaggagcccagcgggaggatcgaagaggaggcactggtccggggctgtccactgcatcgggttcttcgaagttggggggaccacgggactcgaagggagcgcccgatctgctccgccggcgaggtgaagtcagctgatatgatgtacctcatttggataacaatttgactggcaccagattttacagaaatatgcaggaggggctagggcaaaggatgcatgtacctcatggtatcaatctgtgtatcgcaacttcttccatgccctttcaggcgcaatctttcattgagcccagtaccggacaagtgaaccctcctgtaacatctgaaaacttatctgctaactcacaagctgttaatgatgctggagcagttgaaggtactgacatgaacgaaaaatcggttcaaaaacctaagaggaaaaaacataggccaaaggtcattaaagaaggacaatcagcaaagctgcagaagcctaaaactcccaagcctcccaaggaaaatgggaatcagcctactggaaaaagaaagtatgtcaggaggaagggactaagtgcaccagctgaacaaattccactatgtgctgatacacacactagagctaaaccaggagtagtccaaagatgtttggactttgatgtggaggaccagcatggacatttggatctggtaccgcaaacccaggaaacagagatacagactggtcctgcggacacacaaccatcaatatctggagttgaaagaagtaatgttcaaatatcataccattggggtggtacaagcagttctattagttcagttgacccaatagctggtatacacggattacaggcagactgcaattctaaaagagtcagttttgatctgaacaattctatagtaagtcagctgccaaccaattattctagtccaatggacagctctgaacaatttttcaattttgatttaagagaagaagttcgaacaaaccagttattgcctcatctaaccagctcggtagatcacacacgacacccctcggtcaattttgaccaatacataagcacatctcaagattgtccagaaaaatcacccagacattatcagatggtcagtagttatagaattctagaaaatatgacaacagcttctcagtataccgaaagggtgtctatggggggcaatttcaaccctgaagcttgtatgggcgaagatgcaataatcaaacaaatggcccaaagctatagacctctagaaagtccatttgtacctcccaatcataatgaaagggatatgatgaacggaaatctgaacgagtttcctgtgaagaatgattacttgaagttttctaccaatagtaactaccaaactggagcaggttttgatcattgttctccagactattcagatgttcttgcaatgggtacaaaaagagaacatgatgctatcagtggccatcagatttctcttggcattgactttattaactcaaatagaacaaggaagttctgtagtgatgaccccctttccactagctctcaaacatcttactgtcctcaatcatgcaaaaggatgaggccagaggatcatagcaatcagctccatggaactatgggtaagctttcttccgcatcagcattttctgatggtttgaacacaaataaagtttcagctatgaaccctagaattggtaccttggctgacgtacaattgttgatggcccttgagaaatcaaaagcttcacaacaaatgtttgagtttgactatgttacgtcacaaaataacatgatccatgaacgtactgggcttgctctgcaaaatattgctgacaaaggatttattgctctacctaataaacagttcccaagcttcgctgcacagaacatacctttgcctggcagtactgtgaaccaattgggagaaagtaataccttgaggaatggagtgcatcaaattcaaccttgggaaattacatataggctacatgactctagagacaatttttctttaccagggaacacacagttctcgaatggcacagtgaatccatcctcagaaaactatattcagagtaatgctattcatgaacatcaatgcttagaaaacgttgtggctaaggtgccagttttgtctgaaacacaaaatacttccactcaagagggccataaccactgcactgctgctactactgatgagcatatcagaactacaagtgatgaagttgttagatccctcacccgacgtgcaagccaaccaactacaaatgggaactacaatattaaatcttctagagtaactgcagaagcaaactgcactgagaagccaagaaaaaggggtcgtccaagaaaagtagtaaaccccaatggggagccaaaagaaagaggtactaaagggaaacaaaatgttggtcatgcagaacttatatcaccaaaaggttcatgtgctgactttttaaaaactaatggtattacttatgcttctgaatcttccactggaattactcctaggatgtcaactgtggagttgaaaagttctgaccaagataaggagattcatggaggtgccatgcctcaagctacagcagcatcagttgatcctttagatggcataattgaaaagattaagctcttaaccataaacggaccagacaagggtgtgtcagaggtacctaaaaatgctcttgttccttatgaaggtgaatttagtgcactgattgcatttgaggggaaggcaaagaaaagccgtcctcgggccaaagtgaacatcgatccagtcaccactatgatgtggaacttattaatggggccagatatgggtgatgatgccgaagggttagacaaggataaagagaagtggcttgatgaagaaagaagagtgttcagaggacgggttgattcattcattgctcgtatgcatctagttcagggggataggcgtttctctcgatggaaaggatcagtcgtggattcagtcgtgggtgtatttcttacccagaatgtttcagatcatctttctagttctgctttcatggcggttgctgccaaatttcctgttaagatagaggtccctaaaaaacctgtggctgagatgtctcatactcctgaacagaaggatagttgttctggactgtttggtgattctatcaaattgcagggcaatatatacattgaagagataagtgacattaaatcgttaattactacagaagataatgaagaaagtaataataacgaattgattggaaactctgctgggaatggagtaaactgtgcaactggaggatgccatgtctcttatagtgtggtagaaactgaagatggatcactggaggatgttatttcttctcaaaattctgctgtttcttcccagaattccccagattatgttgttcgtagaaccgatccaataggttctagttcgttacaaaatttcactgaagagggctgtattatgagaaatatgtccaatgggactggcatctctactgactatacattgtttctgccaattcaagatccaaaaggcatgctcggattatcagaatattgtggacttaatcctcttccagtttcaggtgtgaacaaggacatgttgcttgatctaaacagatcatatcagccattacatacttatatgccctatgatcagaatagtgagtctgatttcacaggtgtgtcatgtttgaaccatatgggtaaatcattccacacaggccctgataaagtgaatctttccagtgttacacagtctgaggctagtctttaccctattgatcctttagaacaaggcgacttttcaccactaattaaacaaaacttccaaccattacatagttcagacgaagtgccatttttcaaggagcactcttcatgtaatgattttttgaggaacaaaactgaagctcattttctggaaccacttgtctgttcaaatcctcaagaggtgtacacaacctcaacagatcaaatgggtgctgaacaatctcaatcaggatgtggccaaaagtacaatgatgccagagttcagacagcatcacatgaaaggcatcagtcttcaaccttgtgtgataaccagaactcttgttcggtggtgttgcaaggagttgcttcagactcaacacagaagttcgttgatactcaaaaggggccgtcaaaagctcgacaaaatggatcaaaagctaaggtacggggccgacctaaaaagaaaactgatgactgggacagtttacggaaaaaagtgctttctaatggtggggacaaacaaagaagtcatgatgcaagggatactgttgattgggaggcagttaggcaagcagaagtacgggaaatatctgaaaccatcagagagagaggaatgaataatatgctagcagaacggataaaggaattcttgaaccgattggtgacagaccatggaagcattgatcttgaatggctaagagatgttcaaccagacaaagcaaaggacttccttctaagcattagagggcttggactcaaaagtgttgagtgtgttcgcctcttgacactacatcatatggcttttccagtggacacaaatgttggtcggatatgtgtgaggcttggatgggtgccacttcaaccactgccagagtctcttcagttgcacctcttggaaataagtacctctggcctcgactatgcaaactagatcaacgtacattgtaagattagttcaatcgatacttttcgcactatatttagatggctagattcaatgacgccttccaatatgcaggttttctgcacaaaaagtaagcctaattgcaattcatgtccaatgagagctgaatgtaagcactttgctagtgcatttgcaagtgctaggcttgctcttcctgcacctgaagaaaaatgtttggttacattggaagatccaaatgttgtagagttttctcaccaaacatacataaactcagggagtgttggccaacttgagtggagtgcaaattatcctaaacatgctgtttctggtaatcatcagccaatcatcgaggaaccactgagcccagaatgtgaaactgaaaatatagaggcacatgagggtgcaattgaggatttcttttgtgaagaatctgatgaaattcctaccattaatcttaatatcgaggagttcacacaaaacttgaaggactatatgcaagcaaacaatgttgagattgaatatgctgacatgtcaaaggcattggttgccatcacgcctgatgctgcttccattccaactccaaagctcaagaatgtcaatcgtctgaggacagaacaccaagtttatgaactgccagattcacaccctcttctggaaggattcgaacagagagaaccagatgatccctgtccatatcttctttccatatggaccccaggtgaaactgcacaatcgatcgatgcccccaagacattctgtgattcaggggagacgggtagactatgtggaagttcaacatgctttagttgcaacaatatacgagaaatgcaggctcagaaagtcagaggaacacttttgataccatgccgaacagcaatgagaggaagcttcccacttaatgggacgtattttcaagttaatgaggtatttgctgaccattgctcaagtcaaaatccaattgatgtcccacgaagttggatttgggacctcccaagacgaactgtttactttggaacctcagttcctacaatattcagaggtttaacgactgaagagatacaacgatgcttttggagaggatttgtttgcgtgaggggctttgataggacagtgagggcaccaaggcccctttatgcaaggttgcattttcctgtcagcaaggttgttagaggcaaaaagcctggagcagcaagagcagaagaataatagtacattgaagaaatataggggtgctaaccagacgaggatggatagcccgaaatgagatgctgacccaataggtcgccaaatcacctccaaattctaacccaatgacttccatctgtaatgaatggcaataccttgaaaacctgtgatggagatgttttgtggcgacatgatctcttaaattagattccgtctttggtaacagcctagctgttcttgttgagtcgcatattctttattctgaagatcaatatagcaaatgggagaaaaaacatagtgcacagtcgagctgttctaattgtacctcttgtgagtggaatcagttgttgtacaacaggaagatggacctatctgtacaatggtcgtacatgttctttgatcatagtataaacaatgtaagcctcatcagccgttatttgattgtttcaaaacaaaggaaaagcattttcaattcatctgttcaaagactatttccttttccccccttctatcttgagatggaaactgactaattttttacttgtggggatctgacagtgaatatatcaaaataatatggaataatttgtctcttctataatgtaatgctggtaggggggaaaaatac

SEQ ID NO: 217345 - DNA, 6830 bp, Zea Mays
ggccccgcctcggcgcgaggtaaaaacacgtgccggggctgccgcctggccgtggcatcgccctggctggcggtgaaacccatcgcattcgcatcgcacgcgcggcgcgccaggggagatcattcacaggggcaaggctaccactggagggggcctacgcagcagtgagaggcttctacagctcgtcgtacccactcctcttttctcactctactactagactggtgtctctctcaccccaaggagagtcgcagcgacccagccttctccctccctctctctcctctctctctcttcttgcgccgcttttccttcgctgctccgcgcggctccggcgggcggtgcgggaggaagaggagggggcggaggggccggaagttttccggccgaggagcccagcgggaggatcgaagaggaggcactggtccggggctgtccactgcatcgggttcttcgaagttggggggaccacgggactcgaagggagcgcccgatctgctccgccggcgaggtgaagtcagctgatatgatgtacctcatttggataacaatttgactggcaccagattttacagaaatatgcaggaggggctagggcaaaggatgcatgtacctcatggtatcaatctgtgtatcgcaacttcttccatgccctttcaggcgcaatctttcattgagcccagtaccggacaagtgaaccctcctgtaacatctgaaaacttatctgctaactcacaagctgttaatgatgctggagcagttgaaggtactgacatgaacgaaaaatcggttcaaaaacctaagaggaaaaaacataggccaaaggtcattaaagaaggacaatcagcaaagctgcagaagcctaaaactcccaagcctcccaaggaaaatgggaatcagcctactggaaaaagaaagtatgtcaggaggaagggactaagtgcaccagctgaacaaattccactatgtgctgatacacacactagagctaaaccaggagtagtccaaagatgtttggactttgatgtggaggaccagcatggacatttggatctggtaccgcaaacccaggaaacagagatacagactggtcctgcggacacacaaccatcaatatctggagttgaaagaagtaatgttcaaatatcataccattggggtggtacaagcagttctattagttcagttgacccaatagctggtatacacggattacaggcagactgcaattctaaaagagtcagttttgatctgaacaattctatagtaagtcagctgccaaccaattattctagtccaatggacagctctgaacaatttttcaattttgatttaagagaagaagttcgaacaaaccagttattgcctcatctaaccagctcggtagatcacacacgacacccctcggtcaattttgaccaatacataagcacatctcaagattgtccagaaaaatcacccagacattatcagatggtcagtagttatagaattctagaaaatatgacaacagcttctcagtataccgaaagggtgtctatggggggcaatttcaaccctgaagcttgtatgggcgaagatgcaataatcaaacaaatggcccaaagctatagacctctagaaagtccatttgtacctcccaatcataatgaaagggatatgatgaacggaaatctgaacgagtttcctgtgaagaatgattacttgaagttttctaccaatagtaactaccaaactggagcaggttttgatcattgttctccagactattcagatgttcttgcaatgggtacaaaaagagaacatgatgctatcagtggccatcagatttctcttggcattgactttattaactcaaatagaacaaggaagttctgtagtgatgaccccctttccactagctctcaaacatcttactgtcctcaatcatgcaaaaggatgaggccagaggatcatagcaatcagctccatggaactatgggtaagctttcttccgcatcagcattttctgatggtttgaacacaaataaagtttcagctatgaaccctagaattggtaccttggctgacgtacaattgttgatggcccttgagaaatcaaaagcttcacaacaaatgtttgagtttgactatgttacgtcacaaaataacatgatccatgaacgtactgggcttgctctgcaaaatattgctgacaaaggatttattgctctacctaataaacagttcccaagcttcgctgcacagaacatacctttgcctggcagtactgtgaaccaattgggagaaagtaataccttgaggaatggagtgcatcaaattcaaccttgggaaattacatataggctacatgactctagagacaatttttctttaccagggaacacacagttctcgaatggcacagtgaatccatcctcagaaaactatattcagagtaatgctattcatgaacatcaatgcttagaaaacgttgtggctaaggtgccagttttgtctgaaacacaaaatacttccactcaagagggccataaccactgcactgctgctactactgatgagcatatcagaactacaagtgatgaagttgttagatccctcacccgacgtgcaagccaaccaactacaaatgggaactacaatattaaatcttctagagtaactgcagaagcaaactgcactgagaagccaagaaaaaggggtcgtccaagaaaagtagtaaaccccaatggggagccaaaagaaagaggtactaaagggaaacaaaatgttggtcatgcagaacttatatcaccaaaaggttcatgtgctgactttttaaaaactaatggtattacttatgcttctgaatcttccactggaattactcctaggatgtcaactgtggagttgaaaagttctgaccaagataaggagattcatggaggtgccatgcctcaagctacagcagcatcagttgatcctttagatggcataattgaaaagattaagctcttaaccataaacggaccagacaagggtgtgtcagaggtacctaaaaatgctcttgttccttatgaaggtgaatttagtgcactgattgcatttgaggggaaggcaaagaaaagccgtcctcgggccaaagtgaacatcgatccagtcaccactatgatgtggaacttattaatggggccagatatgggtgatgatgccgaagggttagacaaggataaagagaagtggcttgatgaagaaagaagagtgttcagaggacgggttgattcattcattgctcgtatgcatctagttcagggggataggcgtttctctcgatggaaaggatcagtcgtggattcagtcgtgggtgtatttcttacccagaatgtttcagatcatctttctaggtgaaatatgcacttctggctaatttaaggcaatatatacattgaagagataagtgacattaaatcgttaattactacagaagataatgaagaaagtaataataacgaattgattggaaactctgctgggaatggagtaaactgtgcaactggaggatgccatgtctcttatagtaagtcactaactggatcccatggaaatgggctatcaggatctgtttttccaactaccggcttttcaggtgtggtagaaactgaagatggatcactggaggatgttatttcttctcaaaattctgctgtttcttcccagaattccccagattatgttgttcgtagaaccgatccaataggttctagttcgttacaaaatttcactgaagagggctgtattatgagaaatatgtccaatgggactggcatctctactgactatacattgtttctgccaattcaagatccaaaaggcatgctcggattatcagaatattgtggacttaatcctcttccagtttcaggtgtgaacaaggacatgttgcttgatctaaacagatcatatcagccattacatacttatatgccctatgatcagaatagtgagtctgatttcacaggtgtgtcatgtttgaaccatatgggtaaatcattccacacaggccctgataaagtgaatctttccagtgttacacagtctgaggctagtctttaccctattgatcctttagaacaaggcgacttttcaccactaattaaacaaaacttccaaccattacatagttcagacgaagtgccatttttcaaggagcactcttcatgtaatgattttttgaggaacaaaactgaagctcattttctggaaccacttgtctgttcaaatcctcaagaggtgtacacaacctcaacagatcaaatgggtgctgaacaatctcaatcaggatgtggccaaaagtacaatgatgccagagttcagacagcatcacatgaaaggcatcagtcttcaaccttgtgtgataaccagaactcttgttcggtggtgttgcaaggagttgcttcagactcaacacagaagttcgttgatactcaaaaggggccgtcaaaagctcgacaaaatggatcaaaagctaaggtacggggccgacctaaaaagaaaactgatgactgggacagtttacggaaaaaagtgctttctaatggtggggacaaacaaagaagtcatgatgcaagggatactgttgattgggaggcagttaggcaagcagaagtacgggaaatatctgaaaccatcagagagagaggaatgaataatatgctagcagaacggataaaggaattcttgaaccgattggtgacagaccatggaagcattgatcttgaatggctaagagatgttcaaccagacaaagcaaaggacttccttctaagcattagagggcttggactcaaaagtgttgagtgtgttcgcctcttgacactacatcatatggcttttccagtggacacaaatgttggtcggatatgtgtgaggcttggatgggtgccacttcaaccactgccagagtctcttcagttgcacctcttggaaatgtatcccatgctggagcacatacagaagtacctctggcctcgactatgcaaactagatcaacgtacattgtaagattagttcaatcgatacttttcgcactatatttagatggctagattcaatgacgccttccaatatgcaggttttctgcacaaaaagtaagcctaattgcaattcatgtccaatgagagctgaatgtaagcactttgctagtgcatttgcaagtgctaggcttgctcttcctgcacctgaagaaaaatgtttggttacattggaagatccaaatgttgtagagttttctcaccaaacatacataaactcagggagtgttggccaacttgagtggagtgcaaattatcctaaacatgctgtttctggtaatcatcagccaatcatcgaggaaccactgagcccagaatgtgaaactgaaaatatagaggcacatgagggtgcaattgaggatttcttttgtgaagaatctgatgaaattcctaccattaatcttaatatcgaggagttcacacaaaacttgaaggactatatgcaagcaaacaatgttgagattgaatatgctgacatgtcaaaggcattggttgccatcacgcctgatgctgcttccattccaactccaaagctcaagaatgtcaatcgtctgaggacagaacaccaagtttatgaactgccagattcacaccctcttctggaaggattcgaacagagagaaccagatgatccctgtccatatcttctttccatatggaccccaggtgaaactgcacaatcgatcgatgcccccaagacattctgtgattcaggggagacgggtagactatgtggaagttcaacatgctttagttgcaacaatatacgagaaatgcaggctcagaaagtcagaggaacacttttgataccatgccgaacagcaatgagaggaagcttcccacttaatgggacgtattttcaagttaatgaggtatttgctgaccattgctcaagtcaaaatccaattgatgtcccacgaagttggatttgggacctcccaagacgaactgtttactttggaacctcagttcctacaatattcagaggtttaacgactgaagagatacaacgatgcttttggagaggatttgtttgcgtgaggggctttgataggacagtgagggcaccaaggcccctttatgcaaggttgcattttcctgtcagcaaggttgttagaggcaaaaagcctggagcagcaagagcagaagaataatagtacattgaagaaatataggggtgctaaccagacgaggatggatagcccgaaatgagatgctgacccaataggtcgccaaatcacctccaaattctaacccaatgacttccatctgtaatgaatggcaataccttgaaaacctgtgatggagatgttttgtggcgacatgatctcttaaattagattccgtctttggtaacagcctagctgttcttgttgagtcgcatattctttattctgaagatcaatatagcaaatgggagaaaaaacatagtgcacagtcgagctgttctaattgtacctcttgtgagtggaatcagttgttgtacaacaggaagatggacctatctgtacaatggtcgtacatgttctttgatcatagtataaacaatgtaagcctcatcagccgttatttgattgtttcaaaacaaaggaaaagcattttcaattcatctgttcaaagactatttccttttccccccttctatcttgagatggaaactgactaattttttacttgtggggatctgacagtgaatatatcaaaataatatggaataatttgtctcttctataatgtaatgctggtaggggggaaaaatac

SEQ ID NO: 217346 - DNA, 6864 bp, Zea Mays
ggccccgcctcggcgcgaggtaaaaacacgtgccggggctgccgcctggccgtggcatcgccctggctggcggtgaaacccatcgcattcgcatcgcacgcgcggcgcgccaggggagatcattcacaggggcaaggctaccactggagggggcctacgcagcagtgagaggcttctacagctcgtcgtacccactcctcttttctcactctactactagactggtgtctctctcaccccaaggagagtcgcagcgacccagccttctccctccctctctctcctctctctctcttcttgcgccgcttttccttcgctgctccgcgcggctccggcgggcggtgcgggaggaagaggagggggcggaggggccggaagttttccggccgaggagcccagcgggaggatcgaagaggaggcactggtccggggctgtccactgcatcgggttcttcgaagttggggggaccacgggactcgaagggagcgcccgatctgctccgccggcgaggtgaagtcagctgatatgatgtacctcatttggataacaatttgactggcaccagattttacagaaatatgcaggaggggctagggcaaaggatgcatgtacctcatggtatcaatctgtgtatcgcaacttcttccatgccctttcaggcgcaatctttcattgagcccagtaccggacaagtgaaccctcctgtaacatctgaaaacttatctgctaactcacaagctgttaatgatgctggagcagttgaaggtactgacatgaacgaaaaatcggttcaaaaacctaagaggaaaaaacataggccaaaggtcattaaagaaggacaatcagcaaagctgcagaagcctaaaactcccaagcctcccaaggaaaatgggaatcagcctactggaaaaagaaagtatgtcaggaggaagggactaagtgcaccagctgaacaaattccactatgtgctgatacacacactagagctaaaccaggagtagtccaaagatgtttggactttgatgtggaggaccagcatggacatttggatctggtaccgcaaacccaggaaacagagatacagactggtcctgcggacacacaaccatcaatatctggagttgaaagaagtaatgttcaaatatcataccattggggtggtacaagcagttctattagttcagttgacccaatagctggtatacacggattacaggcagactgcaattctaaaagagtcagttttgatctgaacaattctatagtaagtcagctgccaaccaattattctagtccaatggacagctctgaacaatttttcaattttgatttaagagaagaagttcgaacaaaccagttattgcctcatctaaccagctcggtagatcacacacgacacccctcggtcaattttgaccaatacataagcacatctcaagattgtccagaaaaatcacccagacattatcagatggtcagtagttatagaattctagaaaatatgacaacagcttctcagtataccgaaagggtgtctatggggggcaatttcaaccctgaagcttgtatgggcgaagatgcaataatcaaacaaatggcccaaagctatagacctctagaaagtccatttgtacctcccaatcataatgaaagggatatgatgaacggaaatctgaacgagtttcctgtgaagaatgattacttgaagttttctaccaatagtaactaccaaactggagcaggttttgatcattgttctccagactattcagatgttcttgcaatgggtacaaaaagagaacatgatgctatcagtggccatcagatttctcttggcattgactttattaactcaaatagaacaaggaagttctgtagtgatgaccccctttccactagctctcaaacatcttactgtcctcaatcatgcaaaaggatgaggccagaggatcatagcaatcagctccatggaactatgggtaagctttcttccgcatcagcattttctgatggtttgaacacaaataaagtttcagctatgaaccctagaattggtaccttggctgacgtacaattgttgatggcccttgagaaatcaaaagcttcacaacaaatgtttgagtttgactatgttacgtcacaaaataacatgatccatgaacgtactgggcttgctctgcaaaatattgctgacaaaggatttattgctctacctaataaacagttcccaagcttcgctgcacagaacatacctttgcctggcagtactgtgaaccaattgggagaaagtaataccttgaggaatggagtgcatcaaattcaaccttgggaaattacatataggctacatgactctagagacaatttttctttaccagggaacacacagttctcgaatggcacagtgaatccatcctcagaaaactatattcagagtaatgctattcatgaacatcaatgcttagaaaacgttgtggctaaggtgccagttttgtctgaaacacaaaatacttccactcaagagggccataaccactgcactgctgctactactgatgagcatatcagaactacaagtgatgaagttgttagatccctcacccgacgtgcaagccaaccaactacaaatgggaactacaatattaaatcttctagagtaactgcagaagcaaactgcactgagaagccaagaaaaaggggtcgtccaagaaaagtagtaaaccccaatggggagccaaaagaaagaggtactaaagggaaacaaaatgttggtcatgcagaacttatatcaccaaaaggttcatgtgctgactttttaaaaactaatggtattacttatgcttctgaatcttccactggaattactcctaggatgtcaactgtggagttgaaaagttctgaccaagataaggagattcatggaggtgccatgcctcaagctacagcagcatcagttgatcctttagatggcataattgaaaagattaagctcttaaccataaacggaccagacaagggtgtgtcagaggtacctaaaaatgctcttgttccttatgaaggtgaatttagtgcactgattgcatttgaggggaaggcaaagaaaagccgtcctcgggccaaagtgaacatcgatccagtcaccactatgatgtggaacttattaatggggccagatatgggtgatgatgccgaagggttagacaaggataaagagaagtggcttgatgaagaaagaagagtgttcagaggacgggttgattcattcattgctcgtatgcatctagttcagggggataggcgtttctctcgatggaaaggatcagtcgtggattcagtcgtgggtgtatttcttacccagaatgtttcagatcatctttctagttctgctttcatggcggttgctgccaaatttcctgttaagatagaggtccctaaaaaacctgtggctgagatgtctcatactcctgaacagaaggatagttgttctggactgtttggtgattctatcaaattgcagggcaatatatacattgaagagataagtgacattaaatcgttaattactacagaagataatgaagaaagtaataataacgaattgattggaaactctgctgggaatggagtaaactgtgcaactggaggatgccatgtctcttatagtaagtcactaactggatcccatggaaatgggctatcaggatctgtttttccaactaccggcttttcaggtgtggtagaaactgaagatggatcactggaggatgttatttcttctcaaaattctgctgtttcttcccagaattccccagattatgttgttcgtagaaccgatccaataggttctagttcgttacaaaatttcactgaagagggctgtattatgagaaatatgtccaatgggactggcatctctactgactatacattgtttctgccaattcaagatccaaaaggcatgctcggattatcagaatattgtggacttaatcctcttccagtttcaggtgtgaacaaggacatgttgcttgatctaaacagatcatatcagccattacatacttatatgccctatgatcagaatagtgagtctgatttcacaggtgtgtcatgtttgaaccatatgggtaaatcattccacacaggccctgataaagtgaatctttccagtgttacacagtctgaggctagtctttaccctattgatcctttagaacaaggcgacttttcaccactaattaaacaaaacttccaaccattacatagttcagacgaagtgccatttttcaaggagcactcttcatgtaatgattttttgaggaacaaaactgaagctcattttctggaaccacttgtctgttcaaatcctcaagaggtgtacacaacctcaacagatcaaatgggtgctgaacaatctcaatcaggatgtggccaaaagtacaatgatgccagagttcagacagcatcacatgaaaggcatcagtcttcaaccttgtgtgataaccagaactcttgttcggtggtgttgcaaggagttgcttcagactcaacacagaagttcgttgatactcaaaaggggccgtcaaaagctcgacaaaatggatcaaaagctaaggtacggggccgacctaaaaagaaaactgatgactgggacagtttacggaaaaaagtgctttctaatggtggggacaaacaaagaagtcatgatgcaagggatactgttgattgggaggcagttaggcaagcagaagtacgggaaatatctgaaaccatcagagagagaggaatgaataatatgctagcagaacggataaaggaattcttgaaccgattggtgacagaccatggaagcattgatcttgaatggctaagagatgttcaaccagacaaagcaaaggacttccttctaagcattagagggcttggactcaaaagtgttgagtgtgttcgcctcttgacactacatcatatggcttttccagtggacacaaatgttggtcggatatgtgtgaggcttggatgggtgccacttcaaccactgccagagtctcttcagttgcacctcttggaaatgtatcccatgctggagcacatacagaagtacctctggcctcgactatgcaaactagatcaacgtacattgttttctgcacaaaaagtaagcctaattgcaattcatgtccaatgagagctgaatgtaagcactttgctagtgcatttgcaagtgctaggcttgctcttcctgcacctgaagaaaaatgtttggttacattggaagatccaaatgttgtagagttttctcaccaaacatacataaactcagggagtgttggccaacttgagtggagtgcaaattatcctaaacatgctgtttctggtaatcatcagccaatcatcgaggaaccactgagcccagaatgtgaaactgaaaatatagaggcacatgagggtgcaattgaggatttcttttgtgaagaatctgatgaaattcctaccattaatcttaatatcgaggagttcacacaaaacttgaaggactatatgcaagcaaacaatgttgagattgaatatgctgacatgtcaaaggcattggttgccatcacgcctgatgctgcttccattccaactccaaagctcaagaatgtcaatcgtctgaggacagaacaccaagtttatgaactgccagattcacaccctcttctggaaggattcgaacagagagaaccagatgatccctgtccatatcttctttccatatggaccccaggtgaaactgcacaatcgatcgatgcccccaagacattctgtgattcaggggagacgggtagactatgtggaagttcaacatgctttagttgcaacaatatacgagaaatgcaggctcagaaagtcagaggaacacttttgataccatgccgaacagcaatgagaggaagcttcccacttaatgggacgtattttcaagttaatgaggtatttgctgaccattgctcaagtcaaaatccaattgatgtcccacgaagttggatttgggacctcccaagacgaactgtttactttggaacctcagttcctacaatattcagaggtttaacgactgaagagatacaacgatgcttttggagaggatttgtttgcgtgaggggctttgataggacagtgagggcaccaaggcccctttatgcaaggttgcattttcctgtcagcaaggttgttagaggcaaaaagcctggagcagcaagagcagaagaataatagtacattgaagaaatataggggtgctaaccagacgaggatggatagcccgaaatgagatgctgacccaataggtcgccaaatcacctccaaattctaacccaatgacttccatctgtaatgaatggcaataccttgaaaacctgtgatggagatgttttgtggcgacatgatctcttaaattagattccgtctttggtaacagcctagctgttcttgttgagtcgcatattctttattctgaagatcaatatagcaaatgggagaaaaaacatagtgcacagtcgagctgttctaattgtacctcttgtgagtggaatcagttgttgtacaacaggaagatggacctatctgtacaatggtcgtacatgttctttgatcatagtataaacaatgtaagcctcatcagccgttatttgattgtttcaaaacaaaggaaaagcattttcaattcatctgttcaaagactatttccttttccccccttctatcttgagatggaaactgactaattttttacttgtggggatctgacagtgaatatatcaaaataatatggaataatttgtctcttctataatgtaatgctggtaggggggaaaaatac

SEQ ID NO: 217347 - DNA, 6693 bp, Zea Mays
ggccccgcctcggcgcgaggtaaaaacacgtgccggggctgccgcctggccgtggcatcgccctggctggcggtgaaacccatcgcattcgcatcgcacgcgcggcgcgccaggggagatcattcacaggggcaaggctaccactggagggggcctacgcagcagtgagaggcttctacagctcgtcgtacccactcctcttttctcactctactactagactggtgtctctctcaccccaaggagagtcgcagcgacccagccttctccctccctctctctcctctctctctcttcttgcgccgcttttccttcgctgctccgcgcggctccggcgggcggtgcgggaggaagaggagggggcggaggggccggaagttttccggccgaggagcccagcgggaggatcgaagaggaggcactggtccggggctgtccactgcatcgggttcttcgaagttggggggaccacgggactcgaagggagcgcccgatctgctccgccggcgaggtgaagtcagctgatatgatgtacctcatttggataacaatttgactggcaccagattttacagaaatatgcaggaggggctagggcaaaggatgcatgtacctcatggtatcaatctgtgtatcgcaacttcttccatgccctttcaggcgcaatctttcattgagcccagtaccggacaagtgaaccctcctgtaacatctgaaaacttatctgctaactcacaagctgttaatgatgctggagcagttgaaggtactgacatgaacgaaaaatcggttcaaaaacctaagaggaaaaaacataggccaaaggtcattaaagaaggacaatcagcaaagctgcagaagcctaaaactcccaagcctcccaaggaaaatgggaatcagcctactggaaaaagaaagtatgtcaggaggaagggactaagtgcaccagctgaacaaattccactatgtgctgatacacacactagagctaaaccaggagtagtccaaagatgtttggactttgatgtggaggaccagcatggacatttggatctggtaccgcaaacccaggaaacagagatacagactggtcctgcggacacacaaccatcaatatctggagttgaaagaagtaatgttcaaatatcataccattggggtggtacaagcagttctattagttcagttgacccaatagctggtatacacggattacaggcagactgcaattctaaaagagtcagttttgatctgaacaattctatagtaagtcagctgccaaccaattattctagtccaatggacagctctgaacaatttttcaattttgatttaagagaagaagttcgaacaaaccagttattgcctcatctaaccagctcggtagatcacacacgacacccctcggtcaattttgaccaatacataagcacatctcaagattgtccagaaaaatcacccagacattatcagatggtcagtagttatagaattctagaaaatatgacaacagcttctcagtataccgaaagggtgtctatggggggcaatttcaaccctgaagcttgtatgggcgaagatgcaataatcaaacaaatggcccaaagctatagacctctagaaagtccatttgtacctcccaatcataatgaaagggatatgatgaacggaaatctgaacgagtttcctgtgaagaatgattacttgaagttttctaccaatagtaactaccaaactggagcaggttttgatcattgttctccagactattcagatgttcttgcaatgggtacaaaaagagaacatgatgctatcagtggccatcagatttctcttggcattgactttattaactcaaatagaacaaggaagttctgtagtgatgaccccctttccactagctctcaaacatcttactgtcctcaatcatgcaaaaggatgaggccagaggatcatagcaatcagctccatggaactatggttcccaagcttcgctgcacagaacatacctttgcctggcagtactgtgaaccaattgggagaaagtaataccttgaggaatggagtgcatcaaattcaaccttgggaaattacatataggctacatgactctagagacaatttttctttaccagggaacacacagttctcgaatggcacagtgaatccatcctcagaaaactatattcagagtaatgctattcatgaacatcaatgcttagaaaacgttgtggctaaggtgccagttttgtctgaaacacaaaatacttccactcaagagggccataaccactgcactgctgctactactgatgagcatatcagaactacaagtgatgaagttgttagatccctcacccgacgtgcaagccaaccaactacaaatgggaactacaatattaaatcttctagagtaactgcagaagcaaactgcactgagaagccaagaaaaaggggtcgtccaagaaaagtagtaaaccccaatggggagccaaaagaaagaggtactaaagggaaacaaaatgttggtcatgcagaacttatatcaccaaaaggttcatgtgctgactttttaaaaactaatggtattacttatgcttctgaatcttccactggaattactcctaggatgtcaactgtggagttgaaaagttctgaccaagataaggagattcatggaggtgccatgcctcaagctacagcagcatcagttgatcctttagatggcataattgaaaagattaagctcttaaccataaacggaccagacaagggtgtgtcagaggtacctaaaaatgctcttgttccttatgaaggtgaatttagtgcactgattgcatttgaggggaaggcaaagaaaagccgtcctcgggccaaagtgaacatcgatccagtcaccactatgatgtggaacttattaatggggccagatatgggtgatgatgccgaagggttagacaaggataaagagaagtggcttgatgaagaaagaagagtgttcagaggacgggttgattcattcattgctcgtatgcatctagttcagggggataggcgtttctctcgatggaaaggatcagtcgtggattcagtcgtgggtgtatttcttacccagaatgtttcagatcatctttctagttctgctttcatggcggttgctgccaaatttcctgttaagatagaggtccctaaaaaacctgtggctgagatgtctcatactcctgaacagaaggatagttgttctggactgtttggtgattctatcaaattgcagggcaatatatacattgaagagataagtgacattaaatcgttaattactacagaagataatgaagaaagtaataataacgaattgattggaaactctgctgggaatggagtaaactgtgcaactggaggatgccatgtctcttatagtaagtcactaactggatcccatggaaatgggctatcaggatctgtttttccaactaccggcttttcaggtgtggtagaaactgaagatggatcactggaggatgttatttcttctcaaaattctgctgtttcttcccagaattccccagattatgttgttcgtagaaccgatccaataggttctagttcgttacaaaatttcactgaagagggctgtattatgagaaatatgtccaatgggactggcatctctactgactatacattgtttctgccaattcaagatccaaaaggcatgctcggattatcagaatattgtggacttaatcctcttccagtttcaggtgtgaacaaggacatgttgcttgatctaaacagatcatatcagccattacatacttatatgccctatgatcagaatagtgagtctgatttcacaggtgtgtcatgtttgaaccatatgggtaaatcattccacacaggccctgataaagtgaatctttccagtgttacacagtctgaggctagtctttaccctattgatcctttagaacaaggcgacttttcaccactaattaaacaaaacttccaaccattacatagttcagacgaagtgccatttttcaaggagcactcttcatgtaatgattttttgaggaacaaaactgaagctcattttctggaaccacttgtctgttcaaatcctcaagaggtgtacacaacctcaacagatcaaatgggtgctgaacaatctcaatcaggatgtggccaaaagtacaatgatgccagagttcagacagcatcacatgaaaggcatcagtcttcaaccttgtgtgataaccagaactcttgttcggtggtgttgcaaggagttgcttcagactcaacacagaagttcgttgatactcaaaaggggccgtcaaaagctcgacaaaatggatcaaaagctaaggtacggggccgacctaaaaagaaaactgatgactgggacagtttacggaaaaaagtgctttctaatggtggggacaaacaaagaagtcatgatgcaagggatactgttgattgggaggcagttaggcaagcagaagtacgggaaatatctgaaaccatcagagagagaggaatgaataatatgctagcagaacggataaaggaattcttgaaccgattggtgacagaccatggaagcattgatcttgaatggctaagagatgttcaaccagacaaagcaaaggacttccttctaagcattagagggcttggactcaaaagtgttgagtgtgttcgcctcttgacactacatcatatggcttttccagtggacacaaatgttggtcggatatgtgtgaggcttggatgggtgccacttcaaccactgccagagtctcttcagttgcacctcttggaaatgtatcccatgctggagcacatacagaagtacctctggcctcgactatgcaaactagatcaacgtacattgtaagattagttcaatcgatacttttcgcactatatttagatggctagattcaatgacgccttccaatatgcaggttttctgcacaaaaagtaagcctaattgcaattcatgtccaatgagagctgaatgtaagcactttgctagtgcatttgcaagtgctaggcttgctcttcctgcacctgaagaaaaatgtttggttacattggaagatccaaatgttgtagagttttctcaccaaacatacataaactcagggagtgttggccaacttgagtggagtgcaaattatcctaaacatgctgtttctggtaatcatcagccaatcatcgaggaaccactgagcccagaatgtgaaactgaaaatatagaggcacatgagggtgcaattgaggatttcttttgtgaagaatctgatgaaattcctaccattaatcttaatatcgaggagttcacacaaaacttgaaggactatatgcaagcaaacaatgttgagattgaatatgctgacatgtcaaaggcattggttgccatcacgcctgatgctgcttccattccaactccaaagctcaagaatgtcaatcgtctgaggacagaacaccaagtttatgaactgccagattcacaccctcttctggaaggattcgaacagagagaaccagatgatccctgtccatatcttctttccatatggaccccaggtgaaactgcacaatcgatcgatgcccccaagacattctgtgattcaggggagacgggtagactatgtggaagttcaacatgctttagttgcaacaatatacgagaaatgcaggctcagaaagtcagaggaacacttttgataccatgccgaacagcaatgagaggaagcttcccacttaatgggacgtattttcaagttaatgaggtatttgctgaccattgctcaagtcaaaatccaattgatgtcccacgaagttggatttgggacctcccaagacgaactgtttactttggaacctcagttcctacaatattcagaggtttaacgactgaagagatacaacgatgcttttggagaggatttgtttgcgtgaggggctttgataggacagtgagggcaccaaggcccctttatgcaaggttgcattttcctgtcagcaaggttgttagaggcaaaaagcctggagcagcaagagcagaagaataatagtacattgaagaaatataggggtgctaaccagacgaggatggatagcccgaaatgagatgctgacccaataggtcgccaaatcacctccaaattctaacccaatgacttccatctgtaatgaatggcaataccttgaaaacctgtgatggagatgttttgtggcgacatgatctcttaaattagattccgtctttggtaacagcctagctgttcttgttgagtcgcatattctttattctgaagatcaatatagcaaatgggagaaaaaacatagtgcacagtcgagctgttctaattgtacctcttgtgagtggaatcagttgttgtacaacaggaagatggacctatctgtacaatggtcgtacatgttctttgatcatagtataaacaatgtaagcctcatcagccgttatttgattgtttcaaaacaaaggaaaagcattttcaattcatctgttcaaagactatttccttttccccccttctatcttgagatggaaactgactaattttttacttgtggggatctgacagtgaatatatcaaaataatatggaataatttgtctcttctataatgtaatgctggtaggggggaaaaatac

SEQ ID NO: 217348 - DNA, 6582 bp, Zea Mays
gtctgggcaactggcgtcgcgatcttataccacttgtgcacccgcagctctctccttccatcccctcgcccgccgtctcgtcactcgctacaccccaaaaacctcgccggcggccggcgagagccccgtgccaatataacgactgttccacgcttccgtcaccgccgcgtcggggccggcgatccaacacaggtgaagtcagctgatatgatgtacctcatttggataacaatttgactggcaccagattttacagaaatatgcaggaggggctagggcaaaggatgcatgtacctcatggtatcaatctgtgtatcgcaacttcttccatgccctttcaggcgcaatctttcattgagcccagtaccggacaagtgaaccctcctgtaacatctgaaaacttatctgctaactcacaagctgttaatgatgctggagcagttgaaggtactgacatgaacgaaaaatcggttcaaaaacctaagaggaaaaaacataggccaaaggtcattaaagaaggacaatcagcaaagctgcagaagcctaaaactcccaagcctcccaaggaaaatgggaatcagcctactggaaaaagaaagtatgtcaggaggaagggactaagtgcaccagctgaacaaattccactatgtgctgatacacacactagagctaaaccaggagtagtccaaagatgtttggactttgatgtggaggaccagcatggacatttggatctggtaccgcaaacccaggaaacagagatacagactggtcctgcggacacacaaccatcaatatctggagttgaaagaagtaatgttcaaatatcataccattggggtggtacaagcagttctattagttcagttgacccaatagctggtatacacggattacaggcagactgcaattctaaaagagtcagttttgatctgaacaattctatagtaagtcagctgccaaccaattattctagtccaatggacagctctgaacaatttttcaattttgatttaagagaagaagttcgaacaaaccagttattgcctcatctaaccagctcggtagatcacacacgacacccctcggtcaattttgaccaatacataagcacatctcaagattgtccagaaaaatcacccagacattatcagatggtcagtagttatagaattctagaaaatatgacaacagcttctcagtataccgaaagggtgtctatggggggcaatttcaaccctgaagcttgtatgggcgaagatgcaataatcaaacaaatggcccaaagctatagacctctagaaagtccatttgtacctcccaatcataatgaaagggatatgatgaacggaaatctgaacgagtttcctgtgaagaatgattacttgaagttttctaccaatagtaactaccaaactggagcaggttttgatcattgttctccagactattcagatgttcttgcaatgggtacaaaaagagaacatgatgctatcagtggccatcagatttctcttggcattgactttattaactcaaatagaacaaggaagttctgtagtgatgaccccctttccactagctctcaaacatcttactgtcctcaatcatgcaaaaggatgaggccagaggatcatagcaatcagctccatggaactatgggtaagctttcttccgcatcagcattttctgatggtttgaacacaaataaagtttcagctatgaaccctagaattggtaccttggctgacgtacaattgttgatggcccttgagaaatcaaaagcttcacaacaaatgtttgagtttgactatgttacgtcacaaaataacatgatccatgaacgtactgggcttgctctgcaaaatattgctgacaaaggatttattgctctacctaataaacagttcccaagcttcgctgcacagaacatacctttgcctggcagtactgtgaaccaattgggagaaagtaataccttgaggaatggagtgcatcaaattcaaccttgggaaattacatataggctacatgactctagagacaatttttctttaccagggaacacacagttctcgaatggcacagtgaatccatcctcagaaaactatattcagagtaatgctattcatgaacatcaatgcttagaaaacgttgtggctaaggtgccagttttgtctgaaacacaaaatacttccactcaagagggccataaccactgcactgctgctactactgatgagcatatcagaactacaagtgatgaagttgttagatccctcacccgacgtgcaagccaaccaactacaaatgggaactacaatattaaatcttctagagtaactgcagaagcaaactgcactgagaagccaagaaaaaggggtcgtccaagaaaagtagtaaaccccaatggggagccaaaagaaagaggtactaaagggaaacaaaatgttggtcatgcagaacttatatcaccaaaaggttcatgtgctgactttttaaaaactaatggtattacttatgcttctgaatcttccactggaattactcctaggatgtcaactgtggagttgaaaagttctgaccaagataaggagattcatggaggtgccatgcctcaagctacagcagcatcagttgatcctttagatggcataattgaaaagattaagctcttaaccataaacggaccagacaagggtgtgtcagaggtacctaaaaatgctcttgttccttatgaaggtgaatttagtgcactgattgcatttgaggggaaggcaaagaaaagccgtcctcgggccaaagtgaacatcgatccagtcaccactatgatgtggaacttattaatggggccagatatgggtgatgatgccgaagggttagacaaggataaagagaagtggcttgatgaagaaagaagagtgttcagaggacgggttgattcattcattgctcgtatgcatctagttcagggggataggcgtttctctcgatggaaaggatcagtcgtggattcagtcgtgggtgtatttcttacccagaatgtttcagatcatctttctagttctgctttcatggcggttgctgccaaatttcctgttaagatagaggtccctaaaaaacctgtggctgagatgtctcatactcctgaacagaaggatagttgttctggactgtttggtgattctatcaaattgcagggcaatatatacattgaagagataagtgacattaaatcgttaattactacagaagataatgaagaaagtaataataacgaattgattggaaactctgctgggaatggagtaaactgtgcaactggaggatgccatgtctcttatagtaagtcactaactggatcccatggaaatgggctatcaggatctgtttttccaactaccggcttttcaggtgtggtagaaactgaagatggatcactggaggatgttatttcttctcaaaattctgctgtttcttcccagaattccccagattatgttgttcgtagaaccgatccaataggttctagttcgttacaaaatttcactgaagagggctgtattatgagaaatatgtccaatgggactggcatctctactgactatacattgtttctgccaattcaagatccaaaaggcatgctcggattatcagaatattgtggacttaatcctcttccagtttcaggtgtgaacaaggacatgttgcttgatctaaacagatcatatcagccattacatacttatatgccctatgatcagaatagtgagtctgatttcacaggtgtgtcatgtttgaaccatatgggtaaatcattccacacaggccctgataaagtgaatctttccagtgttacacagtctgaggctagtctttaccctattgatcctttagaacaaggcgacttttcaccactaattaaacaaaacttccaaccattacatagttcagacgaagtgccatttttcaaggagcactcttcatgtaatgattttttgaggaacaaaactgaagctcattttctggaaccacttgtctgttcaaatcctcaagaggtgtacacaacctcaacagatcaaatgggtgctgaacaatctcaatcaggatgtggccaaaagtacaatgatgccagagttcagacagcatcacatgaaaggcatcagtcttcaaccttgtgtgataaccagaactcttgttcggtggtgttgcaaggagttgcttcagactcaacacagaagttcgttgatactcaaaaggggccgtcaaaagctcgacaaaatggatcaaaagctaaggtacggggccgacctaaaaagaaaactgatgactgggacagtttacggaaaaaagtgctttctaatggtggggacaaacaaagaagtcatgatgcaagggatactgttgattgggaggcagttaggcaagcagaagtacgggaaatatctgaaaccatcagagagagaggaatgaataatatgctagcagaacggataaaggaattcttgaaccgattggtgacagaccatggaagcattgatcttgaatggctaagagatgttcaaccagacaaagcaaaggacttccttctaagcattagagggcttggactcaaaagtgttgagtgtgttcgcctcttgacactacatcatatggcttttccagtggacacaaatgttggtcggatatgtgtgaggcttggatgggtgccacttcaaccactgccagagtctcttcagttgcacctcttggaaatgtatcccatgctggagcacatacagaagtacctctggcctcgactatgcaaactagatcaacgtacattgtatgagcttcactaccaaatgattacttttggaaaggttttctgcacaaaaagtaagcctaattgcaattcatgtccaatgagagctgaatgtaagcactttgctagtgcatttgcaagtgctaggcttgctcttcctgcacctgaagaaaaatgtttggttacattggaagatccaaatgttgtagagttttctcaccaaacatacataaactcagggagtgttggccaacttgagtggagtgcaaattatcctaaacatgctgtttctggtaatcatcagccaatcatcgaggaaccactgagcccagaatgtgaaactgaaaatatagaggcacatgagggtgcaattgaggatttcttttgtgaagaatctgatgaaattcctaccattaatcttaatatcgaggagttcacacaaaacttgaaggactatatgcaagcaaacaatgttgagattgaatatgctgacatgtcaaaggcattggttgccatcacgcctgatgctgcttccattccaactccaaagctcaagaatgtcaatcgtctgaggacagaacaccaagtttatgaactgccagattcacaccctcttctggaaggattcgaacagagagaaccagatgatccctgtccatatcttctttccatatggaccccaggtgaaactgcacaatcgatcgatgcccccaagacattctgtgattcaggggagacgggtagactatgtggaagttcaacatgctttagttgcaacaatatacgagaaatgcaggctcagaaagtcagaggaacacttttgataccatgccgaacagcaatgagaggaagcttcccacttaatgggacgtattttcaagttaatgaggtatttgctgaccattgctcaagtcaaaatccaattgatgtcccacgaagttggatttgggacctcccaagacgaactgtttactttggaacctcagttcctacaatattcagaggtttaacgactgaagagatacaacgatgcttttggagaggatttgtttgcgtgaggggctttgataggacagtgagggcaccaaggcccctttatgcaaggttgcattttcctgtcagcaaggttgttagaggcaaaaagcctggagcagcaagagcagaagaataatagtacattgaagaaatataggggtgctaaccagacgaggatggatagcccgaaatgagatgctgacccaataggtcgccaaatcacctccaaattctaacccaatgacttccatctgtaatgaatggcaataccttgaaaacctgtgatggagatgttttgtggcgacatgatctcttaaattagattccgtctttggtaacagcctagctgttcttgttgagtcgcatattctttattctgaagatcaatatagcaaatgggagaaaaaacatagtgcacagtcgagctgttctaattgtacctcttgtgagtggaatcagttgttgtacaacaggaagatggacctatctgtacaatggtcgtacatgttctttgatcatagtataaacaatgtaagcctcatcagccgttatttgattgtttcaaaacaaaggaaaagcattttcaattcatctgttcaaagactatttccttttccccccttctatcttgagatggaaactgactaattttttacttgtggggatctgacagtgaatatatcaaaataatatggaataatttgtctcttctataatgtaatgctggtaggggggaaaaatac

SEQ ID NO: 217349 - DNA, 3095 bp, Zea Mays
tcgttctgacagcatgcctgaaccaccaggctcctcgctgacccctccgcttccttcccgccaagcgaaagcgccacccgcgctgcccctgccccccttgacgccttcctccgatcctcaacaggatacacccctcgcaacagaaaccccctccgccgaggcccgccgaccaaacttctgccagtaccgcttgcaccttacctgccaagctgcgtactgacggaacgccttgagcgagagcgaggttgcgctccactccactccactcgccagttcagttcttgcttcctgctcctgtcgtggtgccctgagtccctgactgcgaggagctagctatgcatccccgcggtggccgacgaactgcgtagcctgatcaaacagctgaataatctggggaagcaagcgtcaaggtaacaatgactgaaatgggagaagctctgagaacctgcatggagcggctggtggttgccagagaagagcgggagcagatcatcgtcgaggcggccaacgagatatcctccaagaagaagaaagtgcgcgagctccagctgaagctggaggacgcgaacaagaagatcgcgaagctcgccgccgagaacagcaacctctgcaaggccgctgacgtcaaggacgcgctgatcggggagctgagggagtccgcagcggccactggggacaagctcgccgacgcgacggcgaggctagagtcggcgcagaaacaagccgggtcgttggagtacgaggtgcgcatgctccagaaggagctggaggtccggggccaggagcgggagtacgacctcaagtccgtcgacgccgcgcgccggcagcaggcggagcaccagaagcggatcgcgcagctggaggctgagtgccagcggctgcgcgccatggtccgcaagaggcttcccgggccggcagcgatcgccaagatgagggacgaggtcgatcagcagcaggcccagacccccacagccagcccgaggcgaccccgtcccgcgacgccctcctcgccgcggtcggccgtcgcgccgttctcgccgcggaccccgtcgccgcggcgatccgtctcgggcggcgccgacggctacgcgttcaggctccgcgccgtggaggacgagaacacggcgctgaagcaggcgctggccaagagggagagcgagctgcagttcatgcagatgaagtacgccgacgaggcctgcaagctgacggcggctcagatgcaggtcaaggagctgacggaggagaacaggcagctgagtgacgccaacactcagtctgaatcctgggcttctgctctggtttctgaactggacaagttcaggtcaggcaacgagaacggtggtgcctgtgcgtccatcatggcatcatctgagatgaacctgctccatgatttctctgaggttgagaagctggagacggcgtcaggtgatcaaaagcgcaacgtgcagcgtgcatctccgcacaaggcggatacaggactggcaacggaagaacagaatggtaatgctcctgtcctggatggtagcgtctccaacggccatcctgagaaggttaggcatatctgggaattagttgtgcagaagcatgaagcgagcggggaaagctttgaagctattattgaacagataagccaggcattggagcagacagctactcgtgccaagagagatggttcggacgtgccaagtgaccagtctgaaatagagaaggcggtgagagatatggttgagcagaccacttccatgatccaggcggcatatgcagaagaagacgacgtcgcaagatcaagagcgctgtcgcaccacaagtctgagatgtttcgccgcttcaagcgcctggttcaggtccgtcatgagctactggaagggaaatgcgaccttggaaagtttgtagacgaggtctgcctcatcctaaagtacgtagtgagccaatgcttctcggatcaagatcagatcgacactgtgagccgtgatacagaggattttgatggagctaagccatcaggtgcggttacagcagacggtacgcatgacactgaaagcgctaaaccaacagcgacttcagcttttcggacagaagcagatggagaaccagttcagtcagttgaaagccagactacggcggccaatcgtctgcagaaacctgatatagaactcatacatgccctacaacacgaggatggtagtagtatcctttcagagagaaaatcggcggcataccgtgagatgcaaagccctgcttctgaggcaagtgtggaacgtcgggcagtgcaagaggaaaatcatttagcaacaaactcagagattctcgcagcggctgataagctcgccgagtgccaggagacgatcacgatgctgagcaagcagctgcaggctctaaagacgccggcaactccaggtcctctagacgcctcctccgcctgcatccccaggacgagctcggcgaagtccgactacaagccgcagtcgctcgcgagcatcctcgccgaggcctccacgtctcccagtcccactcccaccacgcccacgccacaggtgctgtccaaggaagacgaaggcgaggttcgtgctactgctacgccgacgacgaggagcgcagcacggcaggaggagaacgacgccggcggcaataattcgatgcagattgtcgtcgtccatgccgagccgcggccggacgacggtggttccgctgacccgacgaagaggaggaagaagcgcggcacgagcctgctgggcaggatcgtgttcaggaagagagccgaaggcggctcctagaccgactgcggtgacctgcatcgatgcggtggatgcgttctgctgcctacaggtttggcatggatccggccaagtgtgctgtcacgttgtgaccagtggtttttttccccttcttcagcgtgttctgtttatgctgctcccagtgagcgagcgatctttttgggcgacatatgttccggtcttgcagagccttgtggctgatggcgacgggttctgtcgcatggtgtgagctacgtgtcttcttttgtttatggacagacttttctctgtgtatttatgaacatcttggctgtgcaaaaatgtttatttattggaagggga

SEQ ID NO: 217350 - DNA, 3043 bp, Zea Mays
caacgccagccgcgggcgtcgcgcccagccacccgcccgtgaaccaccaccagcatagcctggccatggcaaccgcaccgcatgaaaggaaccacacccatcccctccctattttgccatgccactccccgccaccgaccctacctcccccggccctcttctcttccccgggccccccacggctcggcctgacgccaccacgattttctccgcacggcgcaccctcgccgcgtctccgctccacccaccacgttgcggcaagggtgcggcctacgacgcggagtaggaagaggagggagaaagggaggccgtgacgccggctggctatgctgcagcgtgcggctagcaacgcctactcctggtggtgggcatcacacatccgcaccacccagtccaagtggcttgaaataactgtcgttgagatggaggacagagtaaaggccatgctcaacctcattggggccgatggcgattcgttcagcaagaaggcagagctctatttcaaaagccggccagagctcatcaatcacgtggaggagatgttcagatcctatcaggcccttgccgacagatatgaccggatatccagtgagctgcacaaggccaaccacaccattgccaccgtgtttccggatcaggtgcagttctcaatggaagagggggatagtgaggggttttctaaggcaataggtgggattgatctcagcaacttcaagttccctgcactggaaggcttgtccgtgggctcaggctcacagagcgcaaacaggggcaccagtccggtccccaagaggggggcccaggcacaccggaaggtcacccccaacatgaccaaggagaaggcacaggaggagatagacaagctgcagaaacagatcctggcattacagactgagaaagagttcttgaagacctcttacgacagcgcactaggaaagtatctagacattgagaaacaggtggcccaattgcaggatgaggtctgcaatttgcaggatgctttcagcaccggtgtagccattgaagacaatgaagctcgggcattgatggctgcacaagccattatgtcatgtgaggatacgttggtgaatttacaggaccagaaaaacaaattgactgaagaggcggaggtggagctccgacgagccaatgaggcaattgaaaagctgaaaaccttcaagaacgaatgtggactgcctcatgtgcaaatggatgggcatgatcaccatgaaatagaactggtccatgcactgcccttcgaggattctgatgattctgcgctgaatggaagcaggcttgacctccaggaaatatgtcaaagagtcaaagaaataattgaatcttaccctgagctatcagttgcggaattagcagataaagttgaccgacttgtggaaaaggtgatcagccttgaacttgccactacttcacagaatgctcagatcgatagaatgaagactgagatagatggccttcacgagcgcctgcatgctttggagcaagacaaggtggctttggttgttgattctagtaacttggctgacgggttgaggaaagttgaagaaatgctgcaagaagtacaacaaatttggaagtccgtacaaaatggtttcgagaacatttgtaaacaaatgactgaagccgcccatgaactaactgaattcgtcgaaacattacatgctcctgagcaagaaagcagtgacttcgtggattcatcgcgagactccaaacacgatacttctctggaagattactcgggactaacaagtctgtctgtgcaaaacgagccatccaaatctttacatgacactacaaatgaaactgataaacatgaagaaaccttagaagatcaagcccaaaaagagctagttccaaaagaatctgaagttgagggtaagattctattagaagactatgcatctgtacttcagagctacaaagatacagagcagaagctttcagaaattgagaagataaataaagattaccatcttgaggcaatgtcagaactgaaggaacttaagagtgccaatgcaacaaaagatgaggagatccactcgcttaggcgcatgctacgttctttgcggaaaaagatgagtgcttctattattgagagtatagagaaggcagaagaaacatccaagataagcagcagtcctactacagaagacatagagattgccaagtcagaagaaacatccaagataagcgccactccaagtacagaagacaaagagattgctgagatagaggaatacattaagcaatggcaaattaatgactcactggcttcttcggttgcagaggagaaatttagagcagaaattgatagggtattaggggagaacttggacttctggttgagatttagcacatcatatcatcaaatacggaatttccaaatatgctttgacatgttgaaaactgagatgtacagattgactgatgaacaggaagacgggggaaattacggctttgctggtagttatcaggtagcaaagctggaatcagcagtactagaaaagaaattcagggatctaaatacagatcttcaagtttggattgaaaagaacgtgctattgaaaggagaggtagaaaacagattttcgtcactatgctgcatacaagaagatatatcaaagatcacaactctggataaatgtgatgaaattcacttcaacccttttcaagctgcaaaattccaaggagaggtgcttaatatgaaacaagagaacaacaaagttgctaaggagctagaagctgggctggatcatgtaagaggtctccaagtggaggttggaagggtgctcttgaagctcagagagaatctcgaggtaatacaatcttgtagaagcataatggtcccaacagcaatcttactttcagattgcattgcatttctgtgcatggcgtcgatagaatggcaagatgcaagtggtgttggttccaatttcttttgagtttttatgattttatctatgtctactaacagatttgatttaattttacacttggttattgtaataaggtaaagtttctccac

SEQ ID NO: 217351 - DNA, 3085 bp, Zea Mays
gccactccccgccaccgaccctacctcccccggccctcttctcttccccgggccccccacggctcggcctgacgccaccacgattttctccgcacggcgcaccctcgccgcgtctccgctccacccaccacgttgcggcaagggtgcggcctacgacgcggagtaggaagaggagggagaaagggaggccgtgacgccggctggctatgctgcagcgtgcggctagcaacgcctactcctggtggtgggcatcacacatccgcaccacccagtccaagtggcttgaaataactgtcgttgagatggaggacagagtaaaggccatgctcaacctcattggggccgatggcgattcgttcagcaagaaggcagagctctatttcaaaagccggccagagctcatcaatcacgtggaggagatgttcagatcctatcaggcccttgccgacagatatgaccggatatccagtgagctgcacaaggccaaccacaccattgccaccgtgtttccggatcaggtgcagttctcaatggaagagggggatagtgaggggttttctaaggcaataggtgggattgatctcagcaacttcaagttccctgcactggaaggcttgtccgtgggctcaggctcacagagcgcaaacaggggcaccagtccggtccccaagaggggggcccaggcacaccggaaggtcacccccaacatgaccaaggagaaggcacaggaggagatagacaagctgcagaaacagatcctggcattacagactgagaaagagttcttgaagacctcttacgacagcgcactaggaaagtatctagacattgagaaacaggtggcccaattgcaggatgaggtctgcaatttgcaggatgctttcagcaccggtgtagccattgaagacaatgaagctcgggcattgatggctgcacaagccattatgtcatgtgaggatacgttggtgaatttacaggaccagaaaaacaaattgactgaagaggcggaggtggagctccgacgagccaatgaggcaattgaaaagctgaaaaccttcaagaacgaatgtggactgcctcatgtgcaaatggatgggcatgatcaccatgaaatagaactggtccatgcactgcccttcgaggattctgatgattctgcgctgaatggaagcaggcttgacctccaggaaatatgtcaaagagtcaaagaaataattgaatcttaccctgagctatcagttgcggaattagcagataaagttgaccgacttgtggaaaaggtgatcagccttgaacttgccactacttcacagaatgctcagatcgatagaatgaagactgagatagatggccttcacgagcgcctgcatgctttggagcaagacaaggtggctttggttgttgattctagtaacttggctgacgggttgaggaaagttgaagaaatgctgcaagaagtacaacaaatttggaagtccgtacaaaatggtttcgagaacatttgtaaacaaatgactgaagccgcccatgaactaactgaattcgtcgaaacattacatgctcctgagcaagaaagcagtgacttcgtggattcatcgcgagactccaaacacgatacttctctggaagattactcgggactaacaagtctgtctgtgcaaaacgagccatccaaatctttacatgacactacaaatgaaactgataaacatgaagaaaccttagaagatcaagcccaaaaagagctagttccaaaagaatctgaagttgagggtaagattctattagaagactatgcatctgtacttcagagctacaaagatacagagcagaagctttcagaaattgagaagataaataaagattaccatcttgaggcaatgtcagaactgaaggaacttaagagtgccaatgcaacaaaagatgaggagatccactcgcttaggcgcatgctacgttctttgcggaaaaagatgagtgcttctattattgagagtatagagaaggcagaagaaacatccaagataagcagcagtcctactacagaagacatagagattgccaagtcagaagaaacatccaagataagcgccactccaagtacagaagacaaagagattgctgagatagaggaatacattaagcaatggcaaattaatgactcactggcttcttcggttgcagaggagaaatttagagcagaaattgatagggtattaggggagaacttggacttctggttgagatttagcacatcatatcatcaaatacggaatttccaaatatgctttgacatgttgaaaactgagatgtacagattgactgatgaacaggaagacgggggaaattacggctttgctggtagttatcaggtagcaaagctggaatcagcagtactagaaaagaaattcagggatctaaatacagatcttcaagtttggattgaaaagaacgtgctattgaaaggagaggtagaaaacagattttcgtcactatgctgcatacaagaagatatatcaaagatcacaactctggataaatgtgatgaaattcacttcaacccttttcaagctgcaaaattccaaggagaggtgcttaatatgaaacaagagaacaacaaagttgctaaggagctagaagctgggctggatcatgtaagaggtctccaagtggaggttggaagggtgctcttgaagctcagagagaatctcgaggtatctctagaaagaagccatcgagcccaacaaaacttccggaacctgtcaacaaaagctggaattccccttagaacttttctgtttggctcaaagacaaggaaatcatcattcttttcgtgcatgagtcctggggtgcataagtaacacagtggttcaaaggtaatacaatcttgtagaagcataatggtcccaacagcaatcttactttcagattgcattgcatttctgtgcatggcgtcgatagaatggcaagatgcaagtggtgttggttccaatttcttttgagtttttatgattttatctatgtctactaacagatttgatttaattttacacttggttattgtaataaggtaaagtttctccac

SEQ ID NO: 217352 - DNA, 1202 bp, Zea Mays
ttattttgtatccgttttacataaaaaaaatagttgagttgtgacgcggcggaccgctcggatccaccccacgtacgcgcccatcgagccgctcgcaaccctaatctgaaccgccgtcattgtctccagatcgccatccgccctcatcccctcacgcccaaactaaaccctagtagatcgccgtcgtcccctcccgaatcgccatccgtgtattcctccccaccgcaagaccttcctctccctcccatctaccgatccattcctcccctccgccttccagccacaagagctccacctccacccgggctcgccgccggcggaggaccacatctgggagatgcaaagtggagcacgctgcgccactcaacatcgagatccgcttcttgggtcgacccttcgacagcgcccccctggcagacccgggcaacaacattgtgcttcgtggtgctgcagtggccgctggagacccgtcgacggggagccccccaagaccctctatcagctccaccgatgccatgagagcgcaagaaggctgaccccctatggctgcgaatagggccatggttgctgctggcactcgagcaagccgacgccgactatgaccatgtccccatgagtcaacagactggtgactacgccgctgggagcacctcgccaggaacatgcatacctccctcccgtgtctccttcaacccgccatgaatttcttggtttcactcgctggctgatcgactaacagagaaaaaattgcagcagggcagtggagttgaggctccgtgcctctgccatgcttgtatgtaggtgtagatcctatatctctgataatagcacatattgcagctttggaatgtttgccaccggagggtgtgatagatttgtgaatgtgtgggatgacattaataagaaaatactatatcaagtaaagcaattgaagagttttgcttcattgggatgcttcattggaaaatacattaacacgcctcttattgaagaacacagctgcggcgagctgggatggatcaagcacttgggtgagagttcttcgcgcagggctggagtgctacttccagtattgcttgcagctcgaggagttgatgagatgcaacggcggaatgccaagttggggtgagggctatgctggtcaggaacatgatgcaaattagggtgtcccttcattctataagaaatggaattgagggtat

SEQ ID NO: 217353 - DNA, 1649 bp, Zea Mays
cgccgagaaaactcaaatcgaatccccaaatccttcgccggcgattccactccaagtctcgatcggaaaagcgcagaagagcaacggaatcccaattcccaaagggacaagatggaatcatcaagaatggaagggaaatcctatttcaggcttttaactgggaatccaataagcacaactggtggagtattttggaggaaaaagtaaccgatcttgcggaatctgggtttacgtcagtgtggcttcctcctccaacacagtcattatctcgagaaggctatctaccacagaatctgtactgccttgactcatgttatggttccctccatgagctaaaattgttgcttcataaaatgagcgaacataatgtaagggctatggcagatgttgttatcaaccatcgaattggaactactcaaggatccaatggcatgtataatcgttatgatggcatcccagtatcatgggatgaacatgctgttacatcttgttctggcgggaagggaaacaagagcactggggataactttgatggggttcccaatatagatcatacacaaccatttgtacgcaaagatattatcgaatggttgatctggcttcgaaaatcagttggttttcaagattttcgctttgatttcacgaaaggttatgcagccaagtttgtaaaagaatacattgaggaatcaaaacctctttttgcagttggggaatactgggatagctgtgaatatagcccccctgactaccgactgaactataatcaagacgttttggtttctttttgtctgccagatatccataggcagaggattattaattggatagataacactggaggactttgtgccgcatttgatttcacgacaaagggcattcttcaggaagctgtcaaaggagagttgtggcgtttgcgagattcagaaggaaaaccacctggtgtgatgggatggtggccttcaagatcagttacatttattgaaaatcatgacactgggtccactcagggtcattggccttttccgtcagatcatattatggagggatatgcttatatactcacccaccctggcatccccacggtgttctatgatcacttctatgaccagggtgtgcctctccatgacgaaattgctaaactgatgcaaatcagaaaatgccaagatatacatagccgttcatcaatcaaaattctggaggttgggtcagatctgtactcagcaatcatcgacgataagttgtgcatgaagatcggggacggctcgtggtgcccaagtgatccagagtggaggctggcagtctctggtgacagatatgctgtgtggcacaagtgaagcatataagtgccctcgatacagtttatttctgctctcaggaacaggagtaattagcatgttagctgaataacagcacggtaaaacatgccaaaaatgaccctcttcgaggttttacctgtacaagaggagtgcctaaatgcaatgcttaattagaaatacgtgagatcgtgcggctggtcccgaggtgagacatacattttgctaatcgcaacaactatggattacctgcaaaagaaatatatatagggcatgtgatgtctctgtggaatattttatcctggaaccagaaatttgaattatttttataaaaaa

SEQ ID NO: 217354 - DNA, 1622 bp, Zea Mays
cgccgagaaaactcaaatcgaatccccaaatccttcgccggcgattccactccaagtctcgatcggaaaagcgcagaagagcaacggaatcccaattcccaaagggacaagatggaatcatcaagaatggaagggaaatcctatttcaggcttttaactgggaatccaataagcacaactggtggagtattttggaggaaaaagtaaccgatcttgcggaatctgggtttacgtcagtgtggcttcctcctccaacacagtcattatctcgagaaggctatctaccacagaatctgtactgccttgactcatgttatggttccctccatgagctaaaattgttgcttcataaaatgagcgaacataatgtaagggctatggcagatgttgttatcaaccatcgaattggaactactcaaggatccaatggcatgtataatcgttatgatggcatcccagtatcatgggatgaacatgctgttacatcttgttctggcgggaagggaaacaagagcactggggataactttgatggggttcccaatatagatcatacacaaccatttgtacgcaaagatattatcgaatggttgatctggcttcgaaaatcagttggttttcaagattttcgctttgatttcacgaaaggttatgcagccaagtttgtaaaagaatacattgaggaatcaaaacctctttttgcagttggggaatactgggatagctgtgaatatagcccccctgactaccgactgaactataatcaagatatccataggcagaggattattaattggatagataacactggaggactttgtgccgcatttgatttcacgacaaagggcattcttcaggaagctgtcaaaggagagttgtggcgtttgcgagattcagaaggaaaaccacctggtgtgatgggatggtggccttcaagatcagttacatttattgaaaatcatgacactgggtccactcagggtcattggccttttccgtcagatcatattatggagggatatgcttatatactcacccaccctggcatccccacggtgttctatgatcacttctatgaccagggtgtgcctctccatgacgaaattgctaaactgatgcaaatcagaaaatgccaagatatacatagccgttcatcaatcaaaattctggaggttgggtcagatctgtactcagcaatcatcgacgataagttgtgcatgaagatcggggacggctcgtggtgcccaagtgatccagagtggaggctggcagtctctggtgacagatatgctgtgtggcacaagtgaagcatataagtgccctcgatacagtttatttctgctctcaggaacaggagtaattagcatgttagctgaataacagcacggtaaaacatgccaaaaatgaccctcttcgaggttttacctgtacaagaggagtgcctaaatgcaatgcttaattagaaatacgtgagatcgtgcggctggtcccgaggtgagacatacattttgctaatcgcaacaactatggattacctgcaaaagaaatatatatagggcatgtgatgtctctgtggaatattttatcctggaaccagaaatttgaattatttttataaaaaa

SEQ ID NO: 217355 - DNA, 2139 bp, Zea Mays
cgcgactccatccgtgccaccatcaacggacgcctccgccccatccgcgccccttccaatccgagccaaatctgtgggggagcatcttcggtgccgagaggggagcgttcttcaatcccatccattggcaaatccgttgggagtatacccaatgcacccacccttgtgggagcatccgagccaaatccgtgggggagcatacccaatgcacccacccgtggctgctctacgctgatatgagtccgcgccaaatcctacaaatccgagccaaatctgcccttccaccttcagtgtctcccttccttacgccgcgaggtgaacgagatcccctaccatcgagaaaccccctatatatcaaggccaccacaccagcgtgatcctccttgggtgcatcaggcgcaacaaggcattgaggtgtgtttcagggcaaggcgcaacaagtgacgccctcgctggagttcctctccttcccgctactcctctggcgtccacaccccaatggtgcacgttctgccgctgccgcggccgcaccccgccccgcatcccgcaattcttggtcaggagatctcttgaaagaaagaagatccacttcctgcttctttggattctgcgtctgcagaatgaaagccgatctgatgctgagaagatcttcaatgagttcaatgcacgaaaacccgaggaaaagaatgtcttcaaaggggtcacgaagaatcacctgttcatgggaataatcggtataacgatagtatttcaggtaacagacgaaattgtgagttattatttgtacaatcatgtcgcagtgttgcctggataaaaatgttagaagtgcaggtcctgcgtattttgctaatgttgctattaagatcaatgccaagtttggaggaagaaacttagaatttgctaatcccaaagaaagcttgccgggtgttacaattgaaccaacaattatatttggtgctgatgttactcaccctgccgctctagatgataccgccccttccattgcttctgttgttgcctcccaagactggcccaaggtggctaactataatgggattgtccgtgcacaaggtcatcgtaaagagctcatcaatggcctggaagacattgtcaaggaactcctacttgcattcgaggagaggtctaagcggagacccaagcagctgatcttccaattgcacccatatatacatgcaattgttttcatgtttcaatgaaaaatcaaacattaattcgtgttcgtgcttcctggttgtaatgtttctttctttttcttcttcttgcaaccttaatttcaacttcttatagttagaacttttctgtcatgttcctcttgtcggaaactctgaatgatgtggcatgtaaatcctcaacgttaaccacgagaagttattatattacccctatttgaatgcaattcgtatttgcagcactaaaattttatcttccaaacattcaactttgattaaatatacaatacgtaattagtattattcaatatatctttggatctattttcaataaatttatttaaaaatataaatatcactaatatttcttataggatgaggtcctttataccatcgtccctgctagcgagacaggaggtcccagtggagcggctaaagccgagggtcgaggcacaggagagagggaactaggctctcaagtaaaagtacccgatcggactaaacccccaagagaaggtgaagctggagaaggagcacatgtggctattcatggacgacagcatcaaggacctcgccaacatttccatggagtagatcaacgccaccgagctcaccaagaacgatgtcgacatccggttcaagtgtacatccactctgcgcctgctgcaatgctgatttaattgttgctcttaacacaaccatttgcgattcagattttgacaactctgatatttagtccttgatgcactattagatgactgtgccgtggtatttgagatatgtgagcctcatgatgcagtatagttgcaggaacctactaacacagcttcacttctaactccctctcactgtatttccctttctttgtagctatagccttttaccaaacttgtcactcattggaaatttggcctacaacatgaataacttgggttcaagtgaggccttg

SEQ ID NO: 217356 - DNA, 2070 bp, Zea Mays
cgcaagagcacacagtacaacaacccgcggtttgcagtggcgctcgccgcttaggagcctggtgcctggagccgctcagccgccgccggtggaatctatagagtccagcgtggagagtgccttacacctgaacaccaagtgggcctaatgggtcaactgccggctgtgatggactaaattagttatttttttatttaaacaggttttattagagagagggtagctccgcccctggtcctcgagatccatgcatttgagttttaagttcttatcttatgttttctctttatttaaatcacactatatatgcagttagcaagcgttcatttgagatgattgagccacacttcatggaagatggatcgattgcttcaagctacaaggaaaagaggtcttgccagcacaatgatgattctaaaggggaacaagaaaaaccattcctttcagagggtgtctggtctcatatacattcctttatgcacattcgagacgcggggcgagctgcctgtttgtcccggtcttttctacagtcatggagatgtcatccctacctcatttttactgatgaaacattgggttgcaagaaaaacacatctcaagaaaacgaaattgcaagcaatttttacagtagagttgataacattctgaataatcattcaggcattgggatgaaggcactcaaaatccatgttcctataggttacactgcaaaggactcacgttatcttaaccgttggcttcagattgctatcacacatgggattgaagaactcgagctaatttttcctttcatggcaaagtacaaattcccatattcccttctacctatgagtggagactcaatcaaatgtcttgaacttagttgctgttctttttgtcccacttctaagtttggctggttaaaaaatctgacaaaattgtgtcttgatggtgtttttattgagggtgacgagttagagcgccttgtcttctctgcccttgctttggagaggttggagattagatattgtgatcgcatagtctgtctgaaggttccttccatgctacaacggctcacatacctagaggtttatgattgtgacaagcttcgtgttttggacatcgatgctccaaatataacttgcttcaatttcggaagacatcatacgaagacgaaactgtcaattggtgggggagtgtccaaaataaaagaattgagtgcatgcttcgacgatgcagtttattatgtccgtgttgaactcccgtctatgatggcaaacctcgaaactcttaccataaattcaatggttgagatgaatataccaatgcttcccagcaagtatctgcacctgaagtacttaaagatttctcttgcggcgtacacctttccttcaacatttgattatttttctctggcttccttttttgatgcatgtccctctttggaggcttttttcttggatgcatatcagcggaagatgaaacatgtttcgatcattacaaatcctttggttctgagggggactcctgaacaacgccatcacaagctcaagactgttgagatgaatggattcacttccgctaagagcctggttgagctagcatgccacattgctcagtgtgcaacatcgctgcaatccctcaaattggaggtccatcagagtgattttaagtgttatattccggctaataaacataataagtgctccccgctacctgtcgaggttctgatggaatctcgacgagcacacttggccatcatgacgtacattgagcctataattccctccactgtgaagttacaggttgtaggaccttgcagcagatgccatgcccttgaacagtagagtacgtactaccgtagtttcagtatttgggtcattagtaccctccataatattagaatggtttaaatatttatcgtcccacacgtgtgtaaagtattgtgacttgcacctatttcattttaattctaatgtctaagcatgaacaaacagtgatcccgttatttttgtcccacaatgtatgtaagttatccattgcattatcagttgcaaggattgaggcagtaaattgtaattacaagtgaag

SEQ ID NO: 217357 - DNA, 1729 bp, Zea Mays
atgggaagttttcttatgaggaagctagagcagttggacgtcgcgcacaacttgctcaccggcgcggtaccgccggggatatgcgacctgctgcgcctcaagaacttcacgttggccacaaacttcttcacgtgcgagccgccgtcttgcgcgcgcgtcgtgccgcgggacggtgaccggagcaattgcctgcccaaccgctcgtcgcaacggacgtcgcagttggcacaatccttctatctcagcatgcaaatcagaacattcatccagatgaggactaacctgaaggtggttgataactctggggccaagcgggtgatgtccatccagtccttgagggggaagaaaggagcaaggctcggggacatgatcatcggatccgtaaaggaggcccagccttcttgtcactggcctcatttttgacaagaaggctagccatgctgctggggggccaactcgggtagagaatgccaagatcgctgtcatacagttccaaatctcaccacctaagactgacattgagcagagtgtcattgtatcggactatgcacagatggaccgcatactacgtgaggagcgcaattatatcctcgggatggtcaagaagatcaaagctgctggatgcaatgttttgctcattcagaagagcatcttgcgcgacgcggtcactgacttgtctctgcactatcttgctaaggcaaagattctggtggtgaaggacgtggagagggatgagatggagttcatcaccaagaccctaaactgtcttcccattgccaacattgagcacttccgcacggataagcttgggtatgcagacgttgttgaggaaatctctgttggggagggcaaggttgtgaagatcactggtatcagggacatgggtaggaccgccactgtagttgtcaggggctcgaaccagttggttattgatgaagctgaacgtagtctccatgatgccctctgtgtcataaggtgcttggtcaacaagaggtttttgattgctggtggtggtgctccagaaatagagatgtcaatgcagctggctgcttgggcaaaggagcttcgagggatggagagttactgcattaaggagtttgctgacgcacttgaggtcatcccttacacactggctgagaatgctgggctcaacccaatctccattgtcaccgaactcaggaatcgtcacgccagaggtgagaagaacgctggcatcaacgtcaggaaagggcagatcacaaacatcttggaggagaatgtcgtgcagcctttgctggtgagcacaagtgccattacgctggcctgcgagtgtgtcaggatgatcttgaagattgatgacattgtcactgttaggtgagagcatgaagtcggtggtttggtcagattgctctgttctgtctggattgatagtagttaggttactacttagtgtagaacttctattcacgggcgtgtttcaatgttttaaacacaatgttagtacggagaggacagtaatgtacccatccttgcatgacactaccagggttgcatctgctatttccagtttcttatgattggccgtgtatgtatgccttgtttctgtcgccgcttacatgtaacctgttggctatatcatattatatattttctctgtttctttttagttgtcgctggataatttaattttgtactatccaacgacaactaaaaagaaacggatggagtatgttttttttaaatgagaagg

SEQ ID NO: 217358 - DNA, 4622 bp, Zea Mays
ctcccactggcgccacctcccctccttttctcttcttcctccgtccgcccgtcccccaatccctccgctcctctctaccagccgagaccgagagagagcgcccgaccctaccacagctgctgcctgctgctgctctgttctgctctcccccttttccaccgtttctctctcttctcacctcacctgtttggccgcttttctccactcccctcttccaatcagaccaatctccccgtctccctaaacacgaataccatccctctgctccggtgttccggctctcccacgcaccccaccccaccccactagtttttgcttcctgttcacttgtgcctgctctcgctcgctgttggcctgttgctgttgctattcccgtcccgtgcttcccttcctctcactggtcgtctagtatcctctctcccacctgccgctgccgccgccgccgccgccgccgccctgctcccacctgccgtcctctggtcaaagccagcggctcccgagatttgccgctgcttccttgcttgaggaatcaagcctgagcggtgagagatcaagagggagggacggagcgagagacgcaagaggaaagggagccagcccctcgcgcccggcattcaattggagccaacagtaggcgggtggggcggctgctacagcacgtcggactccataaattagctccccgctttccggcccccttttcgccccgtgtctcccccgatcggcccgtcgacgacgcggacgcccgccggagcatgcgcgccgcgggcctcggccgccgcagcgccgccgccggcgtccggaagatgtagctccgcgacccgcgaggagagggcgagggggatgaccgttacggcgcgcgggaggagcggcggggccgggatggaggagaagggcgacgcgcccgggctcggcttcctgggcctcgaccggatgcgcgtcctcctgccgccgctccgcctgccggagaagctgtcggccagggcgctgcggacgcacctcttcaccaactaccggatgcgcaaggtgcgggacagctccagctggctcatcccgctctgggtcctcttctgggtgctcctcgcctccgtcatctgcctctggatgagcaaccaggccgtcgccaagcgccgggagtcgctcgccagcatgtgcgacgagcgcgcgcgcatgctccaggaccagttcaacgtcagcgtgaaccacctccaggcgctcgctatcctcgtctccaccttccaccactccaagacaccctccgccatcgaccagaccacgttcgcaaggtacgcggagaggacggcgttcgagcggccgctcacgagcggggtcgcgtacggggtgcgggtcacgcacgccgagcgggagcagttcgagcgccagcagggatggagcatcaagaagatgtactcctccaagaccaagaagcagtcgcagggaccagggaacgctgaggacgccgaggtgcgggagccggcggaggagtatgctcccgtaatcttcgcgcaggacgcatacaagcatgtcatctccttcgacttgctatccggcgccgatgaccgcgacaacgtactccgagctagagaatctgggaagggtgttcttactgctccttttaagctgctcaataatcgccttggagtgatctccacctacgctgtgtacaagtatgagcttcccccaaatgccaggccacaggagcgcattcaggctgctataggctcgcgggcaagcaatccatcatggtgaacgtttacgatactactaatgatagacggatcagtatgtatggttcgaatgatacaggcagtggcatgtgccaagtcagcacactgaactttggtgacccgtcaaggaagcatgaaatgcactgcaggttcattcagagtccaccttggccttggatggcaataacgacatcaattggaactcttgtgattgctttactgattggatacataatttatgctactgcaaaacggattgccagagttgaagatgactttcaggagatgagtgtgctcaaaaagcgtgcagaggatgcagatattgccaagtcacagttcttggctactgtttctcatgagatcagaactccaatgaatggtgttctagggatgctccaaatgctcatggatactgatttggacacaacacaacaagactatgttagaaccgcacaagccagtggcaaagctttggtatctctcatcaatgaagtacttgatcaggccaagatcgagtctggtaaacttgagcttgaagcggtgccctttgaccttagaacagtttgtgatgacattttgtctctcttctgtgggaaagctcaggagaaaggactggagctggcagtgtttgtttctgaccaagttccacaagcactaattggcgatcctggcagaataaggcaaatcattacaaatcttgtcgggaactctataaaattcacagagaagggtcatatctacttgacagttcatgttgttgaagagattatgaattgtcttgaggttgagacgggaactcagtccgccaataccttaagtggctacccagtggcgaacagaaagcgcagttgggaaaactttcgagtctttagcagggaactgaactcatctgagatgccttttgcacccatcgcatcagactcaataagcttgataatatcagttgaagatacgggtgttggaatcccgttcgatgctcagtcccgtgtcttcacccctttcatgcaagtaggtccatccattgctcgcatccatgggggcactggcattggattaagcatcagcaaatgcttggttggactcatgaggggagagattggatttgcaagtaaaccccaagttggttctactttcaccttcactgcggttcttacgagggcccattccagcagaaatgagaataaatcgtcagaatttaaagggatcaatgcattggtggtagatcataggccggtccgtgccaaggttactaggtaccatttacagagactgggagttcagaccgaattgacaactgacctagatcaatatatttctaaaattaattgcggatcacaaattgcaaagcttgtgctcattgacaaagaaacctggctgaaggaatcccactctatgcctcttttggttactaaattgaggaacaaagatcagccagactctacaaagttatttcttttggagaaccctaaaagtactgccaaaagcaattcacatatattcagggaatttaacttgaatgtaattatgaagccacttcgagcaagcatgcttcaggtttcgctacacagagcattgggtgggatagataaactgcactgcaggaatggagtacttggcaattcaacactgggcagccttcttcacaagaaacgaatcttagtggttgacgacaatattgtaaatctcaaggttgctgcaggcgctctgaagaaatatggcgcagaagtaacttgtgctgatagcgggaagaaagcaatcacgcaactgaaacctcctcacagttttgatgcttgtttcatggacatacagatgcctgaaatggatggatttgaagccacaaaaaggattagagtgatggaaagagatctaaatgagcaaatagaacgtggagaagccccaccggaatgcgcagggctccggcagtggcgaactccaatattagccatgacagcagatgttatccaggcgacgcacgaacagtgcttaaaatctgaaatggacggttatgtatccaagccattcgagggcgagcaattgtacagagaagtagctcgctttttccaaaatcaagaccaagttcagtaggtaggcttatatggaggagtgtaaagtagtggaggatatcgccaacggttcacccgtcgaggccgaaagaattttgtcaaagatctcatcttcttgaaagtgggcatcaattcgcaaagttagagggcccctattaaaacactagaaatgctgggatgtggccgccagttaggtggaaacgatttaggctggagatggaaccacccatgttcggatgcttggtacatctgaccaatctgcaaagctaaatgcgcaatgtcttgaaatcaacatgcacgtgcagctattcattcgacgatttgctgaggtcaaggcgtgtgaaaaaaaatcagctgcattcactaactgcaggtgccctctgccactatataatatataagactagggggagaagttttccttcccccggaaggcacggctgtacatattatattagggattggttggttgtttgtgcaggcatttttgtatgcatcatattcggcctgtatgggtcgaagctgtaaagtgtaaatgacacattcaaagatggaagttttgtttgacaaaaaaaaaaaacatcagtcgccatcagcttgtcgtcctgagttcctctcctgctattggctctctcgaccagccaattggcatactgagaactccctgttggtgtggctttatctcatgtcttctgcctgatgtcacggagcttgtttaaggtgtgtggcctggagcatgttacgacggtacctaactgccggcatatgttaatcgccgcaaatggtccaaagtgtgatgacacttgattgctgctgtttaaactaatgccag

SEQ ID NO: 217359 - DNA, 4405 bp, Zea Mays
cgcttttctccactcccctcttccaatcagaccaatctccccgtctccctaaacacgaataccatccctctgctccggtgttccggctctcccacgcaccccaccccaccccactagtttttgcttcctgttcacttgtgcctgctctcgctcgctgttggcctgttgctgttgctattcccgtcccgtgcttcccttcctctcactggtcgtctagtatcctctctcccacctgccgctgccgccgccgccgccgccgccgccctgctcccacctgccgtcctctggtcaaagccagcggctcccgagatttgccgctgcttccttgcttgaggaatcaagcctgagcggtgagagatcaagagggagggacggagcgagagacgcaagaggaaagggagccagcccctcgcgcccggcattcaattggagccaacagtaggcgggtggggcggctgctacagcacgtcggactccataaattagctccccgctttccggcccccttttcgccccgtgtctcccccgatcggcccgtcgacgacgcggacgcccgccggagcatgcgcgccgcgggcctcggccgccgcagcgccgccgccggcgtccggaagatgtagctccgcgacccgcgaggagagggcgagggggatgaccgttacggcgcgcgggaggagcggcggggccgggatggaggagaagggcgacgcgcccgggctcggcttcctgggcctcgaccggatgcgcgtcctcctgccgccgctccgcctgccggagaagctgtcggccagggcgctgcggacgcacctcttcaccaactaccggatgcgcaaggtgcgggacagctccagctggctcatcccgctctgggtcctcttctgggtgctcctcgcctccgtcatctgcctctggatgagcaaccaggccgtcgccaagcgccgggagtcgctcgccagcatgtgcgacgagcgcgcgcgcatgctccaggaccagttcaacgtcagcgtgaaccacctccaggcgctcgctatcctcgtctccaccttccaccactccaagacaccctccgccatcgaccagaccacgttcgcaaggtacgcggagaggacggcgttcgagcggccgctcacgagcggggtcgcgtacggggtgcgggtcacgcacgccgagcgggagcagttcgagcgccagcagggatggagcatcaagaagatgtactcctccaagaccaagaagcagtcgcagggaccagggaacgctgaggacgccgaggtgcgggagccggcggaggagtatgctcccgtaatcttcgcgcaggacgcatacaagcatgtcatctccttcgacttgctatccggcgccgatgaccgcgacaacgtactccgagctagagaatctgggaagggtgttcttactgctccttttaagctgctcaataatcgccttggagtgatctccacctacgctgtgtacaagtatgagcttcccccaaatgccaggccacaggagcgcattcaggctgctataggctacttaggtggcatatttgacattgaagcgcttgttgacaagttgcttcaccagctcgcgggcaagcaatccatcatggtgaacgtttacgatactactaatgatagacggatcagtatgtatggttcgaatgatacaggcagtggcatgtgccaagtcagcacactgaactttggtgacccgtcaaggaagcatgaaatgcactgcaggttcattcagagtccaccttggccttggatggcaataacgacatcaattggaactcttgtgattgctttactgattggatacataatttatgctactgcaaaacggattgccagagttgaagatgactttcaggagatgagtgtgctcaaaaagcgtgcagaggatgcagatattgccaagtcacagttcttggctactgtttctcatgagatcagaactccaatgaatggtgttctagggatgctccaaatgctcatggatactgatttggacacaacacaacaagactatgttagaaccgcacaagccagtggcaaagctttggtatctctcatcaatgaagtacttgatcaggccaagatcgagtctggtaaacttgagcttgaagcggtgccctttgaccttagaacagtttgtgatgacattttgtctctcttctgtgggaaagctcaggagaaaggactggagtgtttgtttctgaccaagttccacaagcactaattggcgatcctggcagaataaggcaaatcattacaaatcttgtcgggaactctataaaattcacagagaagggtcatatctacttgacagttcatgttgttgaagagattatgaattgtcttgaggttgagacgggaactcagtccgccaataccttaagtggctacccagtggcgaacagaaagcgcagttgggaaaactttcgagtctttagcagggaactgaactcatctgagatgccttttgcacccatcgcatcagactcaataagcttgataatatcagttgaagatacgggtgttggaatcccgttcgatgctcagtcccgtgtcttcacccctttcatgcaagtaggtccatccattgctcgcatccatgggggcactggcattggattaagcatcagcaaatgcttggttggactcatgaggggagagattggatttgcaagtaaaccccaagttggttctactttcaccttcactgcggttcttacgagggcccattccagcagaaatgagaataaatcgtcagaatttaaagggatcaatgcattggtggtagatcataggccggtccgtgccaaggttactaggtaccatttacagagactgggagttcagaccgaattgacaactgacctagatcaatatatttctaaaattaattgcggatcacaaattgcaaagcttgtgctcattgacaaagaaacctggctgaaggaatcccactctatgcctcttttggttactaaattgaggaacaaagatcagccagactctacaaagttatttcttttggagaaccctaaaagtactgccaaaagcaattcacatatattcagggaatttaacttgaatgtaattatgaagccacttcgagcaagcatgcttcaggtttcgctacacagagcattgggtgggatagataaactgcactgcaggaatggagtacttggcaattcaacactgggcagccttcttcacaagaaacgaatcttagtggttgacgacaatattgtaaatctcaaggttgctgcaggcgctctgaagaaatatggcgcagaagtaacttgtgctgatagcgggaagaaagcaatcacgcaactgaaacctcctcacagttttgatgcttgtttcatggacatacagatgcctgaaatggatggatttgaagccacaaaaaggattagagtgatggaaagagatctaaatgagcaaatagaacgtggagaagccccaccggaatgcgcagggctccggcagtggcgaactccaatattagccatgacagcagatgttatccaggcgacgcacgaacagtgcttaaaatctgaaatggacggttatgtatccaagccattcgagggcgagcaattgtacagagaagtagctcgctttttccaaaatcaagaccaagttcagtaggtaggcttatatggaggagtgtaaagtagtggaggatatcgccaacggttcacccgtcgaggccgaaagaattttgtcaaagatctcatcttcttgaaagtggaaacgatttaggctggagatggaaccacccatgttcggatgcttggtacatctgaccaatctgcaaagctaaatgcgcaatgtcttgaaatcaacatgcacgtgcagctattcattcgacgatttgctgaggtcaaggcgtgtgaaaaaaaatcagctgcattcactaactgcaggtgccctctgccactatataatatataagactagggggagaagttttccttcccccggaaggcacggctgtacatattatattagggattggttggttgtttgtgcaggcatttttgtatgcatcatattcggcctgtatgggtcgaagctgtaaagtgtaaatgacacattcaaagatggaagttttgtttgacaaaaaaaaaaaacatcagtcgccatcagcttgtcgtcctgagttcctctcctgctattggctctctcgaccagccaattggcatactgagaactccctgttggtgtggctttatctcatgtcttctgcctgatgtcacggagcttgtttaaggtgtgtggcctggagcatgttacgacggtacctaactgccggcatatgttaatcgccgcaaatggtccaaagtgtgatgacacttgattgctgctgtttaaactaatgccag

SEQ ID NO: 217360 - DNA, 894 bp, Zea Mays
atggcgcagccgccgccgccgccggagatggagagacctgctgcttccggggcgctcatctacgccatggtggcgcggggcacggtggcggtggcggagcacacgtcctacacgggcaacttccgggacatcgccgcgcagtgcctgcacaagctgccggcggggaacaaccggttcacctacacctgcgacgcccacaccttcaacttcctcgtcagcgacggatacgcatactgcgtcgttgccaccgagtcggctgggcggcagatccctatggccttcctggagatgataaaggaggaattcaacaggagatattcaggtggcgaagcaggaacggctacagccaacagtctcacccgagatttcgggcccaggcttagagaccagatgcagtactgcacggatcacccagaggaagtgagcaagctgtccagagtgaaggcccaggtggatcaggtgaaaagcatcatgatggaaaacatcgacaaggcctttgatcgcggacagcagatcgacgggcttgtcacaaggacggagcagctccacgacgaggccgttgatttcaggcggcaaggcgtgcagctgcggcgcaggatgtggtaccagaacatgaaggtgaagctcatcgtcctcggcgtcgtggtcgcgctcatccttatcatagtcctctcaatttgccatggcggatgcagcaagtgattatttttttttttaaaaaatgtgctggtgctggtcttttgctcgctacctataaacatatctaatttagagattctacttttttactatatatcatcagagtcactttcttgctcccctctaacctagagaacttttctcggcaagatgtatttacttaaaaaaaagatcatagtagaaactactaaagac

SEQ ID NO: 217361 - DNA, 2577 bp, Zea Mays
cttacatcttcgcgtgggtggttacagggcaatattgttccttcaggttttgtcgagctgtcagaagaaatccaaacagccatggcatttgcacatccagccgtactctgtgatctacacatccagctctttttcggtcagcagccagcagtgcactggcgatggcaagtagtccagcttctgttaatgactattgtgatccgaagactgatccagcaaggaaggcaaagaacacacgtgatcctggttggaaatatgggtactggacagacgatcctggttggaaatatgggtactggacagacttgatgttgtgacctgcactctttgtaggatcataagactgaagcaagaccttgctggtggatatgaagatgcaaaaatgtgtgccaaaacaactactgcaatcaggaaggaaatgagagcatacttggaaatgcacaagaggagaagacccttgagctttgaagatgatgatggtgatgtggatgtgctggaggtggtaccacaggaggggaacaacgttgatgtggtggaggagataacacaggacaggaacaagagcaatgcagctgtggcagagtcccaagcctaaggcagctagcaatgggaagtctattgtccaaaatcagggactgcagccaaaagaagacaatcagcaatgcaattcaagcccaagcctaaggcagctagcaatgggaagtctattgtctagttgcttagaagaactcctgaagaagtggttgagcaaagacactcggggaaggctcaaaaatacaattgaggccagctgcaagaccaaggaggagaagcactatgtagatatgcagtgtgccttatggttttatgaggctggcataccttttaatgtagcaacatcaagacagattgagattgcacttgaggccactgcacagtatgtctaggatacattccacctacatcatatcagcttggggagccattgctagaggctgttgtaaagatgacgagcaatgtgagaaaggaccatgagcgagcatggaaacattttggctatacactcatgtcagatgggtgtgccgataggaggggacaccatttgatcaatttcctagtgaacagccctgaagggacatatttcttggagtatgttgatgcatccgatgaagtgcacaatgatgaaatacttgcagatttattagaaaaaagaattgaagagattggaaaggacaacgttgttcaagttatcaccaataacggtgccaactacaaggcagcaattaggcttctaatggagagggttccaacactattttggagtccatgtgcagcacattgcttagaccttatgttggaagatataggaaacttaaaggactttaagaagcctattgcacgtgccaagcgtgtgacaactgaacattcatatataggcatggcagaattcttaatacaatgagggagaaaacaggtggtagagatcttgtgagggctgcagccacttggtttgcaacatcattccttactttcaagagtccgtacaagcacaaggatgctttgaaggctttaattgttagtgaagtatgggttggaaacaagttggcaagaaccaaagccagagcggatgtccatgacattgtcctatcaacccaattctggaattcaattgaagattgcctatgagcttgagctccacatcttatcatgcttagggtagtcgatggtgatgagaggccagcaatgccaaaatttcaagcactaatgagtcatgcaaaggagaccatcaataaggcctttgatatccaaagcaagaaatctttgcttaagaggatcatggacattgttgagagacaatggctgaagcaaatggaccatcctttgtatggtgctgtgttgtacttgaactcaggaaaatcgcactctctcattaaagaagatgatgattctgctgttggacaattaatggggctggttccttaatgtgcttgcaaaaatggtggaagatgatgaaactagaaacaagattgatgctcaagcaagggactatgaactttttagaggcactgccttatcaaataaaatacccatacaaaatcttgattcgtcgatcgctggggttcttatggtggacgtgctattgaattacaaaggtttgctaggcgtgttgttagtctttgtgcttcatcatctagttatgaaagaaaatggaacacattcggatttattcataagaaaagaaataggctgctccacaagagactgaattatattgtgtctgtgtcatataatcagaagatgaagagcagatttcatttagacgtgagaaaaggggggaaacattgaccctttggtcatttcagagtttgattgggacaatgagtgggcagactcattgcatgtgccctctcaaggtgttcatgggtcagatctaacatgggagcttgttgatgaagctatgggtgcagctaaagcactactaggccgcaattttccaaggagagctcatatgaatagcaagcatgcaaggagttctacacaaacagtggacgaggatgacttcggttctacaaatgaagaagatcaagacccattgac

SEQ ID NO: 217362 - DNA, 4103 bp, Zea Mays
tcttctccctacccatcttgaccggttctggccgtcttatccctctctcccgtttccacgcccaggccaaagccaaaaaaagaaaaaaaaacctgcagcgcgcgcgacgcgagccgcgcgaggaagcactcgcaggcaacgcacccgcgcgcaccggtttgccgatcggcggggcgccaccgattgccatggatccggacgacgaggcactgaaggtggcgcgcgccccgccgcagcagcgccgcgggatctcctacagccagccgctgtcgcgggacgccgcgtccgcgcgccgcgccgcgccgcgcaatcacagcctcgacgacgagcacattctgccgacctcccactccatcaactacccgctgcaccacgatccctcgggcatggtgcccatgggctaccaccccccgctcccgccccaccagcgccaccccagcgcgtcctattcatccaacacccgacgctccgctggcggcgtcagcgaggactccatgacgctcgagcgctccatgtcagagtacggaggcggcaacggcagcctcccggagttcgtcggcgcggggggcggcaagggcatcttccgtgtgccgctccgcgccgccatgcacccgggccgtccgcccccgctcgaggtgcggccccacccgctccgcgagacgcaggcgggctccttcctccgctcgctcgctgccgagccgcatcgccgccagctctgggccgggaccgagtccgggatcagggtgtggtcgctcgacgaggtgttcgcggagtggggcgcgggcgcgcgccgcggcgacgaggagagcgcgcccttccgagaaggcatgcccgcgccgcccgcgctctgtgtcgtcgtagacagggccaaccgcctgctgtggacggggcataaggacgggaggatccgctcgtggcgcatggacctcgacgcggccgctactgcgcctgcgcccccggctgctggtgcaggcgacggcggggggagtagtcacggcgggggaagcaataatgcgccagtgttcagggaagccctgacgtggcaggcctatggcaggacgcccgtgctctccatggtcatcacttcgtatggtgagatatggtcgggttccgagtgtggaaccataaaggcatggccttacgatgccattgccaagtcgctgtcattgtcaccagaagagagacatatggctgctttgttggttgaaagagcgtacatcgacctgaggaaccattgcacagttggtaacgtttgctcgttgcccgcttctgatgttaagtacatgctagcggaccattcacgggcgaaagtttggactgtgactagcatgacatttgctctctgggatgctcgtacaagggagttgctgaaagtatttgggatggatggccagtttgagtcagcaaagctagagacacctgtcatgccagagcaacctatggaggaagaggtcaaccctaatcctaaagcaaaaccttcgaagaaggacaagtcacaaggttctttgaacttcttccaaaaatctaggaatgctttaataggagcagccgatgcggtgcgcagggtggcaacaaaggggacatttgtcgaagataaccgcagaacaggagcggtggctcaagtaacggatggaacaatctggtcaggatgcacgaatggcgccattattcagtgggatggaaatgggaatagagtgcaagaattccagcatcatacttcttctgtgcagtgcataaaggcactcggagaaagggtgtgggtgggatatgccagtggcatgattcaagtcatggatgctgaaggtaacattattgcaggatggactggacatagctgtccagttataaggatggcaattggttgttcttacatttacacactagcacatcatggtggtattcgggggtggccactaacttctcctggaccccttgacgatattatacgaactgaattgtctaacaaagagctgtcatacactagaatggagaagataaacataatggtagggagttggaatgtagcacaagggaaagcatctgctgagtcattaagatcatggttgggtagtgtagcatctgatgttgggttggttgttgttggattacaagaggttgagatgggcgcagggtttcttgccatttctgctgcaaaagaaacagtagggcttgagggcagtgcgaatgggcaatggtggatagacaatattggcaaagcgcttgacgagggaacatcattccaccgagttggttctaggcagttggctgccctgcttattgctgcatgggcaagaaagagccttaaaccatatgttggagatgttgaagctgctgcagtgccgtgtggtcttggacgtgctattggcaataaggattgagaataagggtatatgatcgtaaaatgtgttttgtgagtaatcactttgctgcacatctagaagctgtgagcagacgcaatgctgattttgaccacatttatcggacaatggctttcaacaaacctcatggatctacagcttctgctacatctgtccaattgcacagaacagtaaatgtcaatggaaatcaggttgaagaagtaagacctgacctagcagaagctgatatgattgtatttcttggtgatttcaactaccgcctctatggtatcacatatgatgaagcgagggacatggtttcacaaagaagctttgattggctaagagagaaggatcagcttcgagcagaaatgaaagctggaaaggtattccaaggaatgcgtgaagctgtaatcaattttcctccaacatacaaatttcaaaagcaccaaccaggtctcggaggttatgattcgggtgagaagaaacggatacctgcttggtgcgatagggtactatatcgtgatagccgttctgtatcagtagctgaatgctcattagagtgccctgtagttgcttcaatcacatcgtacgtggcatgcatggatgtcacagagagcgatcataaacctgtgaggtgtacattcagcgttgatattgcaagagttgatgaattaataagaaggcaagagtatggagaaataattgagtcgaatgagaaagtacggtctttgttacaagatggttgttttgttccggacactacagttagcataagcgagatcacactggagaagcaagaggatattgtattccaaattgcgaataaatgtgaaacaagcagagcagctttcgaaatcctgtgtgacgggcagtcaaccaaggaagacggtactaaatcagagcttcttccaagggcatcgtttggcttcccactttggctcgaggtccaaccagccgtcggtctgataaaaccaggtgaaacggtagaaattactctgcatcatgaagatttttacacacaggaggaatttgtcgacggaataccacagaactggtggtgcgaagacaccagggacaaggaagccgttctcagaataaacataacgggcaacagctcaaccaaaaccaagacgcacaccatcaacgtccaacatcgctgcccaccaccatcggcgccaccgccggcgatgaaccaacaaccggtggctgccgcgccaccaagcaatgtccttgccagcgagggacactcatcaaagcgttcctcgaagaagagccagtccaagcaccgggaacagcagcaggattacccgcagtttgggacctcagaggtacacgacctgtgccgcatgcggtgcccttgagacctgtacagactactcttacattactacaaagaagtatggatactgaagttctgtctaggttctgtacatatgcttcactcgatcagctgccactctaacgtagcccaagcaaagagtctagagtcctgggataacagtgttaacaacttgttgttttatttttgttccttattaaggagtgttcgctagatagttgaagccagggatatttgaacaatacttggtgtaatatgttccatagaattaccctaggtttgttctctcttcacgcagcagttctaatgatcttgtacttcacactattgccattgttaatatttatctcatgagactatttgttcgactagtaaagggtaatatttatctcatttctcggaat

SEQ ID NO: 217363 - DNA, 606 bp, Zea Mays
ttcaactgttgacccatcatacggagtagaaccggacaggatggccgccgctcgcgcacgggtgctgcgcgagctgccggcaaggtgctggacgaaatgcctccgccgcgcttcccctttcccctccacctcgcccgccgcctcctcgctctccagcctcagccgtgcttccacgtctccctttccgctcgcctctcgctcccggcgccttctacactcgctgccctcggcggcggtgcgcgtgcgcgtgcgcgcgcagctgcagacgcgcttcttggcgagcgaagccgcgcggggcggtgtcggcgggcgcgggccagcagcggacagcgaggaggaggcgcaggagtgggcggtggagtgggaggacagcgaggacgacggctacgagcccgagatcggcgacggcggggacggcggcggggtcgcgctgcggggcgtcggttggggcgagcgtgccctcgtggcggccgaggaggttctcgccggccattttggggatgacatcgcaatgttcgccttcaaggtgtcgcccaagggatacgtctacgtgcgcctcgacaagctgaccgacgtggaagactactttctcaggcactgaggaag

SEQ ID NO: 217364 - DNA, 698 bp, Zea Mays
gcatgggcatttgaggagtattcatcagtacgggtgccctgacatcgaggaaatagagaaattcaatagactctacaagcagaaactggatgagatcgtcgaaagaggcgaaatatccctggacctggcactcgaggtatcatcgccaggcgcagagaggcttctgaaggtgcctgaggatctggaccgcttcaaggacatggctatgagggtgcagtacctcgctgaaggcaacagtgaccttgcgtcgaagcagagcctgctgaaggacggcatcttcttgctcgagtccgttaacgctgaggctgggcactgtgtttggaggctggcagatgtgaaggaaaaccgagcagaagctgggaagggaaggccgctgaacaggaaacagagagactggaggctgcagacttgcttcaccgcagtgaagaaggtgaccttgtacttggacgccaactagtaaatccgggccaggaggactattatggcttgtgaaaactatcctaaccctagcagattatgtagaataagaatgttgggttttctttatatagagtagagctatgttggtaggctgcacaaattggatatccatgaaattgctttgctatgagttgctagtgcgaaattgactgatgtttctcacacttgcagtataatgacacctttttcttttcaaattataagatgctttattattt

SEQ ID NO: 217365 - DNA, 2536 bp, Zea Mays
ggggacgcaggccgcgacacagctcactccgctccacccacccacccagctctgccttcgtcctccccgtcccgtcctagctaggctcttcagtcttcccccacaccaactcgctcgccggccaagcttccttctcatcctctctctctcgctgtcgctgggccccgcggcgccctccccctccccgcatttaatcctcgggcgtccgtgctcccccggtccgctcacgccccgcccgtgatctcggccgccgtctcccactctgtctcaccgcacgagccccgcgtggtggtggtggtggcgctaaatggcgagcagcggggtgaggaacggcgtggggcccaggatgagcgcgaaaccggaccgtcagggcgccggcgccacgcccaagacggccgcggggaagcaccgcgtctcctcggcgggcggcgccggcgcgtaccgccggaccagctccggcccgctccccgcggcggcgggcggccgcgcggcgtcggacggagagaggctacgtcaaaaccagggtttttggctcaatggaatctacccaatagaagaattactaaaaaatgatctcattcctattaattcttctattgggttgattaaattgtttcattttgtatttattctgactgcgtgccaagtgtacaaattgtctctcattgttgatcatgtggcaactagcgttttgaggcttcaaatgaggtaagacttgatgtttatttcagtttcgttcaatttcagacttcaaaagaggtaaaacatcctctttcttcatatataaatgatatattgtctatatgaagccattatacaggcaaaacaaccactatattggcaagtcgacgactagtcgactgacttatcgactagtcaccaagtcggtaccttgtcgactcgactcgacttaccgacttgaaaaccttgatgttgataactactctgctagtgcattgtcaagggcgtcgagcccccgactagccggaccgcgtctacgcagctcgtagccgtcggccgtcctctccggtgaggttatccccctcaactgcaggcttaacagaaagagagagagagattaaggatataattcttgcctaattgattgtcaagtgcttacaagtatatatagccaatggcccaaccgacatggagaaggttctccttgattctagggatttccaaaacaactcttcttgattctagggattcccaaaacaactctccttgattctagggatttccaaaacaacttactaatctaacacttgcagcgcctgcccagcgtgctcagtcgcgctcagctgcgctgtgcgtccgcacatgacatgcatagatggttaaatttcatattgcattttttttcactccatgttgtgcgccactatttccttacatgatggttccaaaaatttgaggattgaattattggttgatattacgtgtattgttgaaattataaataacactctattcttgttgtgctttctggcaattttgatttgaccaagtatctatatttttggtcaactgaagaatctattcctccctggtcccagcagtttctagtagagtaagggttgctgtaaggcttaggcctaggaatgcagaagagttggcggcagatgcagattttggtgattgtgttgaacttcagccagagctcaaaaggttaaggcttcgtaaaaataattgggagtcggaaacatacgaattcgatgaagtgcttacagacttctcttctcaaaagcgagtgtacgaagttgttgcgaaaccagttgtggagagtgttatggagggatataatggtacagttatggcatatggccagactggtactgggaaaacttttacactgggaagacttggtgaagaagacactgctgctaggggaatcatggttcgtgcaatggaggatattctagcagacataacacctgggactgattctgtctcagtatcatatcttcagttgtacatggagatgatacaagatctccttgatcctgtaaatgataatatagccattgtagaagacccaaggactggggatgtttcattgcctggagccacagtagttgaagttagagatcaaaaaagctttgtggatcttctaagggtgggtgaggctcatcgtgttgctgcaaatacaaagttaaacacagagtcatctcgaagtcatgcgatcctcatggtgaatgtcaggaggtctgtaaaaggtagaactgaaatggatgtcagcatttctggtgaaaatgggctctcatcatccttggtagggtctttgagaccacctattgttaggaaaagtaagcttgtagttgtcgatttggctggatcagagcgcatagacaagtcaggaagtgagggtcatacgttagaagaggcaaagtctatcaatttgtctttaagtgctctgggaaaatgcatcaatgcacttgctgaaagcagtcctcatgtgcctgttcgtgattctaaacttacaagattgcttaaagattcatttggagaaagaatcagtgtgctatacttatga

SEQ ID NO: 217366 - DNA, 1941 bp, Zea Mays
gagcaatctgcgtccgttggtgatgtggtgcaagtgtgtaacgtacgttacgtatctgcagaggcagcagagcagtcgcaccgtttcggaactgacggtgtgcgattcatttcttttacagtacttttccatattggagtggtgtattgttttggtcacgccactatcgcgcgtttcatatttttgttgttgcataaatgtcgtgcgctacccaccacagccaaccatctcatttaaagctgcgaaactgatacagctgttgaggataatgaagagccacagttggtaaatgtgtcttcctgctggttctgtatgcatctcgtggttagtttaccttgcataggacgacaccaagtgaatattactatgtgtagaattagtgagttacaaattgtcctgtttagaagcaacctagtttttaagaaaccagtttttattttttagttaacagagaccagcttcttagtttttaagaaactgagaatttaattcctttaaactgaggcataaacagtatgtttggaaccatcccaattcttataaaccagtttcttaaaaactgggtgtttccaaagtccaaacaggccctgagacacttggtccgtgtaagagaccatcctagattcatatgaaaccagtagcagcaacagtctattagttacaccggatgtggatgttctagtcccagtgaatttcttatcagctatggtgaagtgcaagtgtaaaatgatttgcttttttagacaccgtttaaagtttctcctcagtttgctttggatacttcgttttgaagttcctgtcatactatgtttggtcgttctcttgtgttctgtcagtttgtcatgcctgtgagattgtgcacggctgttcaagtacttaactctactaccatgcctggaaaagtaccctatcggaagtcgctttatgggagttgatgtttagaagaactacttagcagtaatgatattgagtagtagtttacattctctgcttatccctactttgttttactatatgctgtgttatgatcgtttccattgagtcttctttaatctactcaatagaaaaaaaaaggatagacctaatgctgatggcttccacatgagtggggtctgcggaaggaataacaatccttacccctgccattttgcagagaggctacgtcaaaaccagggtttttggctcaatggaatctacccaatagaagaattactaaaaaatgatctcattcctattaattcttctattgggttgattaaattgtttcattttgtatttattctgactgcgtgccaagtgtacaaattgtctctcattgttgatcatgtggcaactagcgttttgaggcttcaaatgagaatctattcctccctggtcccagcagtttctagtagagtaagggttgctgtaaggcttaggcctaggaatgcagaagagttggcggcagatgcagattttggtgattgtgttgaacttcagccagagctcaaaaggttaaggcttcgtaaaaataattgggagtcggaaacatacgaattcgatgaagtgcttacagacttctcttctcaaaagcgagtgtacgaagttgttgcgaaaccagttgtggagagtgttatggagggatataatggtacagttatggcatatggccagactggtactgggaaaacttttacactggaaagacttggtgaagaagacactgctgctaggggaatcatggttcgtgcaatggaggatattctagcagacataacacctgggactgattctgtctcagtatcatatcttcagttgtacatggagatgatacaagatctccttgatcctgtaaatgataatatagccattgtagaagacccaaggactggggatgtttcattgcctggagccacagtagttgaagttagagatcaaaaaagctttgtggatcttctaagg

SEQ ID NO: 217367 - DNA, 1060 bp, Zea Mays
ggggacgcaggccgcgacacagctcactccgctccacccacccacccagctctgccttcgtcctccccgtcccgtcctagctaggctcttcagtcttcccccacaccaactcgctcgccggccaagcttccttctcatcctctctctctcgctgtcgctgggccccgcggcgccctccccctccccgcatttaatcctcgggcgtccgtgctcccccggtccgctcacgccccgcccgtgatctcggccgccgtctcccactctgtctcaccgcacgagccccgcgtggtggtggtggtggcgctaaatggcgagcagcggggtgaggaacggcgtggggcccaggatgagcgcgaaaccggaccgtcagggcgccggcgccacgcccaagacggccgcggggaagcaccgcgtctcctcggcgggcggcgccggcgcgtaccgccggaccagctccggcccgctccccgcggcggcgggcggccgcgcggcgtcggacggagtttctagtagagtaagggttgctgtaaggcttaggcctaggaatgcagaagagttggcggcagatgcagattttggtgattgtgttgaacttcagccagagctcaaaaggttaaggcttcgtaaaaataattgggagtcggaaacatacgaattcgatgaagtgcttacagacttctcttctcaaaagcgagtgtacgaagttgttgcgaaaccagttgtggagagtgttatggagggatataatggtacagttatggcatatggccagactggtactgggaaaacttttacactggaaagacttggtgaagaagacactgctgctaggggaatcatggttcgtgcaatggaggatattctagcagacataacacctgggactgattctgtctcagtatcatatcttcagttgtacatggagatgatacaagatctccttgatcctgtaaatgataatatagccattgtagaagacccaaggactggggatgtttcattgcctggagccacagtagttgaagttagagatcaaaaaagctttgtggatcttctaagg

SEQ ID NO: 217368 - DNA, 2111 bp, Zea Mays
ggggacgcaggccgcgacacagctcactccgctccacccacccacccagctctgccttcgtcctccccgtcccgtcctagctaggctcttcagtcttcccccacaccaactcgctcgccggccaagcttccttctcatcctctctctctcgctgtcgctgggccccgcggcgccctccccctccccgcatttaatcctcgggcgtccgtgctcccccggtccgctcacgccccgcccgtgatctcggccgccgtctcccactctgtctcaccgcacgagccccgcgtggtggtggtggtggcgctaaatggcgagcagcggggtgaggaacggcgtggggcccaggatgagcgcgaaaccggaccgtcagggcgccggcgccacgcccaagacggccgcggggaagcaccgcgtctcctcggcgggcggcgccggcgcgtaccgccggaccagctccggcccgctccccgcggcggcgggcggccgcgcggcgtcggacggagagaggctacgtcaaaaccagggtttttggctcaatggaatctacccaatagaagaattactaaaaaatgatctcattcctattaattcttctattgggttgattaaattgtttcattttgtatttattctgactgcgtgccaagtgtacaaattgtctctcattgttgatcatgtggcaactagcgttttgaggcttcaaatgaggtaagacttgatgtttatttcagtttcgttcaatttcagacttcaaaagaggtaaaacatcctctttcttcatatataaatgatatattgtctatatgaagccattatacaggcaaaacaaccactatattggcaagtcgacgactagtcgactgacttatcgactagtcaccaagtcggtaccttgtcgactcgactcgacttaccgacttgaaaaccttgatgttgataactactctgctagtgcattgtcaagggcgtcgagcccccgactagccggaccgcgtctacgcagctcgtagccgtcggccgtcctctccggtgaggttatccccctcaactgcaggcttaacagaaagagagagagagattaaggatataattcttgcctaattgattgtcaagtgcttacaagtatatatagccaatggcccaaccgacatggagaaggttctccttgattctagggatttccaaaacaactcttcttgattctagggattcccaaaacaactctccttgattctagggatttccaaaacaacttactaatctaacacttgcagcgcctgcccagcgtgctcagtcgcgctcagctgcgctgtgcgtccgcacatgacatgcatagatggttaaatttcatattgcattttttttcactccatgttgtgcgccactatttccttacatgatggttccaaaaatttgaggattgaattattggttgatattacgtgtattgttgaaattataaataacactctattcttgttgtgctttctggcaattttgatttgaccaagtatctatatttttggtcaactgaagaatctattcctccctggtcccagcagtttctagtagagtaagggttgctgtaaggcttaggcctaggaatgcagaagagttggcggcagatgcagattttggtgattgtgttgaacttcagccagaggttaaggcttcgtaaaaataattgggagtcggaaacatacgaattcgatgaagtgcttacagacttctcttctcaaaagcgagtgtacgaagttgttgcgaaaccagttgtggagagtgttatggagggatataatggtacagttatggcatatggccagactggtactgggaaaacttttacactggaaagacttggtgaagaagacactgctgctaggggaatcatggttcgtgcaatggaggatattctagcagacataacacctgggactgattctgtctcagtatcatatcttcagttgtacatggagatgatacaagatctccttgatcctgtaaatgataatatagccattgtagaagacccaaggactggggatgtttcattgcctggagccacagtagttgaagttagagatcaaaaaagctttgtggatcttctaagg

SEQ ID NO: 217369 - DNA, 1562 bp, Zea Mays
gcaatgcagctagctacaagctcctatatctacttcgaggtcgacaacgaggacgcgctgctggagagcatcatgggggaggacaagatcgcgcacgttatcatcggattggacaacacacaggtcttcgccgacttggatctcgtctcggcctccgccacagagtttgcgcaagaagacgacaacggcgatgaggacgatgacggctccgacgatgatgaggaaagcgactttgacgaggacttcaacgacgtggagggtgtgttttcggttgatgaggacgacgaagatgacagagaggaagaggaggaggaggacgacgacgacgatgacgaggacctaccaagctggtccaaccttgagaccgtgaattcctgccatccactgtactttgcaaggatgattgtagagactgcaaccaagtctagcatagactggctggaccggccacctgcaagccttgtcgtcgagggccagctgaggcctgcctttgctgaggagagcaccatggttgccaagcatatatcaagtgacgcgccaaagaaagatacaaaggagagtggtgccacctttttcaaggtcgaggtcctcagcatcgagttgatcactgcgtatggaactgagccaaaggtaaagattgaagaataccagaaggctaagccggacatcatcgcgcattctgcaccgaacgtaatatcgcgcctgagagctggtggagacaaggtcacccaggctctgaaatctctctgttggaggagcaaggccattcaagtagaggaggcagcggtgatcggagtggactgccttggttttgacctgagagtgtgctcaggaactcaagtgcagacattgagatttgctttccctacaaaggccacttcagagttctctgcagagaagcaaatacatgagcttctgtttcctaggaatacacatcaagaagggcaatcaccacaggcccgacagaagtcctgatgtaattcgatccatcgatgtggtaacttcattcagatggtaggaaattaatttagagaaataaataataaattcttggtcatgtccatgaaagttgtggtataaccttcaagcttgccattgatttcgtgtttggagacaatcacaagttccaaggttgttcttagacacgttctcaaagaaaaagggttgttcttagatcatggaccgggggatttggtttttttttttaattcagaggaagctcagtgcaactccaacagattgcctatccaagtagagatgaagtctcgacaagtgaaaaactacatcagcgcaagtcagaactcagttttacttgtccttgcatcaaatcaaacaacagaaactctcctgaaaaacgcagaaacaaaaaaaatctcaagttgcacctgtcactgcatcaattggttcttaaacaaggactagttacatacccatgcattgctacagtatttatatatcacataggtagggttttttatattatgcttgagtgtagaatataaacacaaaaatatacgtgttttattggttaaatggatgtgaatgtagagccaacgatcaag

SEQ ID NO: 217370 - DNA, 2164 bp, Zea Mays
aagagccaacataaagcaacgcccaggcatacacgacacgaaccaggcaaccagctgccgagggaggaaccctagcggaacaggtgacggcgtcgcgctaccggtgacggcgtcgcgctaccggtgacgggggatacggcggcatcgtccccctcggcccctcctccatccccggcgcggcggcgccagcagccgtcctgcagattaaaggagccctagcttttggaggatgacccagctgccttcaaagttcaaaaacaaaatgatggtggtgagggtggacgagaaccctgcgccggatggagagaactctcccctggacgatgagtacgtctcggccgacgatgagcacgttgacaatgaagacaaggagaccgatagcatcggcgactacgaaaaccccagtggggcgccccagttgaagaagggtccttggtcgcccgaagaggataagcgtcttaaagactacgtcgaggtacacggcgcggggaactggaataaggtgcagaagaatgccatgctcaaccgttgtggcaagagctgccgtctccgctggaccaaccacctcaggcccgatcttaagaaggatcctttcgacgctgaggaagaggaaaagataatcaagctttacatcaggtggggccccaagtggtccatgatggcctcatatttgcctggccgcacagataatgaaataaaaaacttttggaataccagaaaaaggagaaaacagagatgtggttcgcctctccatccagaatatatgctttctcagcttagtcataaagacatggactgtgaaactcctggagaatcacatggcaagaaacggtcaaatgagtgctcaaaagaaaaggttgttgatgtgcaagaacttgtggatgagttaattgtatttgagcaccttgactatggtaaggatacagtgtttccaaccagacctttgaaatgccatgcatctactagtagtgtgcaaattcctggtgccattgagaaaaccttttgtcccactgatttgaactatgtaatgacaaagaatcagtcggtgcatgttggtagtgccattggcagtggctatccagtatatggtggcagactctctacttcagggaccatattcggttccattcagacagagatcccttcgatccaaagttccagctatagcccaagtaatgactggttggctcaatgtccttcggcttgcattgagcaacggattccaatggaatgcaatacaatatctcagtcaaaagcttaccttatgatgcattcttcttcagctttctgtgcccctgaacatgaggcctgttctgaaactcaagctccagacttatgttcaggttcagatgctgttttcgaccccagccagtgttatccagttgctagtttttctgatcttgggatctcggatacactactaacaaaaggtctcttgaatgatatagcactagcaagtttgttgaatgttaatttgaaggaccagtcacatatcaacaggcaggaacctaccaatgatacatcactaggaggagcaagtttcttgaatgctaatttgaaggaccagtcacatctcaactggcaggaacatatgaatgagacatcaccagtagcaggtttattgaatgctaatttggaggagcagtcacatctcaactggcaggaacctaagaatgagtcatcaccagaagcaggtttcttgaatgctaatttggaggagcagtcacatctcaactggcccttgcaggaatgtgagccatggattgagagacaaatgttttgaccaatagtttgatccttgttacaagcctgacttcccatgttcctgagcagcagtttcctctactgcacaaccagggccagagtgagcaacaaccaagatattcttgtgagcgtgatggaaattacattttagttctctgccttcgctgtcttaagctctctgaagtattgtcttcgactttgctgggatgatgagctgctgccccgagacaacaacagtcagccagaccaaaatcacttaaatagttttaacaatgtattaagttttgtcttgttacctgctgtctggcgtctgccatgttttgtccactgttaaacttgtctaataatacccttttagggctaatttggaaagcctcaatgtcttaagttttgtcttggt

SEQ ID NO: 217371 - DNA, 1581 bp, Zea Mays
gtcgaggcgggattataagccaatgtaaccgaaggatgccttaacgaataacacgattcaaaatctttccccccttgttgcctgttgtgttcttccacgttctttgccaaattccggcttccttttccatgcccaagcatctcgttatccaagaccgtgacaagcaccacggcaccagtccgcgacaagtcaaccaaacgaaccaaaggcagagctgaacgcgaaagggagggagctcggatcggatgcggcggcgcgcggaggtggccgtggtgggcgcgggcgcggcggggctggtggccgcgcgcgagctgctccgcgagggccacaccgtgtccgtcttcgagaagtcaggccgcgtggggggcacctgggcgtacagtccgcgcgcggacgcggacccgctgggcagcgacccgggcgcccccggcgccgtgcacagcagcctgtatgcgtcgctgcgcaccaacctgccgcgcgagctcatgggcttctcgggcttcccgctggccgggcgggcgttcgccggcgatccgcgcacgttcccgggccaccgggaggtcctcgcctacctcgacgccttcgccgcggattccggcgtcgccccgcacgtcaggctccgagcccaagtgctgcgggtgaggccgctctgtccgggtcggggacagggggagaagtgggcggtggcgtggcgcggggaagacggcgacgtcgcggaggaggcattcgacgccgtcgtcgtctgcaatggccactgctcggtgcctctagtgcccaagatccgaggaattaacaagtggcggggaaagcaaatgcacagccacaattaccgcaccccggaaccattccaagatcagagtgttgtagtcgtaggattgggagccagcggaatcgacatcgctagagaaatctcacacgtggccaaggaggtgcacatctcagctagatactcggagggcaggctcggaaagattgaactctatcataacgcctggatgcacagcgagatagagtgcatccaagacgacggccaggtgcgctttgccgaaggctcatctgtggctgcagacaccattctttactgcacagggtaccgctaccattttccgttcctggacctggatgggttcaccgtcgacgacaaccgcgtcgggccactgtacaagcacgtcttcccacccaagcatgcacccaatctctgtttcgttgggctgccatacaagagcatcatcttccaggcactagagctggaatccaagtgggtcgccgccgtcctgtcggggcgtgccgagctgccggtggaggaggacatgacggccgacgtggaagaggagtaccagcgcatggaggacgccgggaagccgaagcgccacacccacacgctgtggcctcggtgggtggagtacctgaactgggtggcggaccaggtcggcgaggcgcacctggagcctaggaagtgcgagatgtatgagaaggcgctcaagtgcgtctggtccctggacgagggctaccgtgatcgatgggaagaagaaagcattggcagtggctgaggctcgccctaggatcaacaaatcaagcgta

SEQ ID NO: 217372 - DNA, 2731 bp, Zea Mays
gtgagatcaaaccatagattctttcattcagctctgatggcttcgttccattgcaaaccacctcccgttctgatttctgcgggcggaattccataaggccctcccccctcccctatcctcctccccttgccactccaattcctctgcaaaattttctcatggcagccgacgtttccatccgcactcgatccgcctcaaccacccgctaattcctcctagttctagacttctagtctcctctctctctctctctctctctctctcctgcgccgactcatcttcatcctcgtctcacctccctgctgctgctgacgctgctgccggcaagatcaaatcgttcaaaagggtttttctttttctttttgggcgatttcgtgctcaaattgacatcttctaaccagtccaatgcacttttcgtacccgtgtacaagaccctggatttcggcgaattctagatggatcatgtgttttaggtgattggtgctttcgacctcattagtgccttttgttcaattgctggacccaaggagcagagttctgtcgacatggcatctccaagaggaaggatgtcatttccccttcgttcctttctgatgatctgcctcatggctcagctgggagcttccaatgttgtactcatggcgaacaacactaccctgtcgttcgacgacgtcgaggcaatttttactccagcagtgaaaggttcaggtgtaaatggtgtcctttatgctgtggaacctatggatgcatgcagtccattgaaaacaaaagcgataggaggctctgtctcaccatttgcgttggttataagaggcggttgccatttcgatgacaaagttagaaatgctcagaatgctggattcaaggctgctgtagtatatgatactgaagacaacggtgtccttgtttcaatggctggaagctcgtctggagtccacatatatgccgtgtttgtctctaaagcgtcaggggaggagctgaagaaatattcaggccaaactgacgcagagttgtggataataccaacatacgcgaactcggcttggtcaatcatggcaatttcatttatatcactgcttgttatgtctgctgtcctagccgcgtgtttctttgcgaggagacaccagataagacgggacagggctcgacttccccaaactcgggagttccatggaatgaacagccggttagttaaagcaatgccaagtcttattttcacgaaagtgcaagaagacgactgcacatcagcaacatgcgccatttgcttggaagactacagtgctggagaaaagctaagggttctaccttgtcgacacaagttccacgcagcctgtgtggacctatggctcacctcctggagaacattctgccccgtatgcaagcgggacgcgaatgctggaacaccagacccccctgtatcagagtcgacgcctttgctctcatcatccgccattcgcttaccagaaccaaccgcttcggcttccttccggtctacagtggcagcagcagcgtctccccccaggccaatcagccggcatccgtcaccatcacggtccatatcccgcaagcactccgtttcgggttccagcatccctggcacccctatccccaggtttcatgcaagctcatcatctcctacctgcacaagtggaagcagtttggacctcgcaaacatgccgtcgtctccatggcctcgcgcttcgcaccttgcatctgctcactcttcgtgcggtggccgcctgtccccgccgatccacatcaggaatacctctgcagcgcacgtctcgcgctctgcctatggatctcccagccgttacgtaggctcgtcgcacatgtcccgtggatctccgagttgctactaccttggatcttcttcagggcagcagcatccttacctgaggcactgcaccttgtcaggcacgagcctgttcaccatggtgccccaatcaccgcaacagaaccagctgcagcacggtggagactcggaaaaagatctgtcagctgctgcaccattccgtcagctctactacctgcagcattgtccagattctggcacgtcgtctcagtcgcttccagggtgctgattcttcattcttgctgcaaaattcaccattttaacattgatggtggctccagtaaagctcccggccgtgaggaatcttacatggcaccgaattgacatgtggatttgagctcctcagttcaccatgatgatgagagaaaaaaggtgcgacagaattgcttgtaagaagagagaattgcaccccccagaatgtgtggcttcatcttgaagaagcaaatgcccatgtcgggtttcaccagcgtttagcgtgtactgatacagctctgtagtaattctagttgctgtttgtctatcgaggtttgagccggtagcattccttcctctcttttttgttttcctaattttgaattagttatatgacagacaaggttttcaagaaaagaaataacaagttttacccctgcatttttacagagaggtatgttgaactcaggatctttgccttgcctcgatgggatggttttttaccactgtgttgtttatggtcagtgaaatgtgcatgaagcctcgatggcacttgttctcccgttcagtatgaactacttagtaagtcgctagcagactagcaaattcactataggaaatttaaatttatgggggagttgctctgatgaggcggaaagattgttggtgccaagaaacgcagca

SEQ ID NO: 217373 - DNA, 2880 bp, Zea Mays
ttctttcattcagctctgatggcttcgttccattgcaaaccacctcccgttctgatttctgcgggcggaattccataaggccctcccccctcccctatcctcctccccttgccactccaattcctctgcaaaattttctcatggcagccgacgtttccatccgcactcgatccgcctcaaccacccgctaattcctcctagttctagacttctagtctcctctctctctctctctctctctctctcctgcgccgactcatcttcatcctcgtctcacctccctgctgctgctgacgctgctgccggcaagatcaaatcgttcaaaaggtgttttaggtgattggtgctttcgacctcattagtgccttttgttcaattgctggacccaaggagcagagttctgtcgacatggcatctccaagaggaaggatgtcatttccccttcgttcctttctgatgatctgcctcatggctcagctgggagcttccaatgttgtactcatggcgaacaacactaccctgtcgttcgacgacgtcgaggcaatttttactccagcagtgaaaggttcaggtgtaaatggtgtcctttatgctgtggaacctatggatgcatgcagtccattgaaaacaaaagcgataggaggctctgtctcaccatttgcgttggttataagaggcggttgccatttcgatgacaaagttagaaatgctcagaatgctggattcaaggctgctgtagtatatgatactgaagacaacggtgtccttgtttcaagtaatgatccagacatcatttcttttttttaccatagcatcagttacatgcaattctttatcagtacgcggctacaagcatttgattatttcttgtccataattctgattaaactgttaagaggaaaaataaatttgtaaagcagctctaaactattatatcggttccattgaaactgaaaggtagagaactgaagttatcaaacctcaatggtaaaacttttaccatttagagtagttggtgagtgcatatacttgcaatattaattaagccaggattattgcagtggctggaagctcgtctggagtccacatatatgccgtgtttgtctctaaagcgtcaggggaggagctgaagaaatattcaggccaaactgacgcagagttgtggataataccaacatacgcgaactcggcttggtcaatcatggcaatttcatttatatcactgcttgttatgtctgctgtcctagccgcgtgtttctttgcgaggagacaccagataagacgggacagggctcgacttccccaaactcgggagttccatggaatgaacagccggttagttaaagcaatgccaagtcttattttcacgaaagtgcaagaagacgactgcacatcagcaacatgcgccatttgcttggaagactacagtgctggagaaaagctaagggttctaccttgtcgacacaagttccacgcagcctgtgtggacctatggctcacctcctggagaacattctgccccgtatgcaagcgggacgcgaatgctggaacaccagacccccctgtatcagagtcgacgcctttgctctcatcatccgccattcgcttaccagaaccaaccgcttcggcttccttccggtctacagtggcagcagcagcgtctccccccaggccaatcagccggcatccgtcaccatcacggtccatatcccgcaagcactccgtttcgggttccagcatccctggcacccctatccccaggtttcatgcaagctcatcatctcctacctgcacaagtggaagcagtttggacctcgcaaacatgccgtcgtctccatggcctcgcgcttcgcaccttgcatctgctcactcttcgtgcggtggccgcctgtccccgccgatccacatcaggaatacctctgcagcgcacgtctcgcgctctgcctatggatctcccagccgttacgtaggctcgtcgcacatgtcccgtggatctccgagttgctactaccttggatcttcttcagggcagcagcatccttacctgaggcactgcaccttgtcaggcacgagcctgttcaccatggtgccccaatcaccgcaacagaaccagctgcagcacggtggagactcggaaaaagatctgtcagctgctgcaccattccgtcagctctactacctgcagcattgtccagattctggcacgtcgtctcagtcgcttccagggtgctgattcttcattcttgctgcaaaattcaccattttaacattgatggtggctccagtaaagctcccggccgtgaggaatcttacatggcaccgaattgacatgtggatttgagctcctcagttcaccatgatgatgagagaaaaaaggtgcgacagaattgcttgtaagaagagagaattgcaccccccagaatgtgtggcttcatcttgaagaagcaaatgcccatgtcgggtttcaccagcgtttagcgtgtactgatacagctctgtagtaattctagttgctgtttgtctatcgaggtttgagccggtagcattccttcctctcttttttgttttcctaattttgaattagttatatgacagacaaggttttcaagaaaagaaataacaagttttacccctgcatttttacagagaggtatgttgaactcaggatctttgccttgcctcgatgggatggttttttaccactgtgttgtttatggtcagtgaaatgtgcatgaagcctcgatggcacttgttctcccgttcagtatgaactacttagtaagtcgctagcagactagcaaattcactataggaaatttaaatttatgggggagttgctctgatgaggcggaaagattgttggtgccaagaaacgcagca

SEQ ID NO: 217374 - DNA, 1515 bp, Zea Mays
aagatttcacacgcattcagcaactttattttgcttcctggtttaatgatgttgcgtacattgaattttagttgagtgcatgcacttaaaacatcaccttgagttccacgcagcctgtgtggacctatggctcacctcctggagaacattctgccccgtatgcaagcgggacgcgaatgctggaacaccagacccccctgtatcagagtcgacgcctttgctctcatcatccgccattcgcttaccagaaccaaccgcttcggcttccttccggtctacagtggcagcagcagcgtctccccccaggccaatcagccggcatccgtcaccatcacggtccatatcccgcaagcactccgtttcgggttccagcatccctggcacccctatccccaggtttcatgcaagctcatcatctcctacctgcacaagtggaagcagtttggacctcgcaaacatgccgtcgtctccatggcctcgcgcttcgcaccttgcatctgctcactcttcgtgcggtggccgcctgtccccgccgatccacatcaggaatacctctgcagcgcacgtctcgcgctctgcctatggatctcccagccgttacgtaggctcgtcgcacatgtcccgtggatctccgagttgctactaccttggatcttcttcagggcagcagcatccttacctgaggcactgcaccttgtcaggcacgagcctgttcaccatggtgccccaatcaccgcaacagaaccagctgcagcacggtggagactcggaaaaagatctgtcagctgctgcaccattccgtcagctctactacctgcagcattgtccagattctggcacgtcgtctcagtcgcttccagggtgctgattcttcattcttgctgcaaaattcaccattttaacattgatggtggctccagtaaagctcccggccgtgaggaatcttacatggcaccgaattgacatgtggatttgagctcctcagttcaccatgatgatgagagaaaaaaggtgcgacagaattgcttgtaagaagagagaattgcaccccccagaatgtgtggcttcatcttgaagaagcaaatgcccatgtcgggtttcaccagcgtttagcgtgtactgatacagctctgtagtaattctagttgctgtttgtctatcgaggtttgagccggtagcattccttcctctcttttttgttttcctaattttgaattagttatatgacagacaaggttttcaagaaaagaaataacaagttttacccctgcatttttacagagaggtatgttgaactcaggatctttgccttgcctcgatgggatggttttttaccactgtgttgtttatggtcagtgaaatgtgcatgaagcctcgatggcacttgttctcccgttcagtatgaactacttagtaagtcgctagcagactagcaaattcactataggaaatttaaatttatgggggagttgctctgatgaggcggaaagattgttggtgccaagaaacgcagca

SEQ ID NO: 217375 - DNA, 1747 bp, Zea Mays
agcgagcaccgtcgtcgtccaaggtgatcccaatggcccatgtgcggctgcttctcccctccactagctccgatcacctagctagcctctcgctgtactacagatcggacaggggccgcgcaggcacaggcgcagcgtcccaaccaatcgtatttactccgatccgccccgccactgcacagccgccttctgccctccttccatcgcgctcgctcgctcgctctcctatataaacgccctgcagtcctgcagcacctaccagtccagtctcgcagagcagatagcatcagtgcctactgcggtactgcatagctagcttagcttggtcttcgatctcgaccagagccagagagtgtggtgtgaccgtgtgagcgacgatggggaagcacgtctgggcggcagcgctcatggcgctggccgtgattgtcgggctcggtgtgccccccggccgcatcgccgaggcgcgcaccttagagaaggacgacctgctgggcggcggcggtgactttggtgctggagagggaggaggcttcggtggtggtgctggtggaggtcttggaggtgggtttggtggaggaggaggccttgggggaggcggcggtgctggtggtggttttggtggcggggctggtcatggtggtggccttggaggtggcttcggaggtggaaaaggtggtggtgcaggtggaggtggtggtcttggagggggtgtaggcgggggcggcggccttggtacaggtggaggaggtggctttggaggtgggaaaggtggtggacttggcggaggtggtggccttggcagtggaggtggtgcaggcgtaggcggtggtcttggagggggtgccggtggaggcggcgaccttggaggtgggaaaggtggtggccttggtggagggggtggcctcggcggtggaggtggacttggcggtggtgcaggtgggggcggcggccttggtgccggtggaggaggtggctttggaggtgggaaaggtggtggtcttggtggaggtggtggcctcggtggtggaggtggtgcaggcgaaggcggtggtcttggagtaggtgccggtggaggaggtggactaggcggtggtgccggtgctggcggtggtctcggtggtggtgcaggcagtggtgtcggtggtgggtttggaggaggcaaaggcggaggctttggtggtgggattggcgggggcgggggcgcaggtggtggtgccggtggtgggttcggaggaggcaaaggtggcggttttggtggtggcaagggaggtggttttggcggaggcgccggtggtgggttcggaggaggcaaaggtggtggttttggcggtggcaagggaggtggtttcggcggaggtgcgggtggtggctttggaggaggcaagggtggtggttttggcggaggtgcaggtggtggcttcggaggtggcggaggttcgggtggtggcatcggtggtggactctagaggtggcgggagctcggcgcgcgcacgttgagtgcgtgcatgccatgaaattaaaaagcgatacatggagtgtgtggtgaaacttcagcttcatacatgactgcaggtggctgtcggcgttctttcctatgcacctcagcacagcacctggattttgacatgcatggcttggctatgtctcctcactctctctctctctctctctcttgtatttgttctcgacgtgtttgtctctgcgtcttagagcttgttcggctgcgatgaatggagcactgttgcag

SEQ ID NO: 217376 - DNA, 2072 bp, Zea Mays
agcgagcaccgtcgtcgtccaaggtgatcccaatggcccatgtgcggctgcttctcccctccactagctccgatcacctagctagcctctcgctgtactacagatcggacaggggccgcgcaggcacaggcgcagcgtcccaaccaatcgtatttactccgatccgccccgccactgcacagccgccttctgccctccttccatcgcgctcgctcgctcgctctcctatataaacgccctgcagtcctgcagcacctaccagtccagtctcgcagagcagatagcatcagtgcctactgcggtactgcatagctagcttagcttggtcttcgatctcgaccagagccagagagtgtggtgtgaccgtgtgagcgacgatggggaagcacgtctgggcggcagcgctcatggcgctggccgtgattgtcgggctcggtgtgccccccggccgcatcgccgaggcgcgcaccttagagaaggacgacctgctgggcggcggcggtgactttggtgctggagagggaggaggcttcggtggtggtgctggtggaggtcttggaggtgggtttggtggaggaggaggccttgggggaggcggcggtgctggtggtggttttggtggcggggctggtcatggtggtggccttggaggtggcttcggaggtggaaaaggtggtggtgcaggtggaggtggtggtcttggagggggtgtaggcgggggcggcggccttggtacaggtggaggaggtggctttggaggtgggaaaggtggtggacttggcggaggtggtggccttggcagtggaggtggtgcaggcgtaggcggtggtcttggagggggtgccggtggtgcaggcgaaggcggtggtcttggagtaggtgccggtggaggaggtggactaggcggtggtgccggtggcgggtttggtggtggcgcaggaggaggtgttggtggaggtggtggccttggtgacggtgcgggaggcggtgctggcggtggtgctggagctggcggtggtctcggtggtggtgcaggcagtggtgtcggtggtgggtttggaggaggcaaaggcggaggctttggtggtgggattggcgggggcgggggcgcaggtggtggtgccggtggtgggttcggaggaggcaaaggtggcggttttggtggtggcaagggaggtggttttggcggaggcgccggtggtgggttcggaggaggcaaaggtggtggttttggcggtggcaagggaggtggtttcggcggaggtgcgggtggtggctttggaggaggcaagggtggtggttttggcggaggtgcaggtggtggcttcggaggtggcggaggttcgggtggtggcatcggtggtggactctagaggtggcgggagctcggcgcgcgcacgttgagtgcgtgcatgccatgaaattaaaaagcgatacatggagtgtgtggtacggtatggacattgctagagttacattacatcatcactagtatatataaggttgactcttatttgtaagcctaatgaaagtgaataattggatgcgttatgtaagcctactctactatatatatgtttgttttggaaaatcgagggagtgtgttacttgactatccccaatcacactcataaaaacttgacttgtgtgttgtttgtactcgaccaattatatactacaatacatatttggtcatgcctgtgtgatcgctgtgctttgtgcttttaggaaggaatgcacgtgcgcgcaatgggtgttaatgagaaaatagaacacaagagagagtgcagcttcaaaattgataagttatcctgatatcgtcttggtattgtattgaatggtacacattagcagagagtgaaatatgtgataattcacaaaactggcgtacttgttagttccacgagtcttgtttttttttttgaaagggtaaatgatttagttaaaacacctctatttttttttaaaaaaaaaaaatcaattaaagcacaacattttgtgtcattaaaaaaatgattatccatttaagctgggccgttgtcgggttggaaatgggccaattcagtctctat

SEQ ID NO: 217377 - DNA, 1841 bp, Zea Mays
agcgagcaccgtcgtcgtccaaggtgatcccaatggcccatgtgcggctgcttctcccctccactagctccgatcacctagctagcctctcgctgtactacagatcggacaggggccgcgcaggcacaggcgcagcgtcccaaccaatcgtatttactccgatccgccccgccactgcacagccgccttctgccctccttccatcgcgctcgctcgctcgctctcctatataaacgccctgcagtcctgcagcacctaccagtccagtctcgcagagcagatagcatcagtgcctactgcggtactgcatagctagcttagcttggtcttcgatctcgaccagagccagagagtgtggtgtgaccgtgtgagcgacgatggggaagcacgtctgggcggcagcgctcatggcgctggccgtgattgtcgggctcggtgtgccccccggccgcatcgccgaggcgcgcaccttagagaaggacgacctgctgggcggcggcggtgactttggtgctggagagggaggaggcttcggtggtggtgctggtggaggtcttggaggtgggtttggtggaggaggaggccttgggggaggcggcggtgctggtggtggttttggtggcggggctggtcatggtggtggccttggaggtggcttcggaggtggaaaaggtggtggtgcaggtggaggtggtggtcttggagggggtgtaggaggtggctttggaggtgggaaaggtggactaggcggtggtgccggtggtgctggtggaggaggcggtgctggcggtggtgctggagctggcggtggtctcggtggtggtgcaggcagtggtgtcggtggtgggtttggaggaggcaaaggcggaggctttggtggtgggattggcgggggcgggggcgcaggtggtggtgccggtggtgggttcggaggaggcaaaggtggcggttttggtggtggcaagggaggtggttttggcggaggcgccggtggtgggttcggaggaggcaaaggtggtggtttcggcggaggtgcgggtggtggctttggaggaggcaagggtggtggttttggcggaggtgcaggtggtggcttcggaggtggcggaggttcgggtggtggcatcggtggtggactctagaggtggcgggagctcggcgcgcgcacgttgagtgcgtgcatgccatgaaattaaaaagcgatacatggagtgtgtggtacggtatggacattgctagagttacattacatcatcactagtatatataaggttgactcttatttgtaagcctaatgaaagtgaataattggatgcgttatgtaagcctactctactatatatatgtttgttttggaaaatcgagggagtgtgttacttgactatccccaatcacactcataaaaacttgacttgtgtgttgtttgtactcgaccaattatatactacaatacatatttggtcatgcctgtgtgatcgctgtgctttgtgcttttaggaaggaatgcacgtgcgcgcaatgggtgttaatgagaaaatagaacacaagagagagtgcagcttcaaaattgataagttatcctgatatcgtcttggtattgtattgaatggtacacattagcagagagtgaaatatgtgataattcacaaaactggcgtacttgttagttccacgagtcttgtttttttttttgaaagggtaaatgatttagttaaaacacctctatttttttttaaaaaaaaaaaatcaattaaagcacaacattttgtgtcattaaaaaaatgattatccatttaagctgggccgttgtcgggttggaaatgggccaattcagtctctat

SEQ ID NO: 217378 - DNA, 1725 bp, Zea Mays
ctgcggtcagagtcagagtggcctaggcgctagccgataagccccgcccaccgcgcgcgcgccgcggcaccataccgggatgggcgccatgggcatcgtcgtcagagcatgcgcgcctcccgctcccgccgccgcggccgcgccggcaccctccggctccagggacgccggtcaggcccagcggaggagcaagccctcgaggaccggccgtgtgcgcgtgctcggcggcactggccgtgtcggaggatccacggccaccgcactctccaaactctgccccaagctcggcatcctcgtcggtggcaggaaccgggagaaaggcgagtccattgcagccaagcttgggggccagcctgagttcgtccaggtcgacacccgcaacgcaggcatgttggaggaagcgctgcagggtcagtatcatactagcagtcatgtggtagctgttcgcggagttgccaaaccggaggcagctgcgacgccggcgaggcgctcgcgccccatccctctggcttccgtggccgtgtggagtctggttgccactggcgccgcaaatgctgccgagctatgggaccccttggccctgcacggatcatcaggactcgtcttggctgaccttggtattggagattggtttgggggtttgctgttttcagctgggcagcaggctaatgaggctgtccaagatcagttgtctgctcttagtttctctagcctagcagttatttttggtgctggacttgtaactagtttatctccttgtacactaagtgttctaccactaactctaggatatataggtgcatttggctcagggaaaggccgatccgaggttgttgggaattcaattgcattttcactaggactagcaacaaccttagccattcttggtgttgctgcttcttttgctggaaaggcttatggtcaggtaggacaagggctcccagtggctgcttccggtttggccattatcatgggattgaaccttctggaggtacttgaattgcaacttccctcatttttcagcgattttgaccctcgagctgctgcagctaacctcccttcaggtgtacaagcataccttgctggtcttacatttgcattggcagcatcaccttgcagcacacctgttcttgctacccttctgggatatgtcgccacttcaagagacccaattattggaggaagtttattgttgacatacacaacgggctatgttgcgcctcttcttattgcagcttcatttgctggagcactgcagtggtgcatttttacttggtggaggtgtttataccctactggacagggtgtttccagcaacatcaatggtcatgtagaccatggttggacaagaattgctaggcaccagtctgtttggcgtgcgaatgatatttggatgtgaagtagtgaaatgatggcaacaaagtttagccagatctctcagcgttgtataggcacgcaggacattttgatcgggacaagcaaagcaccttgacctaagtacagtagtctgcatcactgtatctgtatgggcctcgatacttggggccggtctaccctactaaaatgtatttctgggacagattgaaagagtatgaaatttatataagaccttgttcggttaatcccgttatccatgattggatggaactggaaaaaattaagatcactgtatctgtatgggcctcgatacttggggccggtctaccctactaaaatgtatttctg

SEQ ID NO: 217379 - DNA, 1426 bp, Zea Mays
gtcagagtggcctaggcgctagccgataagccccgcccaccgcgcgcgcgccgcggcaccataccgggatgggcgccatgggcatcgtcgtcagagcatgcgcgcctcccgctcccgccgccgcggccgcgccggcaccctccggctccagggacgccggtcaggcccagcggaggagcaagccctcgaggaccggccgtgtgcgcgtgctcggcggcactggccgtgtcggaggatccacggccaccgcactctccaaactctgccccaagctcggcatcctcgtcggtggcaggaaccgggagaaaggcgagtccattgcagccaagcttgggggccagcctgagttcgtccaggtcgacacccgcaacgcaggcatgttggaggaagcgctgcaggtggtagctgttcgcggagttgccaaaccggaggcagctgcgacgccggcgaggcgctcgcgccccatccctctggcttccgtggccgtgtggagtctggttgccactggcgccgcaaatgctgccgagctatgggaccccttggccctgcacggatcatcaggactcgtcttggctgaccttggtattggagattggtttgggggtttgctgttttcagctgggcagcaggctaatgaggctgtccaagatcagttgtctgctcttagtttctctagcctagcagttatttttggtgctggacttgtaactagtttatctccttgtacactaagtgttctaccactaactctaggatatataggtgcatttggctcagggaaaggccgatccgaggttgttgggaattcaattgcattttcactaggactagcaacaaccttagccattcttggtgttgctgcttcttttgctggaaaggcttatggtcaggtaggacaagggctcccagtggctgcttccggtttggccattatcatgggattgaaccttctggaggtacttgaattgcaacttccctcatttttcagcgattttgaccctcgagctgctgcagctaacctcccttcaggtgtacaagcataccttgctggtcttacatttgcattggcagcatcaccttgcagcacacctgttcttgctacccttctgggatatgtcgccacttcaagagacccaattattggaggaagtttattgttgacatacacaacgggctatgttgcgcctcttcttattgcagcttcatttgctggagcactgcagagtttgttgtcattcagaagatattcggcatggataaacccaatcaggaggcgtggattcgagtggtcgctctacactattttttatataattactctttatttataaacactaagttacgtgtggtttaggggacgtgggttctgcattattttttatataattattttttatttctaaacactaagatatgtatgatctgg

SEQ ID NO: 217380 - DNA, 5311 bp, Zea Mays
atgcgagtaccatgctgctcgttatgcaacgtcagatatgacgaggaggagcggacgccgctgctcctccactgcggacatggattctgccgcgcgtgcctctcccgcatgctagcggcagcccccggagccacgctgccgtgcccgcgatgccgccatctgaccgccgtaggcaactcggtctctgcgctgcggaagaacttccccattctctctctcctctccacatccccctcatccccgtctttcctccactccgactcggggtcatcctctgacggctccgaagacgaggacgacttcttcgcgcgccccagtcgccgccccgcgcccgcgcccgctgccgcaccgcccggatgcagcttcttcgacctcgcctcgcacccggacctcaagctcgcccgtcgcatcgggagcggcccgcccgggcccgccgggcaggaggtgtgggccggcacgctgtctcgtggcggtggggtcaagcggtgcaagcaccaggtggcagtgaagagggtgcccctggccgcaggggacgggctcgaggttgttcaagaggaggtggagcggctgaggcgcgcctccacatggtgtcggaacgtgtgcacattccatggtgctgtgagggtgggcggccacctctgtttcgtgatggatcgctatgtggggtctgtgcaggcggagatgcggcagaatggtggacgccttacgctggagcagattctcaggtatggagcagatattgctcgtggaatagcagaactccatgcagcgggtattgtttgtatgagcataaagccgtcaaacattcttttggatgcacatggacatgcattcgtttcggattacggtctttcagcaattctgaagaaccttactagtaggagagtacctgatgactccagtgctggcattgatgctacactgcttagccccaattatacagctcctgaggcatggggaccactgaagaagtcactgaatatgttttgggatagtgcaaacggtatatcaccagagtcagatgcatggagttttggttgcacgcttgtggaaatgtgtactggtgctgttccatgggctggactgagtgcagaggaaatatgtaagtctgttgtaaaagaaaagaagccaccgcctcaatattcaagagtagtaggtgtaggacttcctggggagctgtggaagatgattggtgaatgcttgcaattccgagcttcaagaagaccatccttccaggacatgctgaaaacttttcttcggcatcttctggacataccacggagcccacctgctagtcccgaaattgattttgcaaatgaaaacttgcccaatggcatgcaacctccaacaacctccatcttagagatggttcatgataatccaaatgccttgcatcatcttgtatgcgaaggagatgctgctggtgttagggatctacttgcaaaagctgcatcagagagaaacgatagtttaatccgttctctcttagaagcacaaaatacagatgggctcactgccctacatttagcatgccgccgaggctcggcagagcttgtggaagctattgttgcttaccaagagaatgtagatatattagataaggatgaagaccctcctatagtatttgctttggctgctggctctccacgatgtgttcgtgcacttgtaggcaggtctgctagtataaattctaggcttagagaaggcctgggtcctactcttgcccatgtctgtgctcatcatggtcagccggagtgcatgcaggagctgctgatggctggagctgatcctaacgcagtagacggggaaggtgaatctgtgctgcatattgccgtggccaggagatataccgattgtgctattgttatactggaaaatggaggctgcagatcgatgggcatatcaaattctcaacataaaacgccattgcatttatgtattgagacatggaacacagctgtggtaagaagatgggttgaagttgcatctttagaggatatagcagaaacgattgatgtacccagccctgttggtacagctttatgcatggcagcagctcttaaaaaggagcatgagaaagagttccataaggtccaggattactggacaatcatgttcttccatctattccagaccctgttcgttctaatagtaaaattacttctacttgcagagggtcgagagttagtaagaatattgcttgctgctggtgctgattctacggcacaagatgatccacactgtagaactgcattacatactgcagcaatgatcgatgatgtggagctggttaagattatactggaagcaggagttgatgttaatataagaaatgctcaaaatacaaccccactgcatgttgcacttaatagaggtgcaaactcatgtgttggcttgcttttagcagctggtgcaaactgcaacatacaggatgatgatggtgacaatgcttttcacatagctgctgatgcagcaaaaatgatacgtgaaaacctggcttggattgctcaaatgctactacagccgtcacctgctgttgatgtgagaaaccaccgaggttggacactacgagactttcttgagaggcttccacgagaatggatttatgaagaattgatggaaacacttgaagataaaggagtccatctctcaccaaccatgacctagaagcattggttttgtccagtctgttgttgacaatgaccaccttgctgtgtcattttgtactggagaagcccatgttttgacaagtgaagttatcaaagttattccattaaataggggccaacatgtgcaactcaagcctggtgtttcggaacctagtatttatctggatgctgagataattgaattagtaggtatactgaactggagatctaccatgtgtcttttatttggatggcgcggtcaatcacgggatagcattgggacagttctctgtgttgatgacgatggaatcttgagggttggtttcccaggagcttctaggggatggagagctgatcctgctgaaattgaaagggttgaagaatataaggttggtaactgggttcggattcgtccctcactgacggttgctgtacatggcatggagtcgattactcctggaagtgttgggattgtatactccatcagaccagatagcagtcttctattgggcctttgctatttgtccaatccatggctgtgtgaaccagaggaggttgaacacgtcgacccattcaagattggggaccaagtatgtgtaaagaggtctgttgcagagcccagatatgcatggggtggtgagactcatcacagtgttgggaaaataattgacatcgagagtgatggtctgctcatcattgatattcctaatcgggctgcgccatggcaagcagatccatcggacatggaaaagattgagaactttaaggttggcgattggattagagtcaaagcaacagttccttcacccaaatatggttgggaggatgtgactcgtaatagtattgggattgttcatagtctacaagatgatggggatgttggtgttgctttctgcttcagaagcaggctttttctttgctcggttgcagatgtcgagaaggcacagccatttgaagtaggggagaaggttcatgtgtcaccttccatatctgagccacgcctcgggtggttaagtgaaactgcagctactattggagccatatcaaggattgacatggatgggactttaaatatcaaggtttctggccgaaaaggcttgtggaaggttgctcctggtgacgctgagaggctttcagcatttgaagttggagattgggtccgcctgaaaccaagtattgggagcaggcctacctatgactggaatagtgttgggagaataagcattgcagtagtccatagcattcaggactctggttacttggagttagcaggttgtttcaggaatgggaaatggttaacccataatacagacattgagaaagtgcagaccttaaaaattggtcagcatgttcgattccgtgctggaatttcagagcctagatggggatggagagatgcgaaccctgattctagaggcgtcatcgctggtgtacatgctgatggagaggtaagggttgccttctttggtgtgcctggattgtggagaggcgaccctgcagatcttgaaattgagaatatctttgaggttggagagtgggttaggctgacgaacgatgtggaacaatggagatcgctcaaacctggtagcattggtgtggtgcatggggtgggatatcaaggtgatgcttgggatggaaccattcatgttgctttttgtggtgagcaggaaaggtggattgggccttctagccagcttgaaggagttagcaagtttgttgttgggcagcgtgttcgaatcagaggctgtatccgccagccaagatttggttggtccaaccataatcattcaagtatagggacaatctcatctattgacgcagatgggaagctgaggattcatacaccagctggtgccagggcttggttgatagacccagcagaggtggaagaagtggaggaggaggaagtctgtgttggggattgggtaaaggttaaggactccgttggaaccccagtttatcaatggggtgatgtgaaccacagcagcataggggtggtccaccgggctgatgatggagagctctggattgctttctgcttctgcgagaggctatggttatgcaaagcatgggaggtggaaaaagtgaggcccttcagacaaggtgacaaagtaaggatacgacctggtcttgtatcccccagatggggttgggggatggagacctacgcgagcaaaggcgaggttgtaggtgtggatgcaaatggaaagctgaggataaagtttcggtggagggatagactttggattggggaccctgctgatattgttcttgatgatgtccacttattgacggaggcttctaatggcttggctttttgttcataggcttgtggtattctttcgataccatatctgatatattgcacccatccattttgcagcatttcaaatttagcaaaatcttaacctgcagtggacttgcaagttgcacataactatcatcgcatcggcatgccagggtgtatttcatgttgataaccggggaatgagaagacaacgatagtgtagagctggtaaccatcacctagttttttcttctttggtttacatgtataattatgcctcctgacacctttttgggtttcagtgtatcatataccagtgtacaggttcggacctgaacattaatttaattgatagtggtcttgtatgtttacttga

SEQ ID NO: 217381 - DNA, 4106 bp, Zea Mays
cggaagggaaggctcgagagatcgggagtaatgacatagaggtgggaggatgaaccaagggagaaatggatggatgtagggataaacttctactttatatttatattagtagagatatagatagtttgaaagaaaatatagatttggaaatcgtgaaaaaacagctatcactcttacaagttggagtgagactgatcatacgcttcttcgcgtgtaacctcaacggctcaacctcaccgtgctcccattctagtctcctctccacttcattacacatccccgcgaaatcccggacccgacgcgaccaaccaccttgttcagtgaccccctcccccgcgcgatccaccgccggcgcgcgtgtaccctaaccaccgtgcggatctgggagcagctggcggcgctccctcaaatggtccccggcggcgaggggccccccggaaggcagaacagctgagatgcgacgcgacgcggtgccgccacccaccgccccctcagcctcctcctcgtcatccctcttcagcggcggcggcggcgagcggctgttcgagtctgggcccagcccgctcgtcttccttcccctgctcctgatccagggcggtggcatggacctctctcgcgtcggcgagaaactcctcagctctgttcgctcggcccgctccctcggcctcccaccgatccccacggcgccccctccccgccctgaggttccagaacgagctgcggcggcagcagctgctgcacgtgcgatcgccgggttgccacctcacgagaggatcaacctgccatccaattcggaggacttggtctccatctatgggagcaacccccagggccaaccggtggaggagctcgaggaggtgttctatgaggaggagtttgatccaataaagtatattctgcaaagtattccggaggaaggaggtggcgatgccacctatttcgataagcagtctacattgagattagagcagcttgacaagattgcagaaagattagcacaccatgttatgggtcatcatgaagaaatggtgaaggggatgcagttagtgatggaattagaacatgacttaaaggttgcaaatgtaatctgcatgaatggacgaaggcatataacctcttcgaagaatgaggtgtcgagggatctggttgtcaatgtaaaatcaaaaaagaaacaagctttgctggatgttcttcctatccttacagagcttcgtcatgctctagacatgcagatggaacttgaaacttttgttgagaaagaaaattactttcaggcattccaattattgcctgaatatttgcaaattttggagaattattcaggcctttctgctgtacaagaaatgggacgtggtatagaggcatggttagttcggacaatccaaaaattggacacccatttacttggtgtttgtcatatctttgatgcagaaaactatctaactgttgttgatgcatatgcactaatgggtgatgtcagtggcatggctgaaaagatgcagagtttcttcttgcaggaagtgctgtctcgaacacactatgtcctgaaagaaatgttggaagaggaggttggaaataatacacagaaaaataggtttacatatagtgatctttgtgttcaaattcctgaacccaaacttcgcctctgcttgttgagaaccctagagtttttattttcattgatgtgctcatactatactattatgagcttttcttcaggagataagaatattgactccaagggccaagatgaagcatataaggatggcacatctcagaatagcagcgaaactttagttaatttaggaagaggtcattcaagtgcagcagtcactcaggatggttctgcagctgaaaaaattgacagagcatcatcatctgaggtcagcaaccctgatactagtacatcagaaacaggttctccattctatcagcttagaacagatgctacgaaacttgttgcacaaacatttcaaagagggcgaagaaatctttggcagctggcaacaagtcgcttatctgttctattatctagttcggctgtttgttcaactagcacataccaattcctgaagaattatgaagatcttgccatcttcattttggctggcgaagcattttgtggatttgaagctagtgagttccgccagaagttgaagactgtctgtttgaactacatggtgtcctttcaccggcaaaatgtatatgcacttaagatggtactggaaaaggagtcttggacaataatgtccgctgaagcttcacaaataattagtttagcaggtctaactggtgatggtgctgcactgtgctctcctaccagtagaagtcctaagttgccaataaattgttaccatgggacaactacagccaactcaggaaaggaaaagctcggatttgcttcttggcttgtgattgaaaatccattttcttttaagctagaaaatggctctgccgaatccccaaagtccaatatgcttgttgactcatcagctagcaataatcatggcaatggaaacaattcatctttagatgaagagaatgaagaccttttagcggatttcattgatgaagatagtcagttgcctagtaggacaccaaaagcgaaaatggtaaaaggcaattctttacattggaaagatggagacatttcatcacagacaggctcatcactttctctattaaggatgatggacaaatacgccaggctgatgcaaaagctggaaattgtcaatgttgagctttttaagggtatctcccaactatttggcatcttttaccactacatatatgagacatttgggaaccaagacaagagtcaaagcagcaagcctttgcctgatcatcaatcatctcggcttaaagccgctttatcaaaaataacacaagactctgatcagtggacaaagccaaatactgtttcatattcaccttcatcccctttgtcaaaaaattcaacttttggtcaaatggatgtgatgcctactgcacctcccagttcaatgttcacctcctatgggttaaaggagagatgtgcagctgctgaaacattatcattggttgctcgaattttgaaccgatctagagcccatctacactcagtattgtctaaaaataacagttctgttgttgaggagttctttaggacactggtggactctgttccagatttgacagagcacattcacagaacgagtgcgcgtatgcttttgcatattgatgggtatccagataagattgcgaatgctaaatgggaggtaaaggagcttggaatagagcacaatggatatgttgatttgttactgggcgagttcaaacactacaaaacaagattggaccatggaggaatttctagggagctccaacaccttctgctagagtacggcgtagagagcatatcggaagttctagtcgaaggtctctctagagtgaagaggtgcaccgatgaagggcgtgctctgatgtcactcgacctccaggtactaattaatgggctgcagcacatcgtggcatcaaatgtgaggccgaagctgcagaccgtggacactttcataaaggcttactatctaccggagaccgagtacgtccactgggcgcggtctcatccagaattcagtacaagtcaggtagtcgggttggttaacctggtggccaccatgaaagggtggagacggaagacgagactagaaaccgtggagaagatcgaggcggggccatagactcggtgacaggaataggagggaatccataggagaggaaaccccttcctattcaattttgaatagcaaggtgttttctcccccatagatctactccatttccctgatcatcaaatcagccattagaaccatttttttgttgaacccgtcgcccgctcacccatattgtatatttttaagcgttgaccctgtattatatcaagcgagttgacactcccaagaaggaaaagaactgtgcaccaccctacatggaacattggctcaataaatatggctcgttcaaaaaaataataataatatagcagcattagcacccccttgcgcatggcgcagatgccattatgagcccgcacggatgcgtctcagaaacagtgtggcaaagttctg

SEQ ID NO: 217382 - DNA, 3849 bp, Zea Mays
ctactttatatttatattagtagagatatagatagtttgaaagaaaatatagatttggaaatcgtgaaaaaacagctatcactcttacaagttggagtgagactgatcatacgcttcttcgcgtgtaacctcaacggctcaacctcaccgtgctcccattctagtctcctctccacttcattacacatccccgcgaaatcccggacccgacgcgaccaaccaccttgttcagtgaccccctcccccgcgcgatccaccgccggcgcgcgtgtaccctaaccaccgtgcggatctgggagcagctggcggcgctccctcaaatggtccccggcggcgaggggccccccggaaggcagaacagctgagatgcgacgcgacgcggtgccgccacccaccgccccctcagcctcctcctcgtcatccctcttcagcggcggcggcggcgagcggctgttcgagtctgggcccagcccgctcgtcttccttcccctgctcctgatccagggcggtggcatggacctctctcgcgtcggcgagaaactcctcagctctgttcgctcggcccgctccctcggcctcccaccgatccccacggcgccccctccccgccctgaggttccagaacgagctgcggcggcagcagctgctgcacgtgcgatcgccgggttgccacctcacgagaggatcaacctgccatccaattcggaggacttggtctccatctatgggagcaacccccagggccaaccggtggaggagctcgaggaggtgttctatgaggaggagtttgatccaataaagtatattctgcaaagtattccggaggaaggaggtggcgatgccacctatttcgataagcagtctacattgagattagagcagcttgacaagattgcagaaagattagcacaccatgttatgggtcatcatgaagaaatggtgaaggggatgcagttagtgatggaattagaacatgacttaaaggttgcaaatgtaatctgcatgaatggacgaaggcatataacctcttcgaagaatgaggtgtcgagggatctggttgtcaatgtaaaatcaaaaaagaaacaagctttgctggatgttcttcctatccttacagagcttcgtcatgctctagacatgcagatggaacttgaaacttttgttgagaaagaaaattactttcaggcattccaattattgcctgaatatttgcaaattttggagaattattcaggcctttctgctgtacaagaaatgggacgtggtatagaggcatggttagttcggacaatccaaaaattggacacccatttacttggtgtttgtcatatctttgatgcagaaaactatctaactgttgttgatgcatatgcactaatgggtgatgtcagtggcatggctgaaaagatgcagagtttcttcttgcaggaagtgctgtctcgaacacactatgtcctgaaagaaatgttggaagaggaggttggaaataatacacagaaaaataggtttacatatagtgatctttgtgttcaaattcctgaacccaaacttcgcctctgcttgttgagaaccctagagtttttattttcattgatgtgctcatactatactattatgagcttttcttcaggagataagaatattgactccaagggccaagatgaagcatataaggatggcacatctcagaatagcagcgaaactttagttaatttaggaagaggtcattcaagtgcagcagtcactcaggatggttctgcagctgaaaaaattgacagagcatcatcatctgaggtcagcaaccctgatactagtacatcagaaacaggttctccattctatcagcttagaacagatgctacgaaacttgttgcacaaacatttcaaagagggcgaagaaatctttggcagctggcaacaagtcgcttatctgttctattatctagttcggctgtttgttcaactagcacataccaattcctgaagaattatgaagatcttgccatcttcattttggctggcgaagcattttgtggatttgaagctagtgagttccgccagaagttgaagactgtctgtttgaactacatggtgtcctttcaccggcaaaatgtatatgcacttaagatggtactggaaaaggagtcttggacaataatgtccgctgaagcttcacaaataattagtttagcaggtctaactggtgatggtgctgcactgtgctctcctaccagtagaagtcctaagttgccaataaattgttaccatgggacaactacagccaactcaggaaaggaaaagctcggatttgcttcttggcttgtgattgaaaatccattttcttttaagctagaaaatggctctgccgaatccccaaagtccaatatgcttgttgactcatcagctagcaataatcatggcaatggaaacaattcatctttagatgaagagaatgaagaccttttagcggatttcattgatgaagatagtcagttgcctagtaggacaccaaaagcgaaaatggtaaaaggcaattctttacattggaaagatggagacatttcatcacagacaggctcatcactttctctattaaggatgatggacaaatacgccaggctgatgcaaaagctggaaattgtcaatgttgagctttttaagggtatctcccaactatttggcatcttttaccactacatatatgagacatttgggaaccaagacaagagtcaaagcagcaagcctttgcctgatcatcaatcatctcggcttaaagccgctttatcaaaaataacacaagactctgatcagtggacaaagccaaatactgtttcatattcaccttcatcccctttgtcaaaaaattcaacttttggtcaaatggatgtgatgcctactgcacctcccagttcaatgttcacctcctatgggttaaaggagagatgtgcagctgctgaaacattatcattggttgctcgaattttgaaccgatctagagcccatctacactcagtattgtctaaaaataacagttctgttgttgaggagttctttaggacactggtggactctgttccagatttgacagagcacattcacagaacgagtgcgcgtatgcttttgcatattgatgggtatccagataagattgcgaatgctaaatgggaggtaaaggagcttggaatagagcacaatggatatgttgatttgttactgggcgagttcaaacactacaaaacaagattggaccatggaggaatttctagggagctccaacaccttctgctagagtacggcgtagagagcatatcggaagttctagtcgaaggtctctctagagtgaagaggtgcaccgatgaagggcgtgctctgatgtcactcgacctccaggtactaattaatgggctgcagcacatcgtggcatcaaatgtgaggccgaagctgcagaccgtggacactttcataaaggcttactatctaccggagaccgagtacgtccactgggcgcggtctcatccagaattcagtacaagtcaggtagtcgggttggttaacctggtggccaccatgaaagggtggagacggaagacgagactagaaaccgtggagaagatcgaggcggggccatagactcggtgacagcgttgaccctgtattatatcaagcgagttgacactcccaagaaggaaaagaactgtgcaccaccctacatggaacattggctcaataaatatggctcgttcaaaaaaataataataatatagcagcattagcacccccttgcgcatggcgcagatgccattatgagcccgcacggatgcgtctcagaaacagtgtggcaaagttctg

SEQ ID NO: 217383 - DNA, 3966 bp, Zea Mays
ctagtctcctctccacttcattacacatccccgcgaaatcccggacccgacgcgaccaaccaccttgttcagtgaccccctcccccgcgcgatccaccgccggcgcgcgtgtaccctaaccaccgtgcggatctgggagcagctggcggcgctccctcaaatggtccccggcggcgaggggccccccggaaggcagaacagctgagatgcgacgcgacgcggtgccgccacccaccgccccctcagcctcctcctcgtcatccctcttcagcggcggcggcggcgagcggctgttcgagtctgggcccagcccgctcgtcttccttcccctgctcctgatccagggcggtggcatggacctctctcgcgtcggcgagaaactcctcagctctgttcgctcggcccgctccctcggcctcccaccgatccccacggcgccccctccccgccctgaggttccagaacgagctgcggcggcagcagctgctgcacgtgcgatcgccgggttgccacctcacgagaggatcaacctgccatccaattcggaggacttggtctccatctatgggagcaacccccagggccaaccggtggaggagctcgaggaggtgttctatgaggaggagtttgatccaataaagtatattctgcaaagtattccggaggaaggaggtggcgatgccacctatttcgataagcagtctacattgagattagagcagcttgacaagattgcagaaagattagcacaccatgttatgggtcatcatgaagaaatggtgaaggggatgcagttagtgatggaattagaacatgacttaaaggttgcaaatgtaatctgcatgaatggacgaaggcatataacctcttcgaagaatgaggtgtcgagggatctggttgtcaatgtaaaatcaaaaaagaaacaagctttgctgtttttgtgtaatgcaggatgttcttcctatccttacagagcttcgtcatgctctagacatgcagatggaacttgaaacttttgttgagaaagaaaattactttcaggcattccaattattgcctgaatatttgcaaattttggagaattattcaggcctttctgctgtacaagaaatgggacgtggtatagaggcatggttagttcggacaatccaaaaattggacacccatttacttggtgtttgtcatatctttgatgcagaaaactatctaactgttgttgatgcatatgcactaatgggtgatgtcagtggcatggctgaaaagatgcagagtttcttcttgcaggaagtgctgtctcgaacacactatgtcctgaaagaaatgttggaagaggaggttggaaataatacacagaaaaataggtttacatatagtgatctttgtgttcaaattcctgaacccaaacttcgcctctgcttgttgagaaccctagagtttttattttcattgatgtgctcatactatactattatgagcttttcttcaggagataagaatattgactccaagggccaagatgaagcatataaggatggcacatctcagaatagcagcgaaactttagttaatttaggaagaggtcattcaagtgcagcagtcactcaggatggttctgcagctgaaaaaattgacagagcatcatcatctgaggtcagcaaccctgatactagtacatcagaaacaggttctccattctatcagcttagaacagatgctacgaaacttgttgcacaaacatttcaaagagggcgaagaaatctttggcagctggcaacaagtcgcttatctgttctattatctagttcggctgtttgttcaactagcacataccaattcctgaagaattatgaagatcttgccatcttcattttggctggcgaagcattttgtggatttgaagctagtgagttccgccagaagttgaagactgtctgtttgaactacatggtgtcctttcaccggcaaaatgtatatgcacttaagatggtactggaaaaggagtcttggacaataatgtccgctgaagcttcacaaataattagtttagcaggtctaactggtgatggtgctgcactgtgctctcctaccagtagaagtcctaagttgccaataaattgttaccatgggacaactacagccaactcaggaaaggaaaagctcggatttgcttcttggcttgtgattgaaaatccattttcttttaagctagaaaatggctctgccgaatccccaaagtccaatatgcttgttgactcatcagctagcaataatcatggcaatggaaacaattcatctttagatgaagagaatgaagaccttttagcggatttcattgatgaagatagtcagttgcctagtaggacaccaaaagcgaaaatggtaaaaggcaattctttacattggaaagatggagacatttcatcacagacaggctcatcactttctctattaaggatgatggacaaatacgccaggctgatgcaaaagctggaaattgtcaatgttgagctttttaagggtatctcccaactatttggcatcttttaccactacatatatgagacatttgggaaccaagacaagagtcaaagcagcaagcctttgcctgatcatcaatcatctcggcttaaagccgctttatcaaaaataacacaagactctgatcagtggacaaagccaaatactgtttcatattcaccttcatcccctttgtcaaaaaattcaacttttggtcaaatggatgtgatgcctactgcacctcccagttcaatgttcacctcctatgggttaaaggagagatgtgcagctgctgaaacattatcattggttgctcgaattttgaaccgatctagagcccatctacactcagtattgtctaaaaataacagttctgttgttgaggagttctttaggacactggtggactctgttccagatttgacagagcacattcacagaacgagtgcgcgtatgcttttgcatattgatgggtatccagataagattgcgaatgctaaatgggaggtaaaggagcttggaatagagcacaatggatatgttgatttgttactgggcgagttcaaacactacaaaacaagattggaccatggaggaatttctagggagctccaacaccttctgctagagtacggcgtagagagcatatcggaagttctagtcgaaggtctctctagagtgaagaggtgcaccgatgaagggcgtgctctgatgtcactcgacctccaggtactaattaatgggctgcagcacatcgtggcatcaaatgtgaggccgaagctgcagaccgtggacactttcataaaggcttactatctaccggagaccgagtacgtccactgggcgcggtctcatccagaattcagtacaagtcaggtagtcgggttggttaacctggtggccaccatgaaagggtggagacggaagacgagactagaaaccgtggagaagatcgaggcggggccatagactcggtgacaggtttttttttttttttttttgctgtgttgtttgcttcagctgcacatagagctgtaatttcccccctcattttcttttggtttgatgacccaggaataggagggaatccataggagaggaaaccccttcctattcaattttgaatagcaaggtgttttctcccccatagatctactccatttccctgatcatcaaatcagccattagaaccatttttttgttgaacccgtcgcccgctcacccatattgtatatttttaagcgttgaccctgtattatatcaagcgagttgacactcccaagaaggaaaagaactgtgcaccaccctacatggaacattggctcaataaatatggctcgttcaaaaaaataataataatatagcagcattagcacccccttgcgcatggcgcagatgccattatgagcccgcacggatgcgtctcagaaacagtgtggcaaagttctg

SEQ ID NO: 217384 - DNA, 3736 bp, Zea Mays
tcattacacatccccgcgaaatcccggacccgacgcgaccaaccaccttgttcagtgaccccctcccccgcgcgatccaccgccggcgcgcgtgtaccctaaccaccgtgcggatctgggagcagctggcggcgctccctcaaatggtccccggcggcgaggggccccccggaaggcagaacagctgagatgcgacgcgacgcggtgccgccacccaccgccccctcagcctcctcctcgtcatccctcttcagcggcggcggcggcgagcggctgttcgagtctgggcccagcccgctcgtcttccttcccctgctcctgatccagggcggtggcatggacctctctcgcgtcggcgagaaactcctcagctctgttcgctcggcccgctccctcggcctcccaccgatccccacggcgccccctccccgccctgaggttccagaacgagctgcggcggcagcagctgctgcacgtgcgatcgccgggttgccacctcacgagaggatcaacctgccatccaattcggaggacttggtctccatctatgggagcaacccccagggccaaccggtggaggagctcgaggaggtgttctatgaggaggagtttgatccaataaagtatattctgcaaagtattccggaggaaggaggtggcgatgccacctatttcgataagcagtctacattgagattagagcagcttgacaagattgcagaaagattagcacaccatgttatgggtcatcatgaagaaatggtgaaggggatgcagttagtgatggaattagaacatgacttaaaggttgcaaatgtaatctgcatgaatggacgaaggcatataacctcttcgaagaatgaggtgtcgagggatctggttgtcaatgtaaaatcaaaaaagaaacaagctttgctggatgttcttcctatccttacagagcttcgtcatgctctagacatgcagatggaacttgaaacttttgttgagaaagaaaattactttcaggcattccaattattgcctgaatatttgcaaattttggagaattattcaggcctttctgctgtacaagaaatgggacgtggtatagaggcatggttagttcggacaatccaaaaattggacacccatttacttggtgtttgtcatatctttgatgcagaaaactatctaactgttgttgatgcatatgcactaatgggtgatgtcagtggcatggctgaaaagatgcagagtttcttcttgcaggaagtgctgtctcgaacacactatgtcctgaaagaaatgttggaagaggaggttggaaataatacacagaaaaataggtttacatatagtgatctttgtgttcaaattcctgaacccaaacttcgcctctgcttgttgagaaccctagagtttttattttcattgatgtgctcatactatactattatgagcttttcttcaggagataagaatattgactccaagggccaagatgaagcatataaggatggcacatctcagaatagcagcgaaactttagttaatttaggaagaggtcattcaagtgcagcagtcactcaggatggttctgcagctgaaaaaattgacagagcatcatcatctgaggtcagcaaccctgatactagtacatcagaaacaggttctccattctatcagcttagaacagatgctacgaaacttgttgcacaaacatttcaaagagggcgaagaaatctttggcagctggcaacaagtcgcttatctgttctattatctagttcggctgtttgttcaactagcacataccaattcctgaagaattatgaagatcttgccatcttcattttggctggcgaagcattttgtggatttgaagctagtgagttccgccagaagttgaagactgtctgtttgaactacatggtgtcctttcaccggcaaaatgtatatgcacttaagatggtactggaaaaggagtcttggacaataatgtccgctgaagcttcacaaataattagtttagcaggtctaactggtgatggtgctgcactgtgctctcctaccagtagaagtcctaagttgccaataaattgttaccatgggacaactacagccaactcaggaaaggaaaagctcggatttgcttcttggcttgtgattgaaaatccattttcttttaagctagaaaatggctctgccgaatccccaaagtccaatatgcttgttgactcatcagctagcaataatcatggcaatggaaacaattcatctttagatgaagagaatgaagaccttttagcggatttcattgatgaagatagtcagttgcctagtaggacaccaaaagcgaaaatggtaaaaggcaattctttacattggaaagatggagacatttcatcacagacaggctcatcactttctctattaaggatgatggacaaatacgccaggctgatgcaaaagctggaaattgtcaatgttgagctttttaagggtatctcccaactatttggcatcttttaccactacatatatgagacatttgggaaccaagacaagagtcaaagcagcaagcctttgcctgatcatcaatcatctcggcttaaagccgctttatcaaaaataacacaagactctgatcagtggacaaagccaaatactgtttcatattcaccttcatcccctttgtcaaaaaattcaacttttggtcaaatggatgtgatgcctactgcacctcccagttcaatgttcacctcctatgggttaaaggtatccagataagattgcgaatgctaaatgggaggtaaaggagcttggaatagagcacaatggatatgttgatttgttactgggcgagttcaaacactacaaaacaagattggaccatggaggaatttctagggagctccaacaccttctgctagagtacggcgtagagagcatatcggaagttctagtcgaaggtctctctagagtgaagaggtgcaccgatgaagggcgtgctctgatgtcactcgacctccaggtactaattaatgggctgcagcacatcgtggcatcaaatgtgaggccgaagctgcagaccgtggacactttcataaaggcttactatctaccggagaccgagtacgtccactgggcgcggtctcatccagaattcagtacaagtcaggtagtcgggttggttaacctggtggccaccatgaaagggtggagacggaagacgagactagaaaccgtggagaagatcgaggcggggccatagactcggtgacaggtttttttttttttttttttgctgtgttgtttgcttcagctgcacatagagctgtaatttcccccctcattttcttttggtttgatgacccaggaataggagggaatccataggagaggaaaccccttcctattcaattttgaatagcaaggtgttttctcccccatagatctactccatttccctgatcatcaaatcagccattagaaccatttttttgttgaacccgtcgcccgctcacccatattgtatatttttaagcgttgaccctgtattatatcaagcgagttgacactcccaagaaggaaaagaactgtgcaccaccctacatggaacattggctcaataaatatggctcgttcaaaaaaataataataatatagcagcattagcacccccttgcgcatggcgcagatgccattatgagcccgcacggatgcgtctcagaaacagtgtggcaaagttctg

SEQ ID NO: 217385 - DNA, 3098 bp, Zea Mays
ctaaaaatcaccatcctattttcgattgatgtcttgaggaggaaattattagtgacaatgtgacatatttttgtgtaatgcaggatgttcttcctatccttacagagcttcgtcatgctctagacatgcagatggaacttgaaacttttgttgagaaagaaaattactttcaggcattccaattattgcctgaatatttgcaaattttggagaattattcaggcctttctgctgtacaagaaatgggacgtggtatagaggcatggttagttcggacaatccaaaaattggacacccatttacttggtgtttgtcatatctttgatgcagaaaactatctaactgttgttgatgcatatgcactaatgggtgatgtcagtggcatggctgaaaagatgcagagtttcttcttgcaggaagtgctgtctcgaacacactatgtcctgaaagaaatgttggaagaggaggttggaaataatacacagaaaaataggtttacatatagtgatctttgtgttcaaattcctgaacccaaacttcgcctctgcttgttgagaaccctagagtttttattttcattgatgtgctcatactatactattatgagcttttcttcaggagataagaatattgactccaagggccaagatgaagcatataaggatggcacatctcagaatagcagcgaaactttagttaatttaggaagaggtcattcaagtgcagcagtcactcaggatggttctgcagctgaaaaaattgacagagcatcatcatctgaggtcagcaaccctgatactagtacatcagaaacaggttctccattctatcagcttagaacagatgctacgaaacttgttgcacaaacatttcaaagagggcgaagaaatctttggcagctggcaacaagtcgcttatctgttctattatctagttcggctgtttgttcaactagcacataccaattcctgaagaattatgaagatcttgccatcttcattttggctggcgaagcattttgtggatttgaagctagtgagttccgccagaagttgaagactgtctgtttgaactacatggtgtcctttcaccggcaaaatgtatatgcacttaagatggtactggaaaaggagtcttggacaataatgtccgctgaagcttcacaaataattagtttagcaggtctaactggtgatggtgctgcactgtgctctcctaccagtagaagtcctaagttgccaataaattgttaccatgggacaactacagccaactcaggaaaggaaaagctcggatttgcttcttggcttgtgattgaaaatccattttcttttaagctagaaaatggctctgccgaatccccaaagtccaatatgcttgttgactcatcagctagcaataatcatggcaatggaaacaattcatctttagatgaagagaatgaagaccttttagcggatttcattgatgaagatagtcagttgcctagtaggacaccaaaagcgaaaatggtaaaaggcaattctttacattggaaagatggagacatttcatcacagacaggctcatcactttctctattaaggatgatggacaaatacgccaggctgatgcaaaagctggaaattgtcaatgttgagctttttaagggtatctcccaactatttggcatcttttaccactacatatatgagacatttgggaaccaagacaagagtcaaagcagcaagcctttgcctgatcatcaatcatctcggcttaaagccgctttatcaaaaataacacaagactctgatcagtggacaaagccaaatactgtttcatattcaccttcatcccctttgtcaaaaaattcaacttttggtcaaatggatgtgatgcctactgcacctcccagttcaatgttcacctcctatgggttaaaggagagatgtgcagctgctgaaacattatcattggttgctcgaattttgaaccgatctagagcccatctacactcagtattgtctaaaaataacagttctgttgttgaggagttctttaggacactggtggactctgttccagatttgacagagcacattcacagaacgagtgcgcgtatgcttttgcatattgatgggtatccagataagattgcgaatgctaaatgggaggtaaaggagcttggaatagagcacaatggatatgttgatttgttactgggcgagttcaaacactacaaaacaagattggaccatggaggaatttctagggagctccaacaccttctgctagagtacggcgtagagagcatatcggaagttctagtcgaaggtctctctagagtgaagaggtgcaccgatgaagggcgtgctctgatgtcactcgacctccaggtactaattaatgggctgcagcacatcgtggcatcaaatgtgaggccgaagctgcagaccgtggacactttcataaaggcttactatctaccggagaccgagtacgtccactgggcgcggtctcatccagaattcagtacaagtcaggtagtcgggttggttaacctggtggccaccatgaaagggtggagacggaagacgagactagaaaccgtggagaagatcgaggcggggccatagactcggtgacaggtttttttttttttttttttgctgtgttgtttgcttcagctgcacatagagctgtaatttcccccctcattttcttttggtttgatgacccaggaataggagggaatccataggagaggaaaccccttcctattcaattttgaatagcaaggtgttttctcccccatagatctactccatttccctgatcatcaaatcagccattagaaccatttttttgttgaacccgtcgcccgctcacccatattgtatatttttaagcgttgaccctgtattatatcaagcgagttgacactcccaagaaggaaaagaactgtgcaccaccctacatggaacattggctcaataaatatggctcgttcaaaaaaataataataatatagcagcattagcacccccttgcgcatggcgcagatgccattatgagcccgcacggatgcgtctcagaaacagtgtggcaaagttctg

SEQ ID NO: 217386 - DNA, 2223 bp, Zea Mays
atccacatggttttgagatgaaacgaacaaggccttaaggtataaatctgtgtgtatatacctctcagctctccatacaatgcaccggtgtgacacgatgacaacgaaaataaacacgctctttggttgatgcttgcttgttcgtcctctaaaccacaccgcccggtgaaggcactaggcgcccaattctctcccgctctcccctctgctgcaagtctgcaaccgcagcagcacgtccatttcacgtgccctttcctccctccctttcccctgcccccacgccacctccgttcgccgccgcccgccgcgccggcgatggcgatgaccgaagggcttgtgcctattacgcggacctacctcgcgcgctactacgacaagtacccgctgcccccgctgcccgacgccactacggacctcgccgcccggctccgtgctctctccgccgacctcgctgccgttgctcccatcgccccagatgaggagctcttggaacaagaagcagctggcatacctgcccacaaaattgatgagaatttgtggaagaaccgagaacaaatggaagaaattcttttcttgattaacacatcccatcgtcctgtggctcttcaacagaagtccaccccagaagatgctgagatagtttgtacacttgatgatatagaagctaaattgaaggatatgttgaagaacttagaacaatttcagttgaaaaatgctgacaatgttttcaatacagttatgacatacatgccccaagattttcggggtactctaatcaggcaacagcgagaacgctcagagagaaataagcaagcagaggtagatgctctggttagtgctggtggaagcattcatgatcgatatgcattgttatggaaacagcaaatggaaaggagggtgcaattagcacagcttggttctgcaacaggtgtatataagactcttgttaggtatttggtcggtgttccacaggttttattggattttattcgacaaataaatgacgataatgggcctatggaagaacaaagagaacgttatggtccagccctttacacccttacaaaactggtgcttgcaattcggttgtatttgcatgtctctttggcacgatatggacaaaggaaaatagagaaggatgacgctgctgtgttgcagcaagctgtggttatctacaccaaggagtttttgaagttcactgaattcattggtgaggtctttgtgaatgcaccattctttatatctgctgaggatgcaggtgccgtggatgcaaggaaaagtgatgagtacaaagaaactattattccagctggaaagacacatgaggtcattttgagtgttgaagctgtaaactcatacatcgcatgggacttttccttgcaacaaggggccctcaacatggtattggacattggctttcatgtggagtacattagcccttcaggggagaaaactttaattcttccataccgacgatatgaagctgaccaaggtaatttttgcactgtttcatcgggatcatacaaacttgtgtgggacaattcatattcttcattcttcaaaaaggtccttcggtacaaggtggatgctgtgccaccggttgttgagccggccttgtcagccacggaactctgaagaggtctgtcttaatataatgatgtaacgagggccgatgcatgcccgagtatagctgtacaaatgtttctgaaggccccacacggtgctgttactgattattccatcgaatgctttgcggtgttctgatcgcagcattccctgatagctcgctgtcagagcgcatggatatgtactttgtgtgcacatggctgcggccacttgtcaccgacgaatgcctgaatataacagaaatgtattatatcgaccaataagagcatgtctgattggaagctgtcgtggtttgtttttattttttttctcgaatacggagagctgtgtgtcattgcaccaggaagaggaagagctgtggacgtgctccctggaaagagcatcccctttggctaccaattgttgaatttgccagtccatattttagcgcttcggatctgctcagatcccgattctgtttggatgaattgagctttgctttccccaacgaaaatacagaagcacggtattttctgttagtgttttatgggcttggcctatataaatatttactaattctaaaaatatatattagatagcctagcggttaaggcttct

SEQ ID NO: 217387 - DNA, 1993 bp, Zea Mays
cgaaaataaacacgctctttggttgatgcttgcttgttcgtcctctaaaccacaccgcccggtgaaggcactaggcgcccaattctctcccgctctcccctctgctgcaagtctgcaaccgcagcagcacgtccatttcacgtgccctttcctccctccctttcccctgcccccacgccacctccgttcgccgccgcccgccgcgccggcgatggcgatgaccgaagggcttgtgcctattacgcggacctacctcgcgcgctactacgacaagtacccgctgcccccgctgcccgacgccactacggacctcgccgcccggctccgtgctctctccgccgacctcgctgccgttgctcccatcgccccagatgaggagctcttggaacaagaagcagctggcatacctgcccacaaaattgatgagaatttgtggaagaaccgagaacaaatggaagaaattcttttcttgattaacacatcccatcgtcctgtggctcttcaacagaagtccaccccagaagatgctgagatagtttgtacacttgatgatatagaagctaaattgaaggatatgttgaagaacttagaacaatttcagttgaaaaatgctgacaatgttttcaatacagttatgacatacatgccccaagattttcggggtactctaatcaggcaacagcgagaacgctcagagagaaataagcaagcagaggtagatgctctggttagtgctggtggaagcattcatgatcgatatgcattgttatggaaacagcaaatggaaaggcctatggaagaacaaagagaacgttatggtccagccctttacacccttacaaaactggtgcttgcaattcggttgtatttgcatgtctctttggcacgatatggacaaaggaaaatagagaaggatgacgctgctgtgttgcagcaagctgtggttatctacaccaaggagtttttgaagttcactgaattcattggtgaggtctttgtgaatgcaccattctttatatctgctgaggatgcaggtgccgtggatgcaaggaaaagtgatgagtacaaagaaactattattccagctggaaagacacatgaggtcattttgagtgttgaagctgtaaactcatacatcgcatgggacttttccttgcaacaaggggccctcaacatggacattggctttcatgtggagtacattagcccttcaggggagaaaactttaattcttccataccgacgatatgaagctgaccaaggtaatttttgcactgtttcatcgggatcatacaaacttgtgtgggacaattcatattcttcattcttcaaaaaggtccttcggtacaaggtggatgctgtgccaccggttgttgagccggccttgtcagccacggaactctgaagaggtctgtcttaatataatgatgtaacgagggccgatgcatgcccgagtatagctgtacaaatgtttctgaaggccccacacggtgctgttactgattattccatcgaatgctttgcggtgttctgatcgcagcattccctgatagctcgctgtcagagcgcatggatatgtactttgtgtgcacatggctgcggccacttgtcaccgacgaatgcctgaatataacagaaatgtattatatcgaccaataagagcatgtctgattggaagctgtcgtggtttgtttttattttttttctcgaatacggagagctgtgtgtcattgcaccaggaagaggaagagctgtggacgtgctccctggaaagagcatcccctttggctaccaattgttgaatttgccagtccatattttagcgcttcggatctgctcagatcccgattctgtttggatgaattgagctttgctttccccaacgaaaatacagaagcacggtattttctgttagtgttttatgggcttggcctatataaatatttactaattctaaaaatatatattagatagcctagcggttaaggcttct

SEQ ID NO: 217388 - DNA, 2063 bp, Zea Mays
ctctttggttgatgcttgcttgttcgtcctctaaaccacaccgcccggtgaaggcactaggcgcccaattctctcccgctctcccctctgctgcaagtctgcaaccgcagcagcacgtccatttcacgtgccctttcctccctccctttcccctgcccccacgccacctccgttcgccgccgcccgccgcgccggcgatggcgatgaccgaagggcttgtgcctattacgcggacctacctcgcgcgctactacgacaagtacccgctgcccccgctgcccgacgccactacggacctcgccgcccggctccgtgctctctccgccgacctcgctgccgttgctcccatcgccccagatgaggagctcttggaacaagaagcagctggcatacctgcccacaaaattgatgagaatttgtggaagaaccgagaacaaatggaagaaattcttttcttgattaacacatcccatcgtcctgtggctcttcaacagaagtccaccccagaagatgctgagatagtttgtacacttgatgatatagaagctaaattgaaggatatgttgaagaacttagaacaatttcagttgaaaaatgctgacaatgttttcaatacagttatgacatacatgccccaagattttcggggtactctaatcaggcaacagcgagaacgctcagagagaaataagcaagcagaggtagatgctctggttagtgctggtggaagcattcatgatcgatatgcattgttatggaaacagcaaatggaaaggagggtgcaattagcacagcttggttctgcaacaggtgtatataagactcttgttaggtatttggtcggtgttccacaggttttattggattttattcgacaaataaatgacgataatgggcctatggaagaacaaagagaacgttatggtccagccctttacacccttacaaaactggtgcttgcaattcggttgtatttgcatgtctctttggcacgatatggacaaaggaaaatagagaaggatgacgctgctgtgttgcagcaagctgtggttatctacaccaaggagtttttgaagttcactgaattcattggtgaggtctttgtgaatgcaccattctttatatctgctgaggatgcaggtgccgtggatgcaaggaaaagtgatgagtacaaagaaactattattccagctggaaagacacatgaggtcattttgagtgttgaagctgtaaactcatacatcgcatgggacttttccttgcaacaaggggccctcaacatggacattggctttcatgtggagtacattagcccttcaggggagaaaactggtaatttttgcactgtttcatcgggatcatacaaacttgtgtgggacaattcatattcttcattcttcaaaaaggtccttcggtacaaggtggatgctgtgccaccggttgttgagccggccttgtcagccacggaactctgaagaggtctgtcttaatataatgatgtaacgagggccgatgcatgcccgagtatagctgtacaaatgtttctgaaggccccacacggtgctgttactgattattccatcgaatgctttgcggtgttctgatcgcagcattccctgatagctcgctgtcagagcgcatggatatgtactttgtgtgcacatggctgcggccacttgtcaccgacgaatgcctgaatataacagaaatgtattatatcgaccaataagagcatgtctgattggaagctgtcgtggtttgtttttattttttttctcgaatacggagagctgtgtgtcattgcaccaggaagaggaagagctgtggacgtgctccctggaaagagcatcccctttggctaccaattgttgaatttgccagtccatattttagcgcttcggatctgctcagatcccgattctgtttggatgaattgagctttgctttccccaacgaaaatacagaagcacggtattttctgttagtgttttatgggcttggcctatataaatatttactaattctaaaaatatatattagatagcctagcggttaaggcttct

SEQ ID NO: 217389 - DNA, 2017 bp, Zea Mays
gttgatgcttgcttgttcgtcctctaaaccacaccgcccggtgaaggcactaggcgcccaattctctcccgctctcccctctgctgcaagtctgcaaccgcagcagcacgtccatttcacgtgccctttcctccctccctttcccctgcccccacgccacctccgttcgccgccgcccgccgcgccggcgatggcgatgaccgaagggcttgtgcctattacgcggacctacctcgcgcgctactacgacaagtacccgctgcccccgctgcccgacgccactacggacctcgccgcccggctccgtgctctctccgccgacctcgctgccgttgctcccatcgccccagatgaggagctcttggaacaagaagcagctggcatacctgcccacaaaattgatgagaatttgtggaagaaccgagaacaaatggaagaaattcttttcttgattaacacatcccatcgtcctgtggctcttcaacagaagtccaccccagaagatgctgagatagtttgtacacttgatgatatagaagctaaattgaaggatatgttgaagaacttagaacaatttcagttgaaaaatgctgacaatgttttcaatacagttatgacatacatgccccaagattttcggggtactctaatcaggcaacagcgagaacgctcagagagaaataagcaagcagaggtagatgctctggttagtgctggtggaagcattcatgatcgatatgcattgttatggaaacagcaaatggaaaggagggtgcaattagcacagcttggttctgcaacaggtgtatataagactcttgttaggtatttggtcggtgttccacaggttttattggattttattcgacaaataaatgacgataatgggcctatggaagaacaaagagaacgttatggtccagccctttacacccttacaaaactggtgcttgcaattcggttgtatttgcatgtctctttggcacgatatggacaaaggaaaatagagaaggatgacgctgctgtgttgcagcaagctgtggttatctacaccaaggagtttttgaagttcactgaattcattggtgaggtctttgtgaatgcaccattctttatatctgctgaggatgcaggtgccgtggatgcaaggaaaagtgatgagtacaaagaaactattattccagctggaaagacacatgaggtcattttgagtgttgaagctgtaaactcatacatcgcatgggacttttccttgcaacaaggggccctcaacatggacattggctttcatgtggagtacattagcccttcaggggagaaaactttaattcttccataccgacgatatgaagctgaccaagtccttcggtacaaggtggatgctgtgccaccggttgttgagccggccttgtcagccacggaactctgaagaggtctgtcttaatataatgatgtaacgagggccgatgcatgcccgagtatagctgtacaaatgtttctgaaggccccacacggtgctgttactgattattccatcgaatgctttgcggtgttctgatcgcagcattccctgatagctcgctgtcagagcgcatggatatgtactttgtgtgcacatggctgcggccacttgtcaccgacgaatgcctgaatataacagaaatgtattatatcgaccaataagagcatgtctgattggaagctgtcgtggtttgtttttattttttttctcgaatacggagagctgtgtgtcattgcaccaggaagaggaagagctgtggacgtgctccctggaaagagcatcccctttggctaccaattgttgaatttgccagtccatattttagcgcttcggatctgctcagatcccgattctgtttggatgaattgagctttgctttccccaacgaaaatacagaagcacggtattttctgttagtgttttatgggcttggcctatataaatatttactaattctaaaaatatatattagatagcctagcggttaaggcttct

SEQ ID NO: 217390 - DNA, 2050 bp, Zea Mays
gaaggcactaggcgcccaattctctcccgctctcccctctgctgcaagtctgcaaccgcagcagcacgtccatttcacgtgccctttcctccctccctttcccctgcccccacgccacctccgttcgccgccgcccgccgcgccggcgatggcgatgaccgaagggcttgtgcctattacgcggacctacctcgcgcgctactacgacaagtacccgctgcccccgctgcccgacgccactacggacctcgccgcccggctccgtgctctctccgccgacctcgctgccgttgctcccatcgccccagatgaggagctcttggaacaagaagcagctggcatacctgcccacaaaattgatgagaatttgtggaagaaccgagaacaaatggaagaaattcttttcttgattaacacatcccatcgtcctgtggctcttcaacagaagtccaccccagaagatgctgagatagtttgtacacttgatgatatagaagctaaattgaaggatatgttgaagaacttagaacaatttcagttgaaaaatgctgacaatgttttcaatacagttatgacatacatgccccaagattttcggggtactctaatcaggcaacagcgagaacgctcagagagaaataagcaagcagaggtagatgctctggttagtgctggtggaagcattcatgatcgatatgcattgttatggaaacagcaaatggaaaggagggtgcaattagcacagcttggttctgcaacaggtgtatataagactcttgttaggtatttggtcggtgttccacaggttttattggattttattcgacaaataaatgacgataatgggcctatggaagaacaaagagaacgttatggtccagccctttacacccttacaaaactggtgcttgcaattcggttgtatttgcatgtctctttggcacgatatggacaaaggaaaatagagaaggatgacgctgctgtgttgcagcaagctgtggttatctacaccaaggagtttttgaagttcactgaattcattggtgaggtctttgtgaatgcaccattctttatatctgctgaggatgcaggtgccgtggatgcaagtgatgagtacaaagaaactattattccagctggaaagacacatgaggtcattttgagtgttgaagctgtaaactcatacatcgcatgggacttttccttgcaacaaggggccctcaacatggtattggacattggctttcatgtggagtacattagcccttcaggggagaaaactttaattcttccataccgacgatatgaagctgaccaaggtaatttttgcactgtttcatcgggatcatacaaacttgtgtgggacaattcatattcttcattcttcaaaaaggtccttcggtacaaggtggatgctgtgccaccggttgttgagccggccttgtcagccacggaactctgaagaggtctgtcttaatataatgatgtaacgagggccgatgcatgcccgagtatagctgtacaaatgtttctgaaggccccacacggtgctgttactgattattccatcgaatgctttgcggtgttctgatcgcagcattccctgatagctcgctgtcagagcgcatggatatgtactttgtgtgcacatggctgcggccacttgtcaccgacgaatgcctgaatataacagaaatgtattatatcgaccaataagagcatgtctgattggaagctgtcgtggtttgtttttattttttttctcgaatacggagagctgtgtgtcattgcaccaggaagaggaagagctgtggacgtgctccctggaaagagcatcccctttggctaccaattgttgaatttgccagtccatattttagcgcttcggatctgctcagatcccgattctgtttggatgaattgagctttgctttccccaacgaaaatacagaagcacggtattttctgttagtgttttatgggcttggcctatataaatatttactaattctaaaaatatatattagatagcctagcggttaaggcttct

SEQ ID NO: 217391 - DNA, 1251 bp, Zea Mays
ctattctggaccatcattcctgagcaggaggacacaattcagtttatgtgcacgagctcgcgtcatcggtccttgcatcatttctgaagttgtttaagaagtgggtgttgtggttgaaacaagagtggtgtcctcatcatctgagatggtgccagagatcctgtagatgacgctatctatacgatccctgcatgaattagtgtccggcgttgggtcagacaagacatggtcgatgagggcataccgcatgagagcaagcaacacttgattacatcagcaggcataattgttgaaggaggacgcgaggatgacaatcaccaatgatcgaacgttgggagcaacggctgtctggatgtggaggtcattttgagtgttgaagctgtaaactcatacatcgcatgggacttttccttgcaacaaggggccctcaacatggacattggctttcatgtggagtacattagcccttcaggggagaaaactttaattcttccataccgacgatatgaagctgaccaaggtaatttttgcactgtttcatcgggatcatacaaacttgtgtgggacaattcatattcttcattcttcaaaaaggtccttcggtacaaggtggatgctgtgccaccggttgttgagccggccttgtcagccacggaactctgaagaggtctgtcttaatataatgatgtaacgagggccgatgcatgcccgagtatagctgtacaaatgtttctgaaggccccacacggtgctgttactgattattccatcgaatgctttgcggtgttctgatcgcagcattccctgatagctcgctgtcagagcgcatggatatgtactttgtgtgcacatggctgcggccacttgtcaccgacgaatgcctgaatataacagaaatgtattatatcgaccaataagagcatgtctgattggaagctgtcgtggtttgtttttattttttttctcgaatacggagagctgtgtgtcattgcaccaggaagaggaagagctgtggacgtgctccctggaaagagcatcccctttggctaccaattgttgaatttgccagtccatattttagcgcttcggatctgctcagatcccgattctgtttggatgaattgagctttgctttccccaacgaaaatacagaagcacggtattttctgttagtgttttatgggcttggcctatataaatatttactaattctaaaaatatatattagatagcctagcggttaaggcttct

SEQ ID NO: 217392 - DNA, 3819 bp, Zea Mays
taggatcaaaaccgtctcgccgctgcaataatcttttgtcaattcttaatccctcgcgtcgacagcgacagcggaaccaactcacgttgccgcggcttcctccatcgaagtcggggaggcgcggtggcggacaggtgtgccagatctgcggcgacggcgtgggcaccacggcggagggggacgtcttcgccgcctgcgacgtctgcgggtttccggtgtgccgcccctgctacgagtacgagcgcaaggacggcacgcaggcgtgcccccagtgcaagaccaagtacaagcgccacaaggggagcccggcgatccgtggggaggaaggagacgacactgatgccgatagcgacttcaactaccctgcatctggcaatgaagaccagaagcagaagattgccgacagaatgcgcagctggcgcatgaacgctgggggcagcggggatgttggtcgccccaagtatgacagtggcgagatcgggcttaccaagtatgacagtggcgagatccctcggggatacatcccatcagtcactaacagccagatctcaggagaaatccctggtgcttcccctgaccatcatatgatgtccccaactgggaacattggcaagcgtgctccatttccctatgtgaaccattcgccaaatccgtcaagggagttctctggtagcattgggaatgttgcctggaaagagagggttgatggctggaaaatgaagcaggacaaggggacgattcccatgacgaatggcacaagcattgctccctctgagggtcggggtgttggtgatattgatgcatcaactgattacaacatggaagatgccttattgaacgacgaaactcgacagcctctatctaggaaagttccacttccttcctccaggataaatccatacaggatggtcattgtgctgcgattgattgttctaagcatcttcttgcactaccgtatcacaaatcctgtgcgcaatgcatacccattatggcttctatctgttatatgtgagatctggtttgctctttcgtggatattggatcagttccctaagtggtttccaatcaaccgggagacgtaccttgataggctggcattaaggtatgaccgggaaggtgagccatctcagttggctgctgttgacattttcgtcagtacagtcgacccaatgaaggagcctcctcttgtcactgccaataccgtgctatccattcttgctgtggattaccctgtggataaggtctcttgctatgtatctgatgatggagctgcgatgctgacatttgatgcactagctgagacttcagagtttgctagaaaatgggtaccatttgttaagaagtacaacattgaacctagagctcctgaatggtacttctcccagaaaattgattacttgaaggacaaagtgcacccttcatttgttaaagaccgccgggccatgaagagagaatatgaagaattcaaagttagggtaaatggccttgttgctaaggcacagaaagttcctgaggaaggatggatcatgcaagatggcacaccatggccaggaaacaataccagggaccatcctggaatgattcaggttttccttggtcacagtggtggccttgatactgagggcaatgagctaccccgtttggtctatgtttctcgtgaaaagcgtcctggattccagcatcacaagaaagctggtgccatgaatgctcttgttcgtgtctcagctgtgcttaccaatggacaatacatgttgaatcttgattgtgatcactacattaacaacagtaaggctctcagggaagctatgtgcttccttatggaccctaacctaggaaggagtgtctgctacgtccagtttccccagagattcgatggcattgacaggaatgatcgatatgccaacaggaacaccgtgtttttcgatattaacttgagaggtcttgatggcatccaaggaccagtttatgtcggaactggctgtgttttcaaccgaacagctctatatggttatgagcccccaattaagcagaagaagggtggtttcttgtcatcactatgtggcggtaggaagaaggcaagcaaatcaaagaagggctcggacaagaagaagtcgcagaagcatgtggacagttctgtgccagtattcaaccttgaagatatagaggagggagttgaaggcgctggatttgacgacgagaaatcacttcttatgtctcaaatgagcctggagaagagatttggccagtccgcagcgtttgttgcctccactctgatggagtatggtggtgttcctcagtccgcaactccggagtctcttctgaaagaagctatccatgttataagctgtggctatgaggacaagactgaatggggaactgagatcgggtggatctacggttctgtgacagaagacattctcaccggattcaagatgcacgcgcgaggctggcggtcgatctactgcatgcccaagcggccagctttcaaggggtctgcccccatcaatctttcggaccgtctgaaccaggtgctccggtgggctcttgggtccgtggagatcctcttcagccggcactgccccctgtggtacggctacggagggcggctcaagttcctggagagattcgcgtacatcaacaccaccatctacccgctcacgtccatcccgcttctcatctactgcatcctgcccgccatctgtctgctcaccggaaagttcatcattccagagatcagcaacttcgccagcatctggttcatctccctcttcatctcgatcttcgccacgggcatcctggagatgaggtggagcggggtgggcatcgacgagtggtggaggaacgagcagttctgggtgatcgggggcatctccgcgcacctcttcgccgtgttccagggcctgctcaaggtgctggccggcatcgacaccaacttcaccgtcacctccaaggcctcggacgaggacggcgacttcgcggagctgtacatgttcaagtggacgacgctcctgatcccgcccaccaccatcctgatcatcaacctggtcggcgtcgtcgccggcatctcctacgccatcaacagcggataccagtcgtggggcccgctcttcggcaagctcttcttcgccttctgggtcatcgtccacctgtacccgttcctcaagggcctcatgggcaggcagaaccgcaccccgaccatcgtcgtcgtctgggccatcctgctggcgtccatcttctccttgctgtgggttcgcatcgaccccttcaccacccgcgtcactggcccggatacccagacgtgtggcatcaactgctagggaagtggaaggtttgtactttgtagaaacggaggaataccacgtgccatctgttgtctgttaagttatatatatataagcagcaagtggcgttatttacagctacgtacagaccagtggatattgtttaccacaaagttttacttgtgttaatatgcattcttttgttgatataatttatactttgtggagagttgctgacagacgagttttgtatgctacgaaaaacaaagaaattactccctccgtccagtgaagcaagtcgttttagcattgcaaggcgttagagtagtaacatgagagattacaagaataccctccattaaatgtaaagattcttgtgtcacatacggatgatgtagctagtcatctcagcatttattgattttttatccatcaggcgccaaaagtagaaatgtgtacacaggcacacgcgccaaacacattaacaaaaacgaaaaacaggcacacgcgccaaacacattaacaaaaacgaaaaaca

SEQ ID NO: 217393 - DNA, 3865 bp, Zea Mays
taggatcaaaaccgtctcgccgctgcaataatcttttgtcaattcttaatccctcgcgtcgacagcgacagcggaaccaactcacgttgccgcggcttcctccatcgaagtcggggaggcgcggtggcggacaggtgtgccagatctgcggcgacggcgtgggcaccacggcggagggggacgtcttcgccgcctgcgacgtctgcgggtttccggtgtgccgcccctgctacgagtacgagcgcaaggacggcacgcaggcgtgcccccagtgcaagaccaagtacaagcgccacaaggggagcccggcgatccgtggggaggaaggagacgacactgatgccgatagcgacttcaactaccctgcatctggcaatgaagaccagaagcagaagattgccgacagaatgcgcagctggcgcatgaacgctgggggcagcggggatgttggtcgccccaagtatgacagtggcgagatcgggcttaccaagtatgacagtggcgagatccctcggggatacatcccatcagtcactaacagccagatctcaggagaaatccctggtgcttcccctgaccatcatatgatgtccccaactgggaacattggcaagcgtgctccatttccctatgtgaaccattcgccaaatccgtcaagggagttctctggtagcattgggaatgttgcctggaaagagagggttgatggctggaaaatgaagcaggacaaggggacgattcccatgacgaatggcacaagcattgctccctctgagggtcggggtgttggtgatattgatgcatcaactgattacaacatggaagatgccttattgtgagtttcaacaccctccttcagctcactcatgttttacaggatggaacgacgaaactcgacagcctctatctaggaaagttccacttccttcctccaggataaatccatacaggatggtcattgtgctgcgattgattgttctaagcatcttcttgcactaccgtatcacaaatcctgtgcgcaatgcatacccattatggcttctatctgttatatgtgagatctggtttgctctttcgtggatattggatcagttccctaagtggtttccaatcaaccgggagacgtaccttgataggctggcattaaggtatgaccgggaaggtgagccatctcagttggctgctgttgacattttcgtcagtacagtcgacccaatgaaggagcctcctcttgtcactgccaataccgtgctatccattcttgctgtggattaccctgtggataaggtctcttgctatgtatctgatgatggagctgcgatgctgacatttgatgcactagctgagacttcagagtttgctagaaaatgggtaccatttgttaagaagtacaacattgaacctagagctcctgaatggtacttctcccagaaaattgattacttgaaggacaaagtgcacccttcatttgttaaagaccgccgggccatgaagagagaatatgaagaattcaaagttagggtaaatggccttgttgctaaggcacagaaagttcctgaggaaggatggatcatgcaagatggcacaccatggccaggaaacaataccagggaccatcctggaatgattcaggttttccttggtcacagtggtggccttgatactgagggcaatgagctaccccgtttggtctatgtttctcgtgaaaagcgtcctggattccagcatcacaagaaagctggtgccatgaatgctcttgttcgtgtctcagctgtgcttaccaatggacaatacatgttgaatcttgattgtgatcactacattaacaacagtaaggctctcagggaagctatgtgcttccttatggaccctaacctaggaaggagtgtctgctacgtccagtttccccagagattcgatggcattgacaggaatgatcgatatgccaacaggaacaccgtgtttttcgatattaacttgagaggtcttgatggcatccaaggaccagtttatgtcggaactggctgtgttttcaaccgaacagctctatatggttatgagcccccaattaagcagaagaagggtggtttcttgtcatcactatgtggcggtaggaagaaggcaagcaaatcaaagaagggctcggacaagaagaagtcgcagaagcatgtggacagttctgtgccagtattcaaccttgaagatatagaggagggagttgaaggcgctggatttgacgacgagaaatcacttcttatgtctcaaatgagcctggagaagagatttggccagtccgcagcgtttgttgcctccactctgatggagtatggtggtgttcctcagtccgcaactccggagtctcttctgaaagaagctatccatgttataagctgtggctatgaggacaagactgaatggggaactgagatcgggtggatctacggttctgtgacagaagacattctcaccggattcaagatgcacgcgcgaggctggcggtcgatctactgcatgcccaagcggccagctttcaaggggtctgcccccatcaatctttcggaccgtctgaaccaggtgctccggtgggctcttgggtccgtggagatcctcttcagccggcactgccccctgtggtacggctacggagggcggctcaagttcctggagagattcgcgtacatcaacaccaccatctacccgctcacgtccatcccgcttctcatctactgcatcctgcccgccatctgtctgctcaccggaaagttcatcattccagagatcagcaacttcgccagcatctggttcatctccctcttcatctcgatcttcgccacgggcatcctggagatgaggtggagcggggtgggcatcgacgagtggtggaggaacgagcagttctgggtgatcgggggcatctccgcgcacctcttcgccgtgttccagggcctgctcaaggtgctggccggcatcgacaccaacttcaccgtcacctccaaggcctcggacgaggacggcgacttcgcggagctgtacatgttcaagtggacgacgctcctgatcccgcccaccaccatcctgatcatcaacctggtcggcgtcgtcgccggcatctcctacgccatcaacagcggataccagtcgtggggcccgctcttcggcaagctcttcttcgccttctgggtcatcgtccacctgtacccgttcctcaagggcctcatgggcaggcagaaccgcaccccgaccatcgtcgtcgtctgggccatcctgctggcgtccatcttctccttgctgtgggttcgcatcgaccccttcaccacccgcgtcactggcccggatacccagacgtgtggcatcaactgctagggaagtggaaggtttgtactttgtagaaacggaggaataccacgtgccatctgttgtctgttaagttatatatatataagcagcaagtggcgttatttacagctacgtacagaccagtggatattgtttaccacaaagttttacttgtgttaatatgcattcttttgttgatataatttatactttgtggagagttgctgacagacgagttttgtatgctacgaaaaacaaagaaattactccctccgtccagtgaagcaagtcgttttagcattgcaaggcgttagagtagtaacatgagagattacaagaataccctccattaaatgtaaagattcttgtgtcacatacggatgatgtagctagtcatctcagcatttattgattttttatccatcaggcgccaaaagtagaaatgtgtacacaggcacacgcgccaaacacattaacaaaaacgaaaaacaggcacacgcgccaaacacattaacaaaaacgaaaaaca

SEQ ID NO: 217394 - DNA, 1351 bp, Zea Mays
aaaagcagtactgcagtagaaaaaaaactccctagaggtcgaccgagacccctgcggacctgcgcttcggccgttgcggaccgcaggagtgacgattccatggcggaggagatggcgcaggcgcaaccgagactcacggcgccacgttcggtccgctgtattgtcaagtggagcggcgattaccaacaagggcgagctggagagcatcaacgaggagaacctacggtcggcatgtgcgcagctgcggcatgccatgtccgaatctgacggcgatggcgccatggagaaggttctgggaatggactggagtaggaagcccggagatcctgtcgacccggccgttgacgcggagtggatcgcggggatagctaggctggggctcgacactaacttcgtcgtcgtgcacggggccgggtcttttggccactttcaagcaagtagatctggagttcataaaggagggttacattcgacactggtcaaggctggctttgttgctacaagaatttcagtgacatctctcaaccaggaaattgttagagccctagcaagagaaggaataccatctgttgggatgtcaccatttgcttgtgggtggtctacccaacaaagaaaacttgcatcagcaaatgcttctcaaatatttcagtcactccatgcaggttttgtcccagttttgcacggtgatgcagttcttgatgaattattggactgtaccatattgagtggggatgtcattatacgacatcttgcacagcttctgagtccgaaatatgtagtatttctgacagatgtccatggagtgtatgatcgccctccaactgactcaaatgcagtacttctgagagaaatagaggtggatgacattggaggctggtcgattgtaaaacctgcattgctgcaaggcaacactaaaggagtggagatatcagttgcagcacatgacaccaccggtgggatggagaccaaaatactggaggctgcagtgatagctaggcttggaatagacgtgtatattaccaaggctggaacagaacactcgctgagggccttgaagggagatgtgagcaccgactcggaagattggcttggaactattatacgctcttccaaatagatttcttgttgcaaaaacattcggactggtttactggcgattttcccgatgttatatgagcagtgatgagccttgggctttcgatgatgatccagcacgggtctattccctactgtggtcgtagtttggtttacaagcgtcagcctgatgttacaaatgccgttcagtaaatttgttttgttttctgaaaagataagatgcattggtcgcaagagaggaaaaaattgatttttg

SEQ ID NO: 217395 - DNA, 1557 bp, Zea Mays
aaaagcagtactgcagtagaaaaaaaactccctagaggtcgaccgagacccctgcggacctgcgcttcggccgttgcggaccgcaggagtgacgattccatggcggaggagatggcgcaggcgcaaccgagactcacggcgccacgttcggtccgctgtattgtcaagctaggtggagcggcgattaccaacaagggcgagctggagagcatcaacgaggagaacctacggtcggcatgtgcgcagctgcggcatgccatgtccgaatctgacggcgatggcgccatggagaaggttctgggaatggactggagtaggaagcccggagatcctgtcgacccggccgttgacgcggagtggatcgcggggatagctaggctggggctcgacactaacttcgtcgtcgtgcacggggccgggtcttttggccactttcaagcaagtagatctggagttcataaaggagggttacattcgacactggtcaaggctggctttgttgctacaagaatttcagtgaggccaattatgacattgtgacatctctcaaccaggaaattgttagagccctagcaagagaaggaataccatctgttgggatgtcaccatttgcttgtgggtggtctacccaacaaagaaaacttgcatcagcaaatgcttctcaaatatttcagtcactccatgcaggttttgtcccagttttgcacggtgatgcagttcttgatgaattattggactgtaccatattgagtggggatgtcattatacgacatcttgcacagcttctgagtccgaaatatgtagtatttctgatgtccatggagtgtatgatcgccctccaactgactcaaatgcagtacttctgagagaaataggttagtattcacctggttgatttttatctgcccataatatctagcctgtactttttgatgtgtattagtcattatgcgaggaaacaggacaacaaaggtaatgcaattgtcatcattcaattcttgggtaaaacatggaaatatgcttcttcaacaaattctagctgacttgtgttagttaacagaggtggatgacattggaggctggtcgattgtaaaacctgcattgctgcaaggcaacactaaaggagtggagatatcagttgcagcacatgacaccaccggtgggatggagaccaaaatactggaggctgcagtgatagctaggcttggaatagacgtgtatattaccaaggctggaacagaacactcgctgagggccttgaagggagatgtgagcaccgactcggaagattggcttggaactattatacgctcttccaaatagatttcttgttgcaaaaacattcggactggtttactggcgattttcccgatgttatatgagcagtgatgagccttgggctttcgatgatgatccagcacgggtctattccctactgtggtcgtagtttggtttacaagcgtcagcctgatgttacaaatgccgttcagtaaatttgttttgttttctgaaaagataagatgcattggtcgcaagagaggaaaaaattgatttttg

SEQ ID NO: 217396 - DNA, 1352 bp, Zea Mays
aaaagcagtactgcagtagaaaaaaaactccctagaggtcgaccgagacccctgcggacctgcgcttcggccgttgcggaccgcaggagtgacgattccatggcggaggagatggcgcaggcgcaaccgagactcacggcgccacgttcggtccgctgtattgtcaagctaggtggagcggcgattaccaacaagggcgagctggagagcatcaacgaggagaacctacggtcggcatgtgcgcagctgcggcatgccatgtccgaatctgacggcgatggcgccatggagaaggttctgggaatggactggagtaggaagcccggagatcctgtcgacccggccgttgacgcggagtggatcgcggggatagctaggctggggctcgacactaacttcgtcgtcgtgcacggggccgggtcttttggccactttcaagcaagtagatctggagttcataaaggagggttacattcgacactggtcaaggctggctttgttgctacaagaatttcagtgacatctctcaaccaggaaattgttagagccctagcaagagaaggaataccatctgttgggatgtcaccatttgcttgtgggtggtctacccaacaaagaaaacttgcatcagcaaatgcttctcaaatatttcagtcactccatgcaggttttgtcccagttttgcacggtgatgcagttcttgatgaattattggactgtaccatattgagtggggatgtcattatacgacatcttgcacagcttctgagtccgaaatatgtagtatttctgatgtccatggagtgtatgatcgccctccaactgactcaaatgcagtacttctgagagaaatagaggtggatgacattggaggctggtcgattgtaaaacctgcattgctgcaaggcaacactaaaggagtggagatatcagttgcagcacatgacaccaccggtgggatggagaccaaaatactggaggctgcagtgatagctaggcttggaatagacgtgtatattaccaaggctggaacagaacactcgctgagggccttgaagggagatgtgagcaccgactcggaagattggcttggaactattatacgctcttccaaatagatttcttgttgcaaaaacattcggactggtttactggcgattttcccgatgttatatgagcagtgatgagccttgggctttcgatgatgatccagcacgggtctattccctactgtggtcgtagtttggtttacaagcgtcagcctgatgttacaaatgccgttcagtaaatttgttttgttttctgaaaagataagatgcattggtcgcaagagaggaaaaaattgatttttg

SEQ ID NO: 217397 - DNA, 1428 bp, Zea Mays
cgaggatatcatgaattttgccaaaataaggaataccatctgttgggatgtcaccatttgcttgtgggtggtctacccaacaaagaaaacttgcatcagcaaatgcttctcaaatatttcagtcactccatgcaggttttgtcccagtaagttgttgtagcaaaggttttgaaccgctattccttcaaaatttcatatttatcaaaaatagggcctggtgcagtggtagtctctccacttgctgtttggagatccttgaaaaattaagcaagggtaaggatgtagaaaagttctcttccccataccctttcttctgtgggagcttttggcactgggtacgcacacctgaagttgttggcatgagtggtatagttactcaccccatatttgacagcatatggtgctactggaacatgtatcatattgttatttttttatgcatgcactattttggtactcgtgatagtgcttttctatattgcacattgaacgctaaaacaagtcccatatgaattatttagtattaattattataagcaagcattagataagttccatgcgctttctctgatttgcagctggaacctaagcatgatcagaaattaatataaacttttgcttatagcataagacccttgtttcttgcaggttttgcacggtgatgcagttcttgatgaattattggtgaattttcaaatcaaagcttgctgcgttgttgtttaggttttatggactatgaagtcaatttattttattaaaaataaaattgatcttatctttaaatgaccaggactgtaccatattgagtggggatgtcattatacgacatcttgcacagcttctgagtccgaaatatgtagtatttctgatgtccatggagtgtatgatcgccctccaactgactcaaatgcagtacttctgagagaaatagaggtggatgacattggaggctggtcgattgtaaaacctgcattgctgcaaggcaacactaaaggagtggagatatcagttgcagcacatgacaccaccggtgggatggagaccaaaatactggaggctgcagtgatagctaggcttggaatagacgtgtatattaccaaggctggaacagaacactcgctgagggccttgaagggagatgtgagcaccgactcggaagattggcttggaactattatacgctcttccaaatagatttcttgttgcaaaaacattcggactggtttactggcgattttcccgatgttatatgagcagtgatgagccttgggctttcgatgatgatccagcacgggtctattccctactgtggtcgtagtttggtttacaagcgtcagcctgatgttacaaatgccgttcagtaaatttgttttgttttctgaaaagataagatgcattggtcgcaagagaggaaaaaattgatttttg

SEQ ID NO: 217398 - DNA, 455 bp, Zea Mays
ttggacagcatttcgcataccaagtggagatatcagttgcagcacatgacaccaccggtgggatggagaccaaaatactggaggctgcagtgatagctaggcttggaatagacgtgtatattaccaaggctggaacagaacactcgctgagggccttgaagggagatgtgagcaccgactcggaagattggcttggaactattatacgctcttccaaatagatttcttgttgcaaaaacattcggactggtttactggcgattttcccgatgttatatgagcagtgatgagccttgggctttcgatgatgatccagcacgggtctattccctactgtggtcgtagtttggtttacaagcgtcagcctgatgttacaaatgccgttcagtaaatttgttttgttttctgaaaagataagatgcattggtcgcaagagaggaaaaaattgatttttg

SEQ ID NO: 217399 - DNA, 1790 bp, Zea Mays
acaacactcgtttgcctctcatctcgcttcgcttccattccatcgcgccagtcgccagactcacctgggagagtggggggaaatatcaattagaaacaacgaggaattagcaaagaaagaagaataactcccataagaaaaatcgccaaatacgccattcatcttcttcgcccgggtttcagaacgtacggcagtttagccaggatggtggcgatcgagaaccagagccaggccgcggtggcggcggaggcggtggcggcgccggcgtcgcggatccccagggaggcgcggcgcctgctgcacgagctggcggcggcgtgggcggacgtggccgactgccgcgcgctggaggtcgtgccgctcaagggggccatgaccaacgaggtctaccaggcgcgctggctcactgcaggccctgccggccagaaggaggagcccagggcggagagggaggtgaggaaggtgctcgtgcggatttacggcgacggcgtcgacctcttcttcgaccgcgaggacgagacattgtcagctgccgaccttcgcgatcctgaaatttcagctctggtggcttccaagctgagggagttccacaaccttgacatgcctggtcccaaatctgtgctcatttgggacagacttaggaactggctcagaactgccaagagcttgtgtccacctgaagaagccaaggaatttcggttggacagtctggagaaccagattactgcattggagaacgagtgttcaggtgattaccagtggattggtttctgtcacaatgatcttcagtatggcaatatcatgattgatgaagagaccaacgtgctgaccatcattgattatgagtatgcaagcttcaacccagttgcatatgacattgctaaccatttctgtgagatggcagcagactatcattcatcaaagcctcatatactggactacagcagatatccagatgttgatgagcagaagcgttttgttaagacctacctgaacatttctggtgaggaacctgatgcggaagttgtggagaacctgctccaaagcattgagaagcacacgctcgccagccatctagtatggggcctctggggaataatttcggaccatgttaacgacattgacttcgactacaaggagtatgcgaggcagagattcgagcagtactggcacaagtctgcgatcttaacatcttgaacatgtgtataaacacccgtacgtggtctcaggaactccctgagggcctgtggctgcacacacgaaattgtgcagtgccactgacacatagataagctgtgaaagaagaaatactgacgacgacgacgaataatcccgttttgggctcgggaggttatttctccgcaactcgatgagcttcaggcttcagcttcaggaaggaaggaaggagctatggggatttggctgcccgcttatgctgtaccaatgcaattaaaagataaagatccggtccggtgttgcgtgtgctatgtttagttttggctagcaccgccgagagccgtggtcctgttgtggtgtttctagtttctgtatgcttgatgttgttagtgtgctggataatttggttttgtgcttggggagtccttagctttgggacaacgcatacattgtatactgggtagatgtataaacataaaacagctatgggaatttggttctctacctttatttctctctcgaacaggctgtatttcgttaagaaggtaaatttgggtttgtatttgttattatcagcttgttatacatgtgtcagatcaaatgcatttcttttg

SEQ ID NO: 217400 - DNA, 1333 bp, Zea Mays
attggacttgtggtagatgaccaagtaggcaaagccgcaaaggaggtggaaccggtggcaaaacattgtcagctgccgaccttcgcgatcctgaaatttcagctctggtggcttccaagctgagggagttccacaaccttgacatgcctggtcccaaatctgtgctcatttgggacagacttaggaactggctcagaactgccaagagcttgtgtccacctgaagaagccaaggaatttcggttggacagtctggagaaccagattactgcattggagaacgagtgttcaggtgattaccagtggattggtttctgtcacaatgatcttcagtatggcaatatcatgattgatgaagagaccaacgtgctgaccatcattgattatgagtatgcaagcttcaacccagttgcatatgacattgctaaccatttctgtgagatggcagcagactatcattcatcaaagcctcatatactggactacagcagatatccagatgttgatgagcagaagcgttttgttaagacctacctgaacatttctggtgaggaacctgatgcggaagttgtggagaacctgctccaaagcattgagaagcacacgctcgccagccatctagtatggggcctctggggaataatttcggaccatgttaacgacattgacttcgactacaaggagtatgcgaggcagagattcgagcagtactggcacaagtctgcgatcttaacatcttgaacatgtgtataaacacccgtacgtggtctcaggaactccctgagggcctgtggctgcacacacgaaattgtgcagtgccactgacacatagataagctgtgaaagaagaaatactgacgacgacgacgaataatcccgttttgggctcgggaggttatttctccgcaactcgatgagcttcaggcttcagcttcaggaaggaaggaaggagctatggggatttggctgcccgcttatgctgtaccaatgcaattaaaagataaagatccggtccggtgttgcgtgtgctatgtttagttttggctagcaccgccgagagccgtggtcctgttgtggtgtttctagtttctgtatgcttgatgttgttagtgtgctggataatttggttttgtgcttggggagtccttagctttgggacaacgcatacattgtatactgggtagatgtataaacataaaacagctatgggaatttggttctctacctttatttctctctcgaacaggctgtatttcgttaagaaggtaaatttgggtttgtatttgttattatcagcttgttatacatgtgtcagatcaaatgcatttcttttg

SEQ ID NO: 217401 - DNA, 976 bp, Zea Mays
ggttctgtattgtagttcagtgctgcataactgtacgtaaattttcatcaggggaccgtcaagtttcttgcgaatattgaacgcatggtgtaaacaaattaagtccattccactttctaacgaacatgacacattggatgttctccaattcaacacctcctctccagatgcaatgcaattccatgcgctgtgaggaacctgatgcggaagttgtggagaacctgctccaaagcattgagaagcacacgctcgccagccatctagtatggggcctctggggaataatttcggaccatgttaacgacattgacttcgactacaaggagtatgcgaggcagagattcgagcagtactggcacaagtctgcgatcttaacatcttgaacatgtgtataaacacccgtacgtggtctcaggaactccctgagggcctgtggctgcacacacgaaattgtgcagtgccactgacacatagataagctgtgaaagaagaaatactgacgacgacgacgaataatcccgttttgggctcgggaggttatttctccgcaactcgatgagcttcaggcttcagcttcaggaaggaaggaaggagctatggggatttggctgcccgcttatgctgtaccaatgcaattaaaagataaagatccggtccggtgttgcgtgtgctatgtttagttttggctagcaccgccgagagccgtggtcctgttgtggtgtttctagtttctgtatgcttgatgttgttagtgtgctggataatttggttttgtgcttggggagtccttagctttgggacaacgcatacattgtatactgggtagatgtataaacataaaacagctatgggaatttggttctctacctttatttctctctcgaacaggctgtatttcgttaagaaggtaaatttgggtttgtatttgttattatcagcttgttatacatgtgtcagatcaaatgcatttcttttg

SEQ ID NO: 217402 - DNA, 936 bp, Zea Mays
atgcacggcatggaacggaacacggggacgttgacgcgaagggactccaaggtccaaaccctacacctacacctaaaaagctacacgggcccgcgctggttttctccatccatcatcaaatttacacagcacaaccactttgcccccctggccctaacaaccaaactctctcggctccttcccctaccggccggagtcgcatgcggtgggactaggctaaaacgccgcggacgggcggcgcgggtggaaggggctcgcggcgggcggcgggcgtggggtgcgcgcggccgttgcggcggtgatgcgctcgcagcgcgggcacatggtgagcgcggacgccggttctcctcggtcagcgagccgaagcagcgcttcaggtactcgcactccagctccgtctgcttaagcttcgtcctagccctgcggttctggaaccagacctccacctgcctgggccgcagcttgagcttgacagccaaggcctccttttgcttcggtgtgagggtgtggttgaggcggaagctctcctccaggaggcgggactgctccttggacagccggagcttcttggcgcggtgcggcccgccggcgccgccgcgctcgtcctcctcctcctccacgctccccattgggaactcctcctcctcgccgccgctcgccggctggttcatgtccaggtccctcatgttgttcccgttcccgctcccgttgttgttgttgcatccaaacccctctgcggccgccaagcaacaaccatcggttgttcatatatagccaagttagctcctttaaaaatcacagaaaatacagtatgctgttcttgactccagaaaatacggagtactttcagaatatatataagtaaacacaacagacaagctagtttcgcacgattcgaaaaatcgaaatatgcatgacgacgattatctatatatt

SEQ ID NO: 217403 - DNA, 1973 bp, Zea Mays
attcttcagcagaagtcgtttatacataatcaacagcaattgcagcagcaaatccagatgctgactccacagcagcagcagcagcttatgctgcatgctcagcaaaatatgtcttcaccaacatctagtgatgtcgacaacagaagattgaggatgatgctaaatagaaatgctgttcttggccgggatgggcagacaaacagtggtagtgatattattccaaatattggctctcctagtcaaagtggtggcgatatagatatgcttataaagaagaaacttgctcagcagcagcaactattacaacagcaaagcaatagccaacagctcccacagcaacatcagcttcagcaacctgctgtctctagccagcaatctcaaagttcaaatcaacatcttcaacaagaaaagccaggaattggaagtatgcctgctgatgggggcataccaaattcatttgggggagctgaacagacagcaaagaagagaaagaagccaggctcatcctctggtagagctaatagttcaggcacagccaatactgctggtccctctccaagttctgcaccatcgacaccttccactcatacaccaggagacgtgatgtctgtgccacagctgcagcagaatggcggttcagctaaacccatggtaatgtttggctctgacggaactgggagcttgacatctccagcaaacccattggatgacatggatcctagggacaacttggggcgatgcatggatgctagtaaagggtttggtttttctgaggttgccaaagcacgcgcaagcacagccaaagttgtctgttgccacttctcagctgatggtaaactgcttgctactggtggtcatgataaaaaggtcactttgtggtgtacagattctctgaaccctaaatcttatctggaagagcactcgtttcttatcactgatgttagatttagcccaagcatgtcacgccttgctacatcctcctttgacaaaactgtgcgggtttgggatgcagataatactgactattcactacgaactttcacgggccattcagcaactgttatgtcacttgattttcatccaaataaagaggatatgatatgctcctgtgatagtgatggggaagtgcgcagctggagcataaataatggtagctgtttgacatgtgttaaggtgtttaagggaggtgctactcagatgagatttcaacctcgtaagggaaagtatctagcagcggcctcagataaagctatctacatacttgatggggagacacaacatgcttgtagaagtcccttgcaggggcacaataagaatattcaatcgctttgttgggattctgctggcgaatatctcgcttctgtcagtgaagactcggtcagaatatggtcattcagttctggacgtgaaggtgaatttgtgcatgaattgaatcgcagcggaaatcaattccactcgtgtgttttccacccaacttatcagtcattgctagtgattggttgttacgagtctttggaactttgggacataagggagaagaacaccatgaccttcaacaatgcgcatgacggtttggttgcagccctggcatcatccagtgctacagggaaggttgcctcagtaagccatgatagaactctcaagctctggaaatgactttataatagcgatcggtgtgaagacgattttctaccaaaaatgaccacatgacgcacatgacgaaaaggtagctgacaagatactctggagccgcgtgggctcaagaactaacggtggtttgtgttgtggttcttgtatgctgttcaatatgctattgaagtttgtaactcctaatagaaacgttcagtcaagactccaagattgtacctcggacaagtagcaaatatttattccccaaaaaaatctgcattttgttttttaccgtgtattttaacgtcgccgagcctgtttggaagctagttttaatgttttgc

SEQ ID NO: 217404 - DNA, 3413 bp, Zea Mays
ccggtctctattccccaattgcccctcacctccattaccttccccgtctccctcgtacattcgacattccccttcccctgccattcggtcccgctcccgccgcctccgccgcgattccactctcccttccgcctccgccgcgattccactctcccttccgcctccgccgcgattcttgtctcccttccgcctccgccgcttaccgccgcggccacgccgcaagcgtttcgtctcgggatccccacttcgtctcgctcgagcggtagagccacgctcccaccgcccaggcgtccgccgcggaggcgtcggtggcctatctgagcaggctctcctcgtcgggcttttttgctttagagggagagacttcctggtcggcgcgccgcgagaagagcaccagccatgtcgcaaactaactgggaggcggacaagatgctggatgtatacatatatgattattttatgaagagaaatttgcaggcaactgcaaaggccttccaagcagagggaaaggtctcttcggatccagttgcaattgacgcacctggtggatttcttttcgagtggtggtcggttttttgggatatattcatagcaagaactaatgagaagcattcagatgttgcagcctcatatattgagactcagctcatgaaagccagggagcaacaacatcaacagcagcaacagatccctcaacagaggcagcagcagccacagcatatacaaatgcaacaaatgctgttgcaaagagctgtgcagcagcagcagcagcagcagcaacaacaacaacaacaacaacaacaacaacaacaacaacaacaacaacaacaacctcagcagcagcagcagcagcagctgcaacagcaacagctgcaacagcagcgtagagatggttctcatcttctcaatggttctgcaaatggaatttctggaaacaatcctttaatgcggcaaaaccaaagtactgcaaatgttatggcaacaaaaatgtacgaggaaaggttaaaggtaccttccgagagagactctttggaagaggcatcattgaagcaaaggtacggagagaatgctgggcaactacttgattcaaatgaagcatcattgttgaaagcagcttcaagcgcgcaatcctcagggcaaattttgcatggaactgttggtggcttgtcaggcactctgcaacaagttcaggccaggagccctcaacttcctggtcctgctcagggtatcaagacagagattaatcccattctgacccccagagctgcaggcccagaagggtcatttataggtgctcaaggatctaatcaagctgggaacaatttgactctgaaaggatggccactcacgggacttgagcaacttaggtcaggaattcttcagcagaagtcgtttatacataatcaacagcaattgcagcagcaaatccagatgctgactccacagcagcagcagcagcttatgctgcatgctcagcaaaatatgtcttcaccaacatctagtgatgtcgacaacagaagattgaggatgatgctaaatagaaatgctgttcttggccgggatgggcagacaaacagtggtagtgatattattccaaatattggctctcctagtcaaagtggtggcgatatagatatgcttataaagaagaaacttgctcagcagcagcaactattacaacagcaaagcaatagccaacagctcccacagcaacatcagcttcagcaacctgctgtctctagccagcaatctcaaagttcaaatcaacatcttcaacaagaaaagccaggaattggaagtatgcctgctgatgggggcataccaaattcatttgggggagctgaacagacagcaaagaagagaaagaagccaggctcatcctctggtagagctaatagttcaggcacagccaatactgctggtccctctccaagttctgcaccatcgacaccttccactcatacaccaggagacgtgatgtctgtgccacagctgcagcagaatggcggttcagctaaacccatggtaatgtttggctctgacggaactgggagcttgacatctccagcaaacccattggatgatgttgaccgcttgctagaagatggctcattggatgataatgttgaatcttttctatcacaggatgacatggatcctagggacaacttggggcgatgcatggatgctagtaaagggtttggtttttctgaggttgccaaagcacgcgcaagcacagccaaagttgtctgttgccacttctcagctgatggtaaactgcttgctactggtggtcatgataaaaaggtcactttgtggtgtacagattctctgaaccctaaatcttatctggaagagcactcgtttcttatcactgatgttagatttagcccaagcatgtcacgccttgctacatcctcctttgacaaaactgtgcgggtttgggatgcagataatactgactattcactacgaactttcacgggccattcagcaactgttatgtcacttgattttcatccaaataaagaggatatgatatgctcctgtgatagtgatggggaagtgcgcagctggagcataaataatggtagctgtttgacatgtgttaaggtgtttaagggaggtgctactcagatgagatttcaacctcgtaagggaaagtatctagcagcggcctcagataaagctatctacatacttgatggggagacacaacatgcttgtagaagtcccttgcaggggcacaataagaatattcaatcgctttgttgggattctgctggcgaatatctcgcttctgtcagtgaagactcggtcagaatatggtcattcagttctggacgtgaaggtgaatttgtgcatgaattgaatcgcagcggaaatcaattccactcgtgtgttttccacccaacttatcagtcattgctagtgattggttgttacgagtctttggaactttgggacataagggagaagaacaccatgaccttcaacaatgcgcatgacggtttggttgcagccctggcatcatccagtgctacagggaaggttgcctcagtaagccatgatagaactctcaagctctggaaatgactttataatagcgatcggtgtgaagacgattttctaccaaaaatgaccacatgacgcacatgacgaaaaggtagctgacaagatactctggagccgcgtgggctcaagaactaacggtggtttgtgttgtggttcttgtatgctgttcaatatgctattgaagtttgtaactcctaatagaaacgttcagtcaagactccaagattgtacctcggacaagtagcaaatatttattccccaaaaaaatctgcattttgttttttaccgtgtattttaacgtcgccgagcctgtttggaagctagttttaatgttttgc

SEQ ID NO: 217405 - DNA, 776 bp, Zea Mays
cccgtttccccgcaggcgcgcgcgcccaaccctagccgcgtgggcgccgtccgctcagccgccgctgcacactgttcatcttcctcaaaccgccactccctcacgtcttgcgcgcagccgccgcaccacatcctcgcctcgcggcatctcgcctcaccttgctgcatctcgcgctcgcctcgccctctctgcgctcgtcgtcctgcagagaagccccacgtgcatgtcctctggccgagctcccagcaccctccgcaaaagccccatggaggcgtgcgattagagccctcgcccatcccctacgtgttgctgtgcccggacgccgccgcagccgcgtagccatggccgtcgtcatgccctgcgcacacgtcacttccgccatacgcccactgctccgacgatcttgttggcatgtgtggtcgctacatctcgcgttgccaagactgcgatccaactccgaacttcgaggaatcgacgatcaagcttcggcgaccaaatgacccagctcttcgagttccacgaagttaaagaccctgagcatctgtttggtgaagattaccttttgggctactatggttagattcatgctattgctttactttaatcaatgaacatgatgtgaacacttatgatacgatgttgtcattatgattatggtgttggactggtgatactttagggggctcgagcggtttctcgattgcctctccgtaaggacctgttcgttggatgaccacccgggaaaacagtgcaaccttgagggtggaatgggatgc

SEQ ID NO: 217406 - DNA, 1758 bp, Zea Mays
gttggctcgccaatcatatgatgcattggagcaggcccgtcgaccgtcggtcgcacttcccagtgctccgagccgtcacgccaccaatccccgaccagagtccaaattacttcccgctccgaattccgatgccgcgcacggtggccgtggtcggcgcgggcgctgcagggctggtggccgcgcgccagctgctccgcgagggcctcgacgtcgcggtcttcgagaagtcggggcgcgcggggggcacctgggcgtacgaccctcgcgcagacgccgacccgctgagccgcgacccgggctcccccagcgctgtgcacggaagcctctacgcgtcgctgcgcacaaacctgacgcgcgacctcatgggcttctcggacttcccgatggccggctgggtgttcgcgggcgacgcgcgcgcgttcccgggccaccaggaggtgctcgcgttcctcgacgccttcgcggaagagtgcggcgtcgccgcccgcgtcaggctccgctccgaggtgctgcgcgtgcgggagcggtgggcggtctcgtggcgccgcgaggacggcgaggtggcggaggaggtgttcgacgccgtcgtggtctgcaacggccactgtacggtgcccagggtgcccggcattcgaggaattgacaattggagcgggaagcagattcacagccacaattatcgcacccctgaaccgtttcgggatcagaacgttgtcgttgtaggattctcgaccagtggaatcgacattgcttcagagatctcacgtctcgccaaggaagtgcacgtagcagacaggtactccagggacaggctgggaaagatggcgctgtaccagaatgtctggattcacgcagaggtggactgcatccaggatgacggcaaagtccgctttgctgaaggttccgtggtggatgcggacgttattctttactgcacagggtatcgctaccatttcccgtttctcgacctggatgggctcaccgtcgacgacaaccgtgtcgggccactgtacaagcacgtcttccccccaaagtacgcgccgaacctgtcattcgttggtctaccagtcaagaccatcgtcttccaggagctggagcaggaagccaagtgggtcgcggccgtgctgtcggggcgggccacgctgccaagcgaggaggacatgatggcgtccgtgaggagccattaccagctgatggaggaggccgggaggccgaagcgccacacgcacgcactggcagctcagtgggcagagcacatgaactggctcgcggaccaggtcggcgagcctccagtggagccgtggaagtgcgaggtgttcgataaggtacttgcgagcatcttggcgctcgacgaggcctaccgagatcgctgggaacaagaggaggacggtggctccagtgggcatcaggaaggcattaggatcagagcgagctccatcatgtaacggaacctgaacggttgcggcaacctgacgccgtcgtatcctgattttactctcgtgatacttcacttcgttgtgatcttcactgaaacaatttgccaccatacaacgggaataaaaaaactatttagggcttgttcggttagctctcaatccatatgaattgagtgggattggatgtgtttgaatcccgaataagtcaaacttattcttaattttttccaatctcatccaatccatgtgtatagggaataaccaaacaagaccttattatttttgtttaggagtgaataaaaccgtgtttgcaatggcctta

SEQ ID NO: 217407 - DNA, 1732 bp, Zea Mays
gttggctcgccaatcatatgatgcattggagcaggcccgtcgaccgtcggtcgcacttcccagtgctccgagccgtcacgccaccaatccccgaccagagtccaaattacttcccgctccgaattccgatgccgcgcacggtggccgtggtcggcgcgggcgctgcagggctggtggccgcgcgccagctgctccgcgagggcctcgacgtcgcggtcttcgagaagtcggggcgcgcggggggcacctgggcgtacgaccctcgcgcagacgccgacccgctgagccgcgacccgggctcccccagcgctgtgcacggaagcctctacgcgtcgctgcgcacaaacctgacgcgcgacctcatgggcttctcggacttcccgatggccggctgggtgttcgcgggcgacgcgcgcgcgttcccgggccaccaggaggtgctcgcgttcctcgacgccttcgcggaagagtgcggcgtcgccgcccgcgtcaggctccgctccgaggtgctgcgcgtgcgggagcggtgggcggtctcgtggcgccgcgaggacggcgaggtggcggaggaggtgttcgacgccgtcgtggtctgcaacggccactgtacggtgcccagggtgcccggcattcgagattcacagccacaattatcgcacccctgaaccgtttcgggatcagaacgttgtcgttgtaggattctcgaccagtggaatcgacattgcttcagagatctcacgtctcgccaaggaagtgcacgtagcagacaggtactccagggacaggctgggaaagatggcgctgtaccagaatgtctggattcacgcagaggtggactgcatccaggatgacggcaaagtccgctttgctgaaggttccgtggtggatgcggacgttattctttactgcacagggtatcgctaccatttcccgtttctcgacctggatgggctcaccgtcgacgacaaccgtgtcgggccactgtacaagcacgtcttccccccaaagtacgcgccgaacctgtcattcgttggtctaccagtcaagaccatcgtcttccaggagctggagcaggaagccaagtgggtcgcggccgtgctgtcggggcgggccacgctgccaagcgaggaggacatgatggcgtccgtgaggagccattaccagctgatggaggaggccgggaggccgaagcgccacacgcacgcactggcagctcagtgggcagagcacatgaactggctcgcggaccaggtcggcgagcctccagtggagccgtggaagtgcgaggtgttcgataaggtacttgcgagcatcttggcgctcgacgaggcctaccgagatcgctgggaacaagaggaggacggtggctccagtgggcatcaggaaggcattaggatcagagcgagctccatcatgtaacggaacctgaacggttgcggcaacctgacgccgtcgtatcctgattttactctcgtgatacttcacttcgttgtgatcttcactgaaacaatttgccaccatacaacgggaataaaaaaactatttagggcttgttcggttagctctcaatccatatgaattgagtgggattggatgtgtttgaatcccgaataagtcaaacttattcttaattttttccaatctcatccaatccatgtgtatagggaataaccaaacaagaccttattatttttgtttaggagtgaataaaaccgtgtttgcaatggcctta

SEQ ID NO: 217408 - DNA, 2913 bp, Zea Mays
ctggaggtgtaccctgctactgtgtcaaccagaggcagccgctgcagctcgtgatgcgggataagggaggatgattcctcctgagcggaacagtgattgatcctactaaatgtcgattgatgagtgtggatgaaaagcgagaacttgttcgtgatttatcaaagagcccagaaagcgctcctgacaggctccagtcatggacacggcgggaaattgtagagattctttgttctgatcttggaagggagaggaaatatactggtttatccaagcagagaatgctagattatctcttcagggtggtgtctcgaaaatcatctggtccagtggaacatgtacatgagaaagagaaagggaaagataaagagtcaattcttgagcccaatacaactaaccatcagtcccctgccaaacgaccgagaaagagtgacaatccatcacgattaccgattatcacaaacaactcagcagcatctgatgtaactgggccaactaataatctacgcttctgccaaaatttagcttgcagggctattctcagggacaatttttgcagacgctgttcatgctgcatttgttttagttacgatgataacaaggacccaagcctctggttgtcgtgtagttcagaccaacacttacaaaaggatacctgtggtttctcatgccatcttgaatgtgctctaaaggatgaaagaacgggtattctgcagagtggacaaggcaagaaacttgatggtggctattattgcattcgctgttggaaacagaatgatttgcttgggtgctggaagaaacagctggtgatagcaaaagatgctcgacgattggatgtattgtgtcatcggatttatctcagtcataggatccttgtctccacagagaagtacttggtattgcatgatattgttgatacggcattgaagaaactggaggctgaggtcggtcctttatctggagctccaaatatgggtcgtggaattgtcagtcgacttactgttggtgccgaagttcagaaactttgtgctcaagcagtagatgctgtggaatcattgttctcgggtgtatctcctgctagttcaaaaattcagcggccatgcatgatgcgaccaaactttgtaaagtttgaagctataacccaaacatccgtcatggtatttttggatttggttgattgtcctatgcttgcccaagaggcaacttcttttaatatctggcaccgagtggctgttactgaatcgtacccatcaaatccgactggcataatacttgcgccattgaaaaaattacttgtcacttggctcgcaccggctacaagctatatctttaaggttgtcgcgttcaagaactcaattgagttgggttcatgggaaattagaatgaagacaagctggcaaaaggatgatccaaggggttcaatgccaggtggtaccggactaggacaaaatagtgagagcccaaaggcaaacagtgatggccagtctgatccttcctcagagggtgtggactcaaacaataatactgcagtttatgctgatctaaacaagtctcctgaaagtgattttgagtactgtgaaaatcctgagatccttgattcaaataaagcttctcatcaccccagtgaacgtattaatgacttgcaaaatatacagatggctgcagatggggtaacagaagtcacagagctggaagaagcacctgggctctcagcctcagccttggatgaggaacccaatgcttgtgttcaaacagtgcttctcagggattcaaacccactagaacacaatcagagaactgtggttcctagatcacatgatacatctaatatactggctggacatgagttggtgattgttggacctcgatattctggttctgtgcctcccactgcaccaagaagtgtggaaaacagcaaagacaatggtggaagggcctccaaacccaaaccttgtgacatagttgttcaaaatggctcttcaaagcctgaaagggaaccaggcaattcgtcaaacaaaagagcaacggataaaatggacgactttggccacaaggatagtttctctgaagtgtcctatgaatactgtgtaagggtggtcaggtggctggagtgtgagggctatattgagacaaacttcaggatgaagtttcttacatggtttagcttacgtgccaccctgcaagagagaaagatagttagcgtatatgtggatactcttatcgaggaccctgtcagtctctctggccagctcgtcgacagcttctcggagaggatatatagcaaaaagcggccttccatgccttctggtttctgcatggatctgtggcattaaggaactgcagggtcttaccgttcgctttgtagggagcatattcggcccattcttttgttgcagatcgttgcattgattcttcattggaaatttagctgaagtatttgacttgcacatcttcattgaaactttccttggtgatgacagtaggttatgttatcgtcgggcaacttctttttcccttctgttttttttttcttcatttgctccataataggttacagtgctcccatgttaatcttagagcatcaatgtgctgcattgttcagtcagcttagtgccgtcatgaattttgtggcgtgtagcttgtctgaagaagaggatggttgccaggctggatcaggaatgcgcctgtgggacgaagcaggcttcgtgtggacgctgacgaatccaagctaaccatgtcttgtcggtaaaatggttgtgctgtatcttcggggggatttgcattttcttgctgactctttctgggaatgggaggaatgatgtttaaggtgcagaacgtctgccttaatttaatgttatgttgactcatgctcctttatctgctgcatttgttggttcgatgcatggtgttctgttc

SEQ ID NO: 217409 - DNA, 2857 bp, Zea Mays
tctccccccacccaccccgacccttcctcctcccctcggcctctccggcgggcgggcaattcggccatggatcccccacgcggaggaacagtgattgatcctactaaatgtcgattgatgagtgtggatgaaaagcgagaacttgttcgtgatttatcaaagagcccagaaagcgctcctgacaggctccagtcatggacacggcgggaaattgtagagattctttgttctgatcttggaagggagaggaaatatactggtttatccaagcagagaatgctagattatctcttcagggtggtgtctcgaaaatcatctggtccagtggaacatgtacatgagaaagagaaagggaaagataaagagtcaattcttgagcccaatacaactaaccatcagtcccctgccaaacgaccgagaaagagtgacaatccatcacgattaccgattatcacaaacaactcagcagcatctgatgtaactgggccaactaataatctacgcttctgccaaaatttagcttgcagggctattctcagggacaatttttgcagacgctgttcatgctgcatttgttttagttacgatgataacaaggacccaagcctctggttgtcgtgtagttcagaccaacacttacaaaaggatacctgtggtttctcatgccatcttgaatgtgctctaaaggatgaaagaacgggtattctgcagagtggacaaggtgctggaagaaacagctggtgatagcaaaagatgctcgacgattggatgtattgtgtcatcggatttatctcagtcataggatccttgtctccacagagaagtacttggtattgcatgatattgttgatacggcattgaagaaactggaggctgaggtcggtcctttatctggagctccaaatatgggtcgtggaattgtcagtcgacttactgttggtgccgaagttcagaaactttgtgctcaagcagtagatgctgtggaatcattgttctcgggtgtatctcctgctagttcaaaaattcagcgtacgtgggccatgcatgatgcgaccaaactttgtaaagtttgaagctataacccaaacatccgtcatggtatttttggatttggttgattgtcctatgcttgcccaagaggcaacttcttttaatatctggcaccgagtggctgttactgaatcgtacccatcaaatccgactggcataatacttgcgccattgaaaaaattacttgtcacttggctcgcaccggctacaagctatatctttaaggttgtcgcgttcaagaactcaattgagttgggttcatgggaaattagaatgaagacaagctggcaaaaggatgatccaaggggttcaatgccaggtggtaccggactaggacaaaatagtgagagcccaaaggcaaacagtgatggccagtctgatccttcctcagagggtgtggactcaaacaataatactgcagtttatgctgatctaaacaagtctcctgaaagtgattttgagtactgtgaaaatcctgagatccttgattcaaataaagcttctcatcaccccagtgaacgtattaatgacttgcaaaatatacagatggctgcagatggggtaacagaagtcacagagctggaagaagcacctgggctctcagcctcagccttggatgaggaacccaatgcttgtgttcaaacagtgcttctcagggattcaaacccactagaacacaatcagagaactgtggttcctagatcacatgatacatctaatatactggctggacatgagttggtgattgttggacctcgatattctggttctgtgcctcccactgcaccaagaagtgtggaaaacagcaaagacaatggtggaagggcctccaaacccaaaccttgtgacatagttgttcaaaatggctcttcaaagcctgaaagggaaccaggcaattcgtcaaacaaaagagcaacggataaaatggacgactttggccacaaggatagtttctctgaagtgtcctatgaatactgtgtaagggtggtcaggtggctggagtgtgagggctatattgagacaaacttcaggatgaagtttcttacatggtttagcttacgtgccaccctgcaagagagaaagatagttagcgtatatgtggatactcttatcgaggaccctgtcagtctctctggccagctcgtcgacagcttctcggagaggatatatagcaaaaagcggccttccatgccttctggtttctgcatggatctgtggcattaaggaactgcagggtcttaccgttcgctttgtagggagcatattcggcccattcttttgttgcagatcgttgcattgattcttcattggaaatttagctgaagtatttgacttgcacatcttcattgaaactttccttggtgatgacagtaggttatgttatcgtcgggcaacttctttttcccttctgttttttttttcttcatttgctccataataggttacagtgctcccatgttaatcttagagcatcaatgtgctgcattgttcagtcagcttagtgccgtcatgaattttgtggcgtgtagcttgtctgaagaagaggatggttgccaggctggatcaggaatgcgcctgtgggacgaagcaggcttcgtgtggacgctgacgaatccaagctaaccatgtcttgtcggtaaaatggttgtgctgtatcttcggggggatttgcattttcttgctgactctttctgggaatgggaggaatgatgtttaaggtgcagaacgtctgccttaatttaatgttatgttgactcatgctcctttatctgctgcatttgttggttcgatgcatggtgttctgttc

SEQ ID NO: 217410 - DNA, 2875 bp, Zea Mays
cgcgtgcagcagccagccagccagcgccccctgctctgctctgcccagcgggaggacaggagagaggagtccacgcgagcggagaggagaggagagggagaagaacgagggagaggagagagatctccccccacccaccccgacccttcctcctcccctcggcctctccggcgggcgggcaattcggccatggatcccccacgcggaggaacagtgattgatcctactaaatgtcgattgatgagtgtggatgaaaagcgagaacttgttcgtgatttatcaaagagcccagaaagcgctcctgacaggctccagtcatggacacggcgggaaattgtagagattctttgttctgatcttggaagggagaggaaatatactggtttatccaagcagagaatgctagattatctcttcagggtggtgtctcgaaaatcatctggtccagtggaacatgtacatgagaaagagaaagggaaagataaagagtcaattcttgagcccaatacaactaaccatcagtcccctgccaaacgaccgagaaagagtgacaatccatcacgattaccgattatcacaaacaactcagcagcatctgatgtaactgggccaactaataatctacgcttctgccaaaatttagcttgcagggctattctcagggacaatttttgcagacgctgttcatgctgcatttgttttagttacgatgataacaaggacccaagcctctggttgtcgtgtagttcagaccaacacttacaaaaggatacctgtggtttctcatgccatcttgaatgtgctctaaaggatgaaagaacgggtattctgcagagtggacaaggcaagaaacttgatggtggctattattgcattcgctgttggaaacagaatgatttgcttgggtgctggaagaaacagctggtgatagcaaaagatgctcgacgattggatgtattgtgtcatcggatttatctcagtcataggatccttgtctccacagagaagtacttggtattgcatgatattgttgatacggcattgaagaaactggaggctgaggtcggtcctttatctggagctccaaatatgggtcgtggaattgtcagtcgacttactgttggtgccgaagttcagaaactttgtgctcaagcagtagatgctgtggaatcattgttctcgggtgtatctcctgctagttcaaaaattcagcggccatgcatgatgcgaccaaactttgtaaagtttgaagctataacccaaacatccgtcatggtatttttggatttggttgattgtcctatgcttgcccaagaggcaacttcttttaatatctggcaccgagtggctgttactgaatcgtacccatcaaatccgactggcataatacttgcgccattgaaaaaattacttgtcacttggctcgcaccggctacaagctatatctttaaggttgtcgcgttcaagaactcaattgagttgggttcatgggaaattagaatgaagacaagctggcaaaaggatgatccaaggggttcaatgccaggtggtaccggactaggacaaaatagtgagagcccaaaggcaaacagtgatggccagtctgatccttcctcagagggtgtggactcaaacaataatactgcagtttatgctgatctaaacaagtctcctgaaagtgattttgagtactgtgaaaatcctgagatccttgattcaaataaagcttctcatcaccccagtgaacgtattaatgacttgcaaaatatacagatggctgcagatggggtaacagaagtcacagagctggaagaagcacctgggctctcagcctcagccttggatgaggaacccaatgcttgtgttcaaacagtgcttctcagggattcaaacccactagaacacaatcagagaactgtggttcctagatcacatgatacatctaatatactggctggacatgagttggtgattgttggacctcgatattctggttctgtgcctcccactgcaccaagaagtgtggaaaacagcaaagacaatggtggaagggcctccaaacccaaaccttgtgacatagttgttcaaaatggctcttcaaagcctgaaagggaaccaggcaattcgtcaaacaaaagagcaacggataaaatggacgactttggccacaaggatagtttctctgaagtgtcctatgaatactgtgtaagggtggtcaggtggctggagtgtgagggctatattgagacaaacttcaggatgaagtttcttacatggtttagcttacgtgccaccctgcaagagagaaagatagttagcgtatatgtggatactcttatcgaggaccctgtcagtctctctggccagctcgtcgacagcttctcggagaggatatatagcaaaaagcggccttccatgccttctggtttctgcatggatctgtggcattaaggaactgcagggtcttaccgttcgctttgtagggagcatattcggcccattcttttgttgcagatcgttgcattgattcttcattggaaatttagctgaagtatttgacttgcacatcttcattgaaactttccttggtgatgacacttgtctgaagaagaggatggttgccaggctggatcaggaatgcgcctgtgggacgaagcaggcttcgtgtggacgctgacgaatccaagctaaccatgtcttgtcggtaaaatggttgtgctgtatcttcggggggatttgcattttcttgctgactctttctgggaatgggaggaatgatgtttaaggtgcagaacgtctgccttaatttaatgttatgttgactcatgctcctttatctgctgcatttgttggttcgatgcatggtgttctgttc

SEQ ID NO: 217411 - DNA, 469 bp, Zea Mays
gtaattctgcatcggagacgccatgccacgatgcagttcttgatctaaattagcgaagcgtcggaggtacgggcataacgatactaaattcttgcgtttcttgatctctgttggatgcctccggacgagcctggggagcgcgccgttcgcggcttcagcttccacgacatggtcatcgagacgccatgccacgatgtgcgcctctaggacttggacgctgagggggtccgcgacgtgcagctcgcctacgcggagcgtgtgcggcagctcggggagcaccttgcggtgaagtatgttcaggtgttgcattagatgtgaaatgtgatgatctaaatggggaggagaagatgcagcaacatgagatgccaaatactaaaaacgacgatggtgtcacgatattgttacccactattgttgcatgttccctcccatgcttggaggtcctaatcgagggactacgccactaccg

SEQ ID NO: 217412 - DNA, 1440 bp, Zea Mays
gtactaactattaagggggcagtgtagactgcccccgctccctacccgcacgcgccagcgaaatcccgccccacaacggcctcccgcaccgcacggccgcgtgccacagagcgtacaccacccccgcccgccctccgcctgcccgccctccaagctcagcctaccacgctcgccccctgccagtccttccgcgaatcgggtgtccccaacaatcccgcgcacccgccgcactcgggcagatggagcgcgaccgccgcgccgcacgctccgacttcgtgcggttccgcctggtgtgcaagctgtggatggacggcagcggcatcaggaagccccgtgagttgggcgcacgcgtcatcgaccacagcttccaccctcgccggtggatcctgctgacggaggagaaggaggaggctgatgaggcgacgcccacgcccacgcgccgcacgctgcttaacctcaccacccggaagaccatccaggtggatctgccggagctcgctgggcactccgtggtccccggacccaccgcggcgccggagggcatgctggtggtgcgcgatctgagaaaccgttggggctgaagtgggaatgtgacaggcatgcctgcatgtgccccgcatgatgtctactgcctcacaggtttcattgcttttcggtggggggaccggagagcaaccgaatttgtagtagtagtactgaacaatctgaatctcagatgaaaccatagaacatgtttcccagtctgcaaaatgcacaaggcttccgtctttacagacatgcgttcaacttccaccgaattgctggtagtactatgatggaacaatttggttgacataggcctaggtgtatgtctgcaaaacgcttttttaaggtcggtctcaacagcgagtttttatgatacattgctggacatatgtactacttcctggaagatgtatacccacgtatgactgggcgtcgccccctgaagacaccgtcctccatcaaggcgttatttgctgatgacaatgttgtggtggcacagccacctaatgctgggattggtgctggtgcaaggttcggtgctattggtgtagatccccaggctcaatgatgaattactttcagtgacttgagggccgaggctgtgactgatctggaatgcggcagtttgttttctctgcgcaaactgcggaactggcccggagtaaaatggatcgtgatgggcaaacaggccaacccctgttgcagaaacttgttcatgtgacggtttaacatctgacctgctaccctttcatgcatcggtgagtttagtctaggaaactgtttgaagcggggaaatttggtgctttggcagcgagaatttggatggagcgttgtaattgcagaacggtgaaggaatgactcctaacattgtggacgcttggatggtgttcgttttccttcctgattctgcttagg

SEQ ID NO: 217413 - DNA, 1581 bp, Zea Mays
ttcgaaggtaaacccccgctccacctccacctcagtttcccactcagagctccaatggccgccgctctcccgcactcccgccttcacctcccgctccacacgcccagtcccacctcccgccgccgcccctgcccccgttcccgccgccgccttccctccttcgtcgccgtatcgcgcctccagaacaccaccgccgcgacccacccggtcctcccgcccccggctccgcccccctccgccgcgctcctcgccgccgagggcgcctccctcgcgccgcgccgcgagcaccgcttcccgggctcggtctcctccccaacaagcaccgcctctgcctctaacgaggcggagtacgccgtcctgcttcgcgccctccaggtgcgccgcgccgtcgccgccgaggtgctcgttgccgcgctcggcggcgggaaggtcggcggcctgacctacatcaagaacctcacggggcggatggggccgttcgtggaccgcgttgttgtcgaggccgcagcgatgcggcgggaccgccccgagctcgcccacatgtccttcaacgcccgtgcaaaggcgtacatccaggagtccggccttgtggagcttgtcaagtggttcaagcacaactcgatgacatatccccagatcgcaaaagttgtttgcgcatgttctggcgatttggggaaagttagaaagatgataaagtggcttaggtcaatttatgtaaaaggagattttttggggcgtgtccttgcaaacggtggatctttcttgaaccggagctttgaagaattggaagagattattggctatttggaaagccttggtgtcaggagagactggattggttatgtgatcagcagatgcccacagctgttgagcttgtctatggatgagttggagacacgagtcaggttttatacggatttgggaatggacaagaaggactttggcacaatggtctatgattatccaagagttcttggatttttaagcctggaagagatgaacagttcaatatctgaaagagtttggtttaagtactgaggaacttgggaggttactggctttcaagccacaactcatggcctgtagcattgaagaaaggtggaagcctcttgtgaaatacctgtatcaccttaacatttcacgggatggcatgaagcgaatgttgatggtccaacctacaatattctgtcttgatttggagacagtgattgcaccaaaggtacaatttttaattgatattggtgtgaggagtgatgcaatcggcaatgtgcttgcgaagtttcctcctgtattaacttatagcttgtacaagaaaatacgcccagtggacgagggttgcaatcaacccctctcaagcggtccaaggacccacttgaataccacagtgttttgctttgcttttcttaatcccgttcgcgaggaatctccacaacttggagtctctcgcccttacaaagatgttcacaaagaagcacggagtaagggagggattagcaactcacacaagacacaaagatcacagcaaatacgcacacacaagacccagacttaagctcaaaagactaacacactagaacggag

SEQ ID NO: 217414 - DNA, 2942 bp, Zea Mays
aaaagcgcccgcgacggctggggcgagggccccaccgatcccgcctctccctctcctagtttattttactcgccaacgcacacggaccgatgcgctacctcgagcaagcttgcgttgccgccctccctccccgtcgtgctcacgtgggttggtcaaccccctccccgcgccgcgagcaccttcacctccctcccgcctacatccacatggcagcgccgtggccgtcgcgcgcggcctgctaacagcaggcaaacagcaacacctcgcggtccctcggctgctgcgcaccgcgccgctcgccatggcgccaccgctgccgctgccgctgctgcggtggctgctcctggcggcagcggtcgccgcgaccgtggcgcagccgcagccgcagccgctggcgtcgcggacggacctggcggcgctgtacagcctgcgcgcctcgctggggctgcgcgcgcgggactggccgctcagggccgacccgtgcgcgcgctgggcgggcgtggactgcgcggcgggccgcgtcgtgggcgtcaccgtcgcggggctccgccgcacgcgcctgggcgccgcccggcccccgcttctcgcgctcgacggcctgcgccgcctcaccgcgctcgcccgcttcaacgcctccggcttcccgctcccgggggagatcccgccgtggctcgccgccggcctgccgccgccgctcgccgtgctcgacctcacctccgccgccgtcaacggcacgctgccgcccgacctcggcgcctccgggaacctcacggccctgctcctgtccgggaacacgctcacgggccctgtcccgcccgcgctgctctccgccgcgggcctccgcgtcctcgacctctcccgcaacaatctctccggaccgctgcccaacgtctccgtctccctcggcgccgccggcgcctccgtgtttaacgtctccgggaattctctgtatggcgtcgccgccgacgccattggggcgctcaggagacggtttcaggtcgtcgacgtgtccagcaactacctggacggagcgtggaacgggtccgacacaacagtgcttgccacgacgaattgcttctacggtgtaccggcccagcgtagccgtgcggactgtgaggagttttacaggaagcaaggcgtcaagcttgttgatcctccagcgccctcgcctgtgccttcgtcagagccaccgccttcaccctcaccagagaagaagaagaagaagaagcacgggatctccaaaaaactactcattggagtccttgtagccgccggaacactggttgctgtgttttttatcgcactgctgttctgtttagtgaagaggagaagcagaggaaggaggggagggagagggaggggagtggcgccaaacgaggaaggcacgcgctctgtctccgtgcggaggagggacagcagcgtcaatccggtggtgttatcgccatcggcggtgtctccaagtgccaacgatggacctaaggatgcgtctgccgttatcggtgagatcacctacgagcagctggtccttgccaccggcggttttggcgacgaccagctcatcaaacacgggcattcgggggacatgtaccatggtgtgttggagaatggctcccatgtcattgttaagaaggttggcgcaaagggcgccaacagacatgcgagtgaattggatttctacgtgaggtactcgcacgaaaggatcgttccgctgctcgcgcatttgagcaatgacgatgacgaattcatggcttacaagtatatgccgaagggggatttaacccatgcgttgcacaagaaacctgtagacaccgcagatggcttgccctccctggattggataactagactgaagattgcaactggcgtggctgaggctatgtgcttccttcatgaggaatgtagcccgccattagttcacagagatatccaatcaagcagtgtccttctcgatgataaatacgaagtgcgacttgggagtatgagtgacatatgcatccagcaaagtgggggaagccagaatgtcttcactcggatattgagatcatcaaattggtgactgacgttggtatctgacgctttcttgtggcaggtctctcgacaagcacacatcaggtccaccggccacttgttcctacgacgtgctctgcttcggcaaggtgctgctagagctggtgaccggcaacttgggcatcagcggaccaaacgacgcggcgtcggaagaatggctgtcgaacacgctgaaccacatcaacggcggcgacagggcgagcatcgccggcatcatggacccgctgctcctggtggacgaggaccacctggaggaggtgtgggcggtggccgtcatcgccaagacgtgcctaagcgccaagccgtcccgccgtccctcggcgcgctacgtgctgcgcgccctggagaacccgctgcgcgtggtgcgccagggctcctcccggtccaactcggcgcggcagcagctgcggagctcgtcgtcccggagctcgtggcagtccgtgttccaggggaaccaccgggtgcagagcctggacgccgcagcgacggcggcgttggcgctggaccggcggcactcgctgaggtcgcacggtagcggaggcgaggcgtcgttctcgttcaagagagccttgcccgtgcccacggacaccgcgccggagccggctgcggcgctcgacgaggacgccgttattgtctagtgtaggaggcggacattccccggttcttagcttctttacagggcggtgttcttgattcttttcccctgcgtgatatcacgtcgtcgcatgtgtgtgtataatttgttcctgtctgatgcgttcatccgtgttccaacatgaccaaaaaaaactgtgcataaagagtacgttttcaatactttcaaggaaaatttgaactttatcttcagcatgtcttccttgattttcaaagctgag

SEQ ID NO: 217415 - DNA, 774 bp, Zea Mays
ttccctttgcctgtttcttccccccttcgtgctccgtctcgcgccgacccatctgggctgggacacgcagcgacaattcactcgtcggtccagggaccccctggggtcgaaacgccgacactcccgcgcttcctccacgctcccttccatacagcgggcccgatccgattcggcttccgtctcactcatctcacctggcctccgcggagagatctagcggtggaggcgatgccactgggcgacggcgcggaggcgacggacttcgtgctgccggacgagctcctggcggcgttgccgcaggacccctacgagcagctggatctggcacgccacatcaccgcgctggcggtatccgggcgggtgtccggcctggagcgggaggcagggcgcctacgggcggagggtgcggggaaggaccgcgagaacgccgagctccgggagcgagtgaacgagattattgggaggtctgtcctggcgcacggaccttatgggaagctagagaagcatttgaagacgcagaaattactcatgttgacgatacagtagatcctgttagagacatgatatagagttcatgaaaaagaaacttgagggccttgataagccaatgaagaggagcaatgataagctgctcaaaattgagcatgaattatgtgagagggtgcggcatcaattacttcaattcttctgcataactatgggtcttttagcagccttactaaaatatgattgaaaatgaaaatcctttatcggcggctttgtataatggcacaa

SEQ ID NO: 217416 - DNA, 2089 bp, Zea Mays
gttccaacactcagttttttaaaatattggttccatatctcgcatctgggcaaccgaacacgaccgccgtctctactcccagtcccagctgccaaggtcttcgtcgcctcgtcgggctcgggtcctttgccggcgacgagcgcgtgcacaccagaagaatacagtggaagtggtatgcggttgtaaaacgatttcgattattccaagcggccggcgatggctcggagcccctgcgacctccgcctcctcctcctcgctgcagctgcagctttcatctacatccaagtgcgcctctttgctactcagtcccattatgcggaccgtcttgcggaagcatttgctccatacaggaaagatctgaaaatcaatgcaccagtcaattaaagtccttgatcgatcaagtcagcatgcagcaggagaagattgtagcattggaagagataaaggtacggcaagatgaagaacgtgcacatctgaggattttgataaaggatcttgaaaaaaggagtgtgcagaagctactagacaagaatgtggttcccgttgctgctgttgtcataatggcttgcaatcgaccagactatttagagagaacagttgaatctatcctgaagtatcagacatcagttgcttcgaagtttccgctttttatatctcaggatggagcaaatggagctgtgaagaataaagctttggaatataaacaaataacatacatgcagcatgtggatcttgaacctgtgcaaactgaaaggccaggagaattgacagcatattacaagattgctaaacattataagtgggccttggacaacctattcattaaacataattttgctcgagtgatcattctagaagatgacatggagattgccccggattttttcgactacttcgaggctgcagctaaattacttgataatgacaagacgattatggctgtttcttcttggaatgacaatgggcagaagcagtttgttaacgacccaaaagctctttaccgctcagatttctttcctgggcttggatggatgttaacaaagtccacttggattgaactgtcaccaaagtggcctaaagcttattgggatgattgggtgaggctaaaggaggtacatggacatcggcaattcatacgcccggaaatttgtagaacatacaattttggcaagcatggatcaagcttgggacagttcttcgagcaatacttggagcccattaagttaaacgatgttcatattgattggaattctgaggatctgagctaccttggggaggataagttttcaaccaaatttggaaaagaggtggctagtgccactcctctccgtggatcagatgctgtgttgaaagcccacaatatggctgaggatgtaaggatccaatacgacgaccaagaaggtttcgagcagatagctcgtcaatttggaatattcgaagaatggaaggatggcatcccaagaacggcttacaaaggagtggtggtcttccggtacaacagtagtcaaaggcgaatatttctcgtcagcccagattctcttcgtcagctgggggtgtagcatgttgagaaggtagattttttacccttggaatggcaaatatcatggaattgcttaactggtttctgtgagcatggaggaaccgggatgcatggtgaagaaattatttttgagaagtgattgtgttgacccaaaggtactggagtagtagaagcatgggcttggtttataggacatttgcaagatataatacatcgttgttatatctttctccgcatcaggaaatgtttagtcagtatgggacttgttatccttgagtgtatttagggtttacacgatgcagttgtatgcgctcaaaagagtgtagcaggagctcactagctgacctgacgctcgatcctttttggtagaagaaaggtgtatctttatgaccaaatttttcttattgggcatcttggaatattaagatggaaggaaatcttgtgcattcgtttgttgtactgttttgtggtgacttcgcagatgtgcgacaagatgggagcgtaagcatccaatcaattccatcgagtttgttgaggtgtcttgttctg

SEQ ID NO: 217417 - DNA, 4507 bp, Zea Mays
ggccctccggggcgccctccctcggtctctcccgcgtctcgagctgtcgacgtcgccgtcctcgcaccgctcccttctccggcacccgagccgtagccctgccctccgcatccacaatttgatgcggtgggcgcggccgccatgtcgtggggcctggcctggaagcgcagctccgagatcttccacctcacgctcaactacggtgactacgacgacaacgacgaccgccaaccctcgtcaccgccccctccggcgtcctcttcccctcccgcctctgcatcgtcgacccctgtatactcctcctcgcccattgccacccgcaacggcgaccttggcttccgcatcgagcttgactggtcggcgggggacgacgaggatcaggtcgcgctccgcctccagtcccagctcatggtcgcgctgcccccgccccacgacgccgtctccgtcgatctgaccccgagggaccacggggaggaggaaggggtgcggatcgaaatgcgtgtggtcaggaggcgggaggcgctccggtccgtgcgcgtgtcgcgggcccctgggtctgcgctgggcagcggcgatggcgcgggggtgctcgcacgcctcatcagatccaacctcgcgcccgcgcctgccgtggatggccccacagccgcctcgggcgtgcccgtgcttgcggatcactggcgccccatcaccatggtcagcctatgcaactgcggaatgtcgatgcttccagttgagttaactcgccttcaatttcttgagaagttatatcttgacaacaataaattgtcagttttgccccctgaagttggtgctttgaagaatatgaaagtgctgtcatttaacaacaacatgctagtttctgtccctgtagaactgcggcaatgtgttatgctggaggaattatcattagaacataacaagcttgtccggcctctattggatttcaggtcaatgcccaagctccgaattttgcgcttgtttggaaatcctctagagttccttccagaaattttgccattgcataacctcaggcatgtcacacttgcaaatattagaattgaagcagtggaaagtcttaaatctgtcactgtacagatagagactgagaatagttcctacttcattgcggccaggcacaaacttagtgcctttttctctctagttttccgtttctcttcctgtcaccatcctttgctagcttctgctttggtcaaaataatggaagatcgtagcaaccacattgcaattagcaaagaagagaatgctgtcaggcagcttataagcatgataagcagtgataatcgtcatgtggttgagcaagcatgtcttgctatctcatcactggcatctgatatttcttcagcaatgcagctgattaagtgtgacattatgaagcctattgaagctgtactaaaatcatctgatgaagaagaactagtatcagtattgcaagttgtagtcaccttaactttcgtttctgatcatgttgctcaaaaggtgcaacgtctatctctgtttgcaattggcaatttggctttctgtttggagactcgtcgcatcctcatgcattctgaaagcatgtgtgacctgttaatccgattaactatttcacaagagtgtcgtgtcagcaaggcagctgcgcgcgctttggcaatcctaggggagaatgagaacttacgtcgagcaataagaggaaggccagttgcaaagaagggtctacgcatcctatcaatggatggtggtggcatgaaaggccttgcaactgttcaaatgcttaaacagatagagcaaggaactgggaaacgcatacatgaaatgtttgacctcatatgtggtacatccactggtggcatgcttgcaatggctcttgggatcaagcagatgactttggatcagtgtgaagaaatatacacaaaacttggaaaacttgtatttactgaacctatcccaaaggatgaagctgctacgtggaaggagaagattgatcaacttttcaaaagttcctcacaaagttttagagtggttgtacatgggtccaagcacagtgcagatcaatttgagaggttactaaaggaaatgtgcgagaatgaagatggtgaccttctaattgaatctgctgtaaaaggcattccgaaggtctttgctgtatccactttagtcagtgtcattcctgctcaaccgtatatattccgaaactatcagtatcctcctggcactctggaggtatcaccaggaatggcagaaagtccatcaattggtgcaattggcacggctgtttctggtgcaccagttggtattaaacgtggtgccttcatggggagctgcaagcatcgcgtgtgggaagccataagagcatcgtctgcagcaccatattatctggatgatttctctgtagatgcaaatcgttggcaagatggagctattgtagccaacaatcctacaatctttgccattagagaagcacaacttttgtggccagatgcacgaatagattgtctagtctcgataggatgtggctcagttccaactaagagtcgccgaggtggatggcgctacttggacacagggcaagtgttaatagaaagtgcatgctcagtggagagagttgaagaaactttggatacactgataccgatgcttcctgaaatgcaatatttccgctttaatccagtggatgaacggtgtggtatggagttagatgaaactgatcctactatctggctgaagttggaagctgcaactgatgagtacattcagaagaactttctgtctgtcaagaatctttgtgagcttctggtcccaaggtaccaagaggaagaaaagccatcagatatttacaaatctctttcattttcaagactgacatcgttaaatcaaggtttcagtgaaagtaatcctatcttaggatggaggcgtgtggttttacttgtagaggcttcatttagtcctgattttggaaagaaaataaatcatgcacgttcccttgaatccttctgctcccagaatggtattaggttagctctaatgaatagcacttctgggtttgggaagccagccactgcacttcctaccccaataacttctcccttgtttactggaagtttcccatctagtccacttctatatagtccagagggcactcaacggatcagtcgaattgacctagttcctccacttagtttggatggccacccaactacaaagtcctcacctccaacatcaccattgaagtcaagacagccatctgcacatgttcggtcattgtatgataaactgcagaatatgcctcaagttggtgtgatacacttggctcttcaaaatgattcaactggttcagtattgagttggcagaatgatgtatttgtggtcgctgaacccggggaacttgcagacaggtttctgcaatctgtcaaaactatcttgtcaaccttgttgcgtgggtgtaatagaaagggtgcatattccctgtccaagatttcatgtttatctgagttggttgctgaatggccatcttttgaaatcggtgggatacaccaccgctatataggtcgacaaacacaagtaatggaagataaccaagaaattggcgcatatatgtttaggaggacagtgcctgctgttcacatggcacctgaagatgttcgatggatggttggagcatggagggagaggattatcatatgcagtggtaagtatggccttgctcatggcctggtcaaggcattcatggattgtggtgccaaagcagtcatctcgtcgtccatcgagcctccggattccaagacaatagtctaccatgggatggatgtcaatagaagcctagagaatggcaagtttgtcatccgtgatgaagaagcggacgaatcagagcctgaacctgtcagccctataagcgactgggaggacagtgatgtggagaaaggcggcaaccatgacgtggatgatgaggagtacctggctcagttcatgtgcctgatgtatgacaaattgttccgtgagggtgtgactgtggatacggctctgcagcaagcactccgctcacatcccaagttgaagtacagctgccacttacccaacgttttgtagttagggacattattgacaaaccatacataagtatagcaaaatggacatggataacagggaatgaataaggattgggtggattttttagttgggttatagaggtctatactttgttcgttgtgcaggcatggtgacagaataaaagcatgaaggcattgcactgcatgtgcatttttgctgtagttgtgagaacgggcattttgtttcgcaaatactatgctgacttttgacgttcagttgctagtttgcggctaacactaaggctcgctccatttaagtactgcttacacattagttgttgccctcctataactgtttatatattataaagcagaaaaaaaatagaagatctaatcaaggtgctcttgcacctacagttgaacacatcatccatacacagagcgcaacagcagtttcc

SEQ ID NO: 217418 - DNA, 4674 bp, Zea Mays
caaacgcctcccttcttccgttcccttcctcctccggccctccggggcgccctccctcggtctctcccgcgtctcgagctgtcgacgtcgccgtcctcgcaccgctcccttctccggcacccgagccgtagccctgccctccgcatccacaatttgatgcggtgggcgcggccgccatgtcgtggggcctggcctggaagcgcagctccgagatcttccacctcacgctcaactacggtgactacgacgacaacgacgaccgccaaccctcgtcaccgccccctccggcgtcctcttcccctcccgcctctgcatcgtcgacccctgtatactcctcctcgcccattgccacccgcaacggcgaccttggcttccgcatcgagcttgactggtcggcgggggacgacgaggatcaggtcgcgctccgcctccagtcccagctcatggtcgcgctgcccccgccccacgacgccgtctccgtcgatctgaccccgagggaccacggggaggaggaaggggtgcggatcgaaatgcgtgtggtcaggaggcgggaggcgctccggtccgtgcgcgtgtcgcgggcccctgggtctgcgctgggcagcggcgatggcgcgggggtgctcgcacgcctcatcagatccaacctcgcgcccgcgcctgccgtggatggccccacagccgcctcgggcgtgcccgtgcttgcggatcactggcgccccatcaccatggtcagcctatgcaactgcggaatgtcgatgcttccagttgagttaactcgccttcaatttcttgagaagttatatcttgacaacaataaattgtcagttttgccccctgaagttggtgctttgaagaatatgaaagtgctgtcatttaacaacaacatgctagtttctgtccctgtagaactgcggcaatgtgttatgctggaggaattatcattagaacataacaagcttgtccggcctctattggatttcaggtcaatgcccaagctccgaattttgcgcttgtttggaaatcctctagagttccttccagaaattttgccattgcataacctcaggcatgtcacacttgcaaatattagaattgaagcagtggaaagtcttaaatctgtcactgtacagatagagactgagaatagttcctacttcattgcggccaggcacaaacttagtgcctttttctctctagttttccgtttctcttcctgtcaccatcctttgctagcttctgctttggtcaaaataatggaagatcgtagcaaccacattgcaattagcaaagaagagaatgctgtcaggcagcttataagcatgataagcagtgataatcgtcatgtggttgagcaagcatgtcttgctatctcatcactggcatctgatatttcttcagcaatgcagctgattaagtgtgacattatgaagcctattgaagctgtactaaaatcatctgatgaagaagaactagtatcagtattgcaagttgtagtcaccttaactttcgtttctgatcatgttgctcaaaaggtgttgacaaaggatgtgttgaagtcattgaaagcactttgcgcacacaagaactctgaggtgcaacgtctatctctgtttgcaattggcaatttggctttctgtttggagactcgtcgcatcctcatgcattctgaaagcatgtgtgacctgttaatccgattaactatttcacaagagtgtcgtgtcagcaaggcagctgcgcgcgctttggcaatcctaggggagaatgagaacttacgtcgagcaataagaggaaggccagttgcaaagaagggtctacgcatcctatcaatggatggtggtggcatgaaaggccttgcaactgttcaaatgcttaaacagatagagcaaggaactgggaaacgcatacatgaaatgtttgacctcatatgtggtacatccactggtggcatgcttgcaatggctcttgggatcaagcagatgactttggatcagtgtgaagaaatatacacaaaacttggtgattcccttttgccttttgaagtttccttgccaatgccaatgttgccaactgaacttttaattttcctaggaaaacttgtatttactgaacctatcccaaaggatgaagctgctacgtggaaggagaagattgatcaacttttcaaaagttcctcacaaagttttagagtggttgtacatgggtccaagcacagtgcagatcaatttgagaggttactaaaggaaatgtgcgagaatgaagatggtgaccttctaattgaatctgctgtaaaaggcattccgaaggtctttgctgtatccactttagtcagtgtcattcctgctcaaccgtatatattccgaaactatcagtatcctcctggcactctggaggtatcaccaggaatggcagaaagtccatcaattggtgcaattggcacggctgtttctggtgcaccagttggtattaaacgtggtgccttcatggggagctgcaagcatcgcgtgtgggaagccataagagcatcgtctgcagcaccatattatctggatgatttctctgtagatgcaaatcgttggcaagatggagctattgtagccaacaatcctacaatctttgccattagagaagcacaacttttgtggccagatgcacgaatagattgtctagtctcgataggatgtggctcagttccaactaagagtcgccgaggtggatggcgctacttggacacagggcaagtgttaatagaaagtgcatgctcagtggagagagttgaagaaactttggatacactgataccgatgcttcctgaaatgcaatatttccgctttaatccagtggatgaacggtgtggtatggagttagatgaaactgatcctactatctggctgaagttggaagctgcaactgatgagtacattcagaagaactttctgtctgtcaagaatctttgtgagcttctggtcccaaggtaccaagaggaagaaaagccatcagatatttacaaatctctttcattttcaagactgacatcgttaaatcaaggtttcagtgaaagtaatcctatcttaggatggaggcgtgtggttttacttgtagaggcttcatttagtcctgattttggaaagaaaataaatcatgcacgttcccttgaatccttctgctcccagaatggtattaggttagctctaatgaatagcacttctgggtttgggaagccagccactgcacttcctaccccaataacttctcccttgtttactggaagtttcccatctagtccacttctatatagtccagagggcactcaacggatcagtcgaattgacctagttcctccacttagtttggatggccacccaactacaaagtcctcacctccaacatcaccattgaagtcaagacagccatctgcacatgttcggtcattgtatgataaactgcagaatatgcctcaagttggtgtgatacacttggctcttcaaaatgattcaactggttcagtattgagttggcagaatgatgtatttgtggtcgctgaacccggggaacttgcagacaggtttctgcaatctgtcaaaactatcttgtcaaccttgttgcgtgggtgtaatagaaagggtgcatattccctgtccaagatttcatgtttatctgagttggttgctgaatggccatcttttgaaatcggtgggatacaccaccgctatataggtcgacaaacacaagtaatggaagataaccaagaaattggcgcatatatgtttaggaggacagtgcctgctgttcacatggcacctgaagatgttcgatggatggttggagcatggagggagaggattatcatatgcagtggtaagtatggccttgctcatggcctggtcaaggcattcatggattgtggtgccaaagcagtcatctcgtcgtccatcgagcctccggattccaagacaatagtctaccatgggatggatgtcaatagaagcctagagaatggcaagtttgtcatccgtgatgaagaagcggacgaatcagagcctgaacctgtcagccctataagcgactgggaggacagtgatgtggagaaaggcggcaaccatgacgtggatgatgaggagtacctggctcagttcatgtgcctgatgtatgacaaattgttccgtgagggtgtgactgtggatacggctctgcagcaagcactccgctcacatcccaagttgaagtacagctgccacttacccaacgttttgtagttagggacattattgacaaaccatacataagtatagcaaaatggacatggataacagggaatgaataaggattgggtggattttttagttgggttatagaggtctatactttgttcgttgtgcaggcatggtgacagaataaaagcatgaaggcattgcactgcatgtgcatttttgctgtagttgtgagaacgggcattttgtttcgcaaatactatgctgacttttgacgttcagttgctagtttgcggctaacactaaggctcgctccatttaagtactgcttacacattagttgttgccctcctataactgtttatatattataaagcagaaaaaaaatagaagatctaatcaaggtgctcttgcacctacagttgaacacatcatccatacacagagcgcaacagcagtttcc

SEQ ID NO: 217419 - DNA, 4522 bp, Zea Mays
gatttgtatatttcagcttgttttgaaataagttcgtaaaaacccccaacgaaaataccaaataaacccagaaaaaaaagaaattacacaggaacaaaaaaagaaacgaaccaaacaagcgcaggcgcaaacgcctcccttcttccgttcccttcctcctccggccctccggggcgccctccctcggtctctcccgcgtctcgagctgtcgacgtcgccgtcctcgcaccgctcccttctccggcacccgagccgtagccctgccctccgcatccacaatttgatgcggtgggcgcggccgccatgtcgtggggcctggcctggaagcgcagctccgagatcttccacctcacgctcaactacggtgactacgacgacaacgacgaccgccaaccctcgtcaccgccccctccggcgtcctcttcccctcccgcctctgcatcgtcgacccctgtatactcctcctcgcccattgccacccgcaacggcgaccttggcttccgcatcgagcttgactggtcggcgggggacgacgaggatcaggtcgcgctccgcctccagtcccagctcatggtcgcgctgcccccgccccacgacgccgtctccgtcgatctgaccccgagggaccacggggaggaggaaggggtgcggatcgaaatgcgtgtggtcaggaggcgggaggcgctccggtccgtgcgcgtgtcgcgggcccctgggtctgcgctgggcagcggcgatggcgcgggggtgctcgcacgcctcatcagatccaacctcgcgcccgcgcctgccgtggatggccccacagccgcctcgggcgtgcccgtgcttgcggatcactggcgccccatcaccatggtcagcctatgcaactgcggaatgtcgatgcttccagttgagttaactcgccttcaatttcttgagaagttatatcttgacaacaataaattgtcagttttgccccctgaagttggtgctttgaagaatatgaaagtgctgtcatttaacaacaacatgctagtttctgtccctgcagtagaactgcggcaatgtgttatgctggaggaattatcattagaacataacaagcttgtccggcctctattggatttcaggtcaatgcccaagctccgaattttgcgcttgtttggaaatcctctagagttccttccagaaattttgccattgcataacctcaggcatgtcacacttgcaaatattagaattgaagcagtggaaagtcttaaatctgtcactgtacagatagaggttgagcaagcatgtcttgctatctcatcactggcatctgatatttcttcagcaatgcagctgattaagtgtgacattatgaagcctattgaagctgtactaaaatcatctgatgaagaagaactagtatcagtattgcaagttgtagtcaccttaactttcgtttctgatcatgttgctcaaaaggtgttgacaaaggatgtgttgaagtcattgaaagcactttgcgcacacaagaactctgaggtgcaacgtctatctctgtttgcaattggcaatttggctttctgtttggagactcgtcgcatcctcatgcattctgaaagcatgtgtgacctgttaatccgattaactatttcacaagagtgtcgtgtcagcaaggcagctgcgcgcgctttggcaatcctaggggagaatgagaacttacgtcgagcaataagaggaaggccagttgcaaagaagggtctacgcatcctatcaatggatggtggtggcatgaaaggccttgcaactgttcaaatgcttaaacagatagagcaaggaactgggaaacgcatacatgaaatgtttgacctcatatgtggtacatccactggtggcatgcttgcaatggctcttgggatcaagcagatgactttggatcagtgtgaagaaatatacacaaaacttggaaaacttgtatttactgaacctatcccaaaggatgaagctgctacgtggaaggagaagattgatcaacttttcaaaagttcctcacaaagttttagagtggttgtacatgggtccaagcacagtgcagatcaatttgagaggttactaaaggaaatgtgcgagaatgaagatggtgaccttctaattgaatctgctgtaaaaggcattccgaaggtctttgctgtatccactttagtcagtgtcattcctgctcaaccgtatatattccgaaactatcagtatcctcctggcactctggaggtatcaccaggaatggcagaaagtccatcaattggtgcaattggcacggctgtttctggtgcaccagttggtattaaacgtggtgccttcatggggagctgcaagcatcgcgtgtgggaagccataagagcatcgtctgcagcaccatattatctggatgatttctctgtagatgcaaatcgttggcaagatggagctattgtagccaacaatcctacaatctttgccattagagaagcacaacttttgtggccagatgcacgaatagattgtctagtctcgataggatgtggctcagttccaactaagagtcgccgaggtggatggcgctacttggacacagggcaagtgttaatagaaagtgcatgctcagtggagagagttgaagaaactttggatacactgataccgatgcttcctgaaatgcaatatttccgctttaatccagtggatgaacggtgtggtatggagttagatgaaactgatcctactatctggctgaagttggaagctgcaactgatgagtacattcagaagaactttctgtctgtcaagaatctttgtgagcttctggtcccaaggtaccaagaggaagaaaagccatcagatatttacaaatctctttcattttcaagactgacatcgttaaatcaaggtttcagtgaaagtaatcctatcttaggatggaggcgtgtggttttacttgtagaggcttcatttagtcctgattttggaaagaaaataaatcatgcacgttcccttgaatccttctgctcccagaatggtattaggttagctctaatgaatagcacttctgggtttgggaagccagccactgcacttcctaccccaataacttctcccttgtttactggaagtttcccatctagtccacttctatatagtccagagggcactcaacggatcagtcgaattgacctagttcctccacttagtttggatggccacccaactacaaagtcctcacctccaacatcaccattgaagtcaagacagccatctgcacatgttcggtcattgtatgataaactgcagaatatgcctcaagttggtgtgatacacttggctcttcaaaatgattcaactggttcagtattgagttggcagaatgatgtatttgtggtcgctgaacccggggaacttgcagacaggtttctgcaatctgtcaaaactatcttgtcaaccttgttgcgtgggtgtaatagaaagggtgcatattccctgtccaagatttcatgtttatctgagttggttgctgaatggccatcttttgaaatcggtgggatacaccaccgctatataggtcgacaaacacaagtaatggaagataaccaagaaattggcgcatatatgtttaggaggacagtgcctgctgttcacatggcacctgaagatgttcgatggatggttggagcatggagggagaggattatcatatgcagtggtaagtatggccttgctcatggcctggtcaaggcattcatggattgtggtgccaaagcagtcatctcgtcgtccatcgagcctccggattccaagacaatagtctaccatgggatggatgtcaatagaagcctagagaatggcaagtttgtcatccgtgatgaagaagcggacgaatcagagcctgaacctgtcagccctataagcgactgggaggacagtgatgtggagaaaggcggcaaccatgacgtggatgatgaggagtacctggctcagttcatgtgcctgatgtatgacaaattgttccgtgagggtgtgactgtggatacggctctgcagcaagcactccgctcacatcccaagttgaagtacagctgccacttacccaacgttttgtagttagggacattattgacaaaccatacataagtatagcaaaatggacatggataacagggaatgaataaggattgggtggattttttagttgggttatagaggtctatactttgttcgttgtgcaggcatggtgacagaataaaagcatgaaggcattgcactgcatgtgcatttttgctgtagttgtgagaacgggcattttgtttcgcaaatactatgctgacttttgacgttcagttgctagtttgcggctaacactaaggctcgctccatttaagtactgcttacacattagttgttgccctcctataactgtttatatattataaagcagaaaaaaaatagaagatctaatcaaggtgctcttgcacctacagttgaacacatcatccatacacagagcgcaacagcagtttcc

SEQ ID NO: 217420 - DNA, 4704 bp, Zea Mays
aaacgatttgtatatttcagcttgttttgaaataagttcgtaaaaacccccaacgaaaataccaaataaacccagaaaaaaaagaaattacacaggaacaaaaaaagaaacgaaccaaacaagcgcaggcgcaaacgcctcccttcttccgttcccttcctcctccggccctccggggcgccctccctcggtctctcccgcgtctcgagctgtcgacgtcgccgtcctcgcaccgctcccttctccggcacccgagccgtagccctgccctccgcatccacaatttgatgcggtgggcgcggccgccatgtcgtggggcctggcctggaagcgcagctccgagatcttccacctcacgctcaactacggtgactacgacgacaacgacgaccgccaaccctcgtcaccgccccctccggcgtcctcttcccctcccgcctctgcatcgtcgacccctgtatactcctcctcgcccattgccacccgcaacggcgaccttggcttccgcatcgagcttgactggtcggcgggggacgacgaggatcaggtcgcgctccgcctccagtcccagctcatggtcgcgctgcccccgccccacgacgccgtctccgtcgatctgaccccgagggaccacggggaggaggaaggggtgcggatcgaaatgcgtgtggtcaggaggcgggaggcgctccggtccgtgcgcgtgtcgcgggcccctgggtctgcgctgggcagcggcgatggcgcgggggtgctcgcacgcctcatcagatccaacctcgcgcccgcgcctgccgtggatggccccacagccgcctcgggcgtgcccgtgcttgcggatcactggcgccccatcaccatggtcagcctatgcaactgcggaatgtcgatgcttccagttgagttaactcgccttcaatttcttgagaagttatatcttgacaacaataaattgtcagttttgccccctgaagttggtgctttgaagaatatgaaagtgctgtcatttaacaacaacatgctagtttctgtccctgcagtagaactgcggcaatgtgttatgctggaggaattatcattagaacataacaagcttgtccggcctctattggatttcaggtcaatgcccaagctccgaattttgcgcttgtttggaaatcctctagagttccttccagaaattttgccattgcataacctcaggcatgtcacacttgcaaatattagaattgaagcagtggaaagtcttaaatctgtcactgtacagatagagactgagaatagttcctacttcattgcggccaggcacaaacttagtgcctttttctctctagttttccgtttctcttcctgtcaccatcctttgctagcttctgctttggtcaaaataatggaagatcgtagcaaccacattgcaattagcaaagaagagaatgctgtcaggcagcttataagcatgataagcagtgataatcgtcatgtggttgagcaagcatgtcttgctatctcatcactggcatctgatatttcttcagcaatgcagctgattaagtgtgacattatgaagcctattgaagctgtactaaaatcatctgatgaagaagaactagtatcagtattgcaagttgtagtcaccttaactttcgtttctgatcatgttgctcaaaaggtgttgacaaaggatgtgttgaagtcattgaaagcactttgcgcacacaagaactctgaggtgcaacgtctatctctgtttgcaattggcaatttggctttctgtttggagactcgtcgcatcctcatgcattctgaaagcatgtgtgacctgttaatccgattaactatttcacaagagtgtcgtgtcagcaaggcagctgcgcgcgctttggcaatcctaggggagaatgagaacttacgtcgagcaataagaggaaggccagttgcaaagaagggtctacgcatcctatcaatggatggtggtggcatgaaaggccttgcaactgttcaaatgcttaaacagatagagcaaggaactgggaaacgcatacatgaaatgtttgacctcatatgtggtacatccactggtggcatgcttgcaatggctcttgggatcaagcagatgactttggatcagtgtgaagaaatatacacaaaacttggatgaagctgctacgtggaaggagaagattgatcaacttttcaaaagttcctcacaaagttttagagtggttgtacatgggtccaagcacagtgcagatcaatttgagaggttactaaaggaaatgtgcgagaatgaagatggtgaccttctaattgaatctgctgtaaaaggcattccgaaggtctttgctgtatccactttagtcagtgtcattcctgctcaaccgtatatattccgaaactatcagtatcctcctggcactctggaggtatcaccaggaatggcagaaagtccatcaattggtgcaattggcacggctgtttctggtgcaccagttggtattaaacgtggtgccttcatggggagctgcaagcatcgcgtgtgggaagccataagagcatcgtctgcagcaccatattatctggatgatttctctgtagatgcaaatcgttggcaagatggagctattgtagccaacaatcctacaatctttgccattagagaagcacaacttttgtggccagatgcacgaatagattgtctagtctcgataggatgtggctcagttccaactaagagtcgccgaggtggatggcgctacttggacacagggcaagtgttaatagaaagtgcatgctcagtggagagagttgaagaaactttggatacactgataccgatgcttcctgaaatgcaatatttccgctttaatccagtggatgaacggtgtggtatggagttagatgaaactgatcctactatctggctgaagttggaagctgcaactgatgagtacattcagaagaactttctgtctgtcaagaatctttgtgagcttctggtcccaaggtaccaagaggaagaaaagccatcagatatttacaaatctctttcattttcaagactgacatcgttaaatcaaggtttcagtgaaagtaatcctatcttaggatggaggcgtgtggttttacttgtagaggcttcatttagtcctgattttggaaagaaaataaatcatgcacgttcccttgaatccttctgctcccagaatggtattaggttagctctaatgaatagcacttctgggtttgggaagccagccactgcacttcctaccccaataacttctcccttgtttactggaagtttcccatctagtccacttctatatagtccagagggcactcaacggatcagtcgaattgacctagttcctccacttagtttggatggccacccaactacaaagtcctcacctccaacatcaccattgaagtcaagacagccatctgcacatgttcggtcattgtatgataaactgcagaatatgcctcaagttggtgtgatacacttggctcttcaaaatgattcaactggttcagtattgagttggcagaatgatgtatttgtggtcgctgaacccggggaacttgcagacaggtttctgcaatctgtcaaaactatcttgtcaaccttgttgcgtgggtgtaatagaaagggtgcatattccctgtccaagatttcatgtttatctgagttggttgctgaatggccatcttttgaaatcggtgggatacaccaccgctatataggtcgacaaacacaagtaatggaagataaccaagaaattggcgcatatatgtttaggaggacagtgcctgctgttcacatggcacctgaagatgttcgatggatggttggagcatggagggagaggattatcatatgcagtggtaagtatggccttgctcatggcctggtcaaggcattcatggattgtggtgccaaagcagtcatctcgtcgtccatcgagcctccggattccaagacaatagtctaccatgggatggatgtcaatagaagcctagagaatggcaagtttgtcatccgtgatgaagaagcggacgaatcagagcctgaacctgtcagccctataagcgactgggaggacagtgatgtggagaaaggcggcaaccatgacgtggatgatgaggagtacctggctcagttcatgtgcctgatgtatgacaaattgttccgtgagggtgtgactgtggatacggctctgcagcaagcactccgctcacatcccaagttgaagtacagctgccacttacccaacgttttgtagttagggacattattgacaaaccatacataagtatagcaaaatggacatggataacagggaatgaataaggattgggtggattttttagttgggttatagaggtctatactttgttcgttgtgcaggcatggtgacagaataaaagcatgaaggcattgcactgcatgtgcatttttgctgtagttgtgagaacgggcattttgtttcgcaaatactatgctgacttttgacgttcagttgctagtttgcggctaacactaaggctcgctccatttaagtactgcttacacattagttgttgccctcctataactgtttatatattataaagcagaaaaaaaatagaagatctaatcaaggtgctcttgcacctacagttgaacacatcatccatacacagagcgcaacagcagtttcc

SEQ ID NO: 217421 - DNA, 2095 bp, Zea Mays
gtggaggcaaaaatatctaagcaagccccacacacatagagaaatctcaatccaaagagagccttctccaccgctcttgctcgtccaaccttctccatcgtctcaccttaggtttcgctccccgccgccgccgccatgatgccgcagcagcagcagcccggcatggcccctcctcctccacaggccgcccccggagcgccgccacactggggcggcatcccgccgcctatggcccctcagcatcagtacgcgccgcagatgtggggccaggcgcccccgcccccgcccccgcctcaggccgcgtacggtcaggcgcccccgccgccccaggccgcgtatggccaggcgctcccaccaccccaggccgcgtacggccaggcgcctcccccgccacaggccgcctactacggggcggtacccgcgcccgcggcggtggccgcggcacctgtcgggcccagcgaggtcaggacgctctggatcggggatctgcagtactggatggacgataactacatctacgggtgcttcgcatccacgggggaggtgcaaaatgtgaagctaattcgtgacaagcatactggacaacttcagggctatggttttattgaattcataagccgcgctgctgctgaaagagttcttcagacttacaacgggacaatgatgccaaatgttgagttgccattccggttgaattgggctagtgctggtgaaaaacgtgatgacacccccgactatacaatatttgttggtgatttggctgctgatgttacagactatgtattacaagagacatttagggcacattacccttctgtgaagggtgcaaaagttgtaacagacaagctgacaatgcgcacaaagggttatggttttgtgaagtttggtgatcctaatgagcaagctcgtgcaatgactgagatgaatggcatgctatgttcttctaggcctatgcgtattgggcctgctgcaaacaagaaagctactgttgttcaggagaaagtaccaagtgctcagggagttcagtctgacaatgatcctaacaatacaaccatttttgttggtggtcttgaccccaatgtcactgaagatatgttgaaacaagttttcaccccttatggggacgtagtccatgttaagattcctgttggcaaaagatgtggttttgttcaatatgctaacagatcttcggcagaggaggcattggtaattctgcaaggcaccttggttggagggcagaatgtgaggctttcatggggtcgcagcccttcaaacaaacaagttcaggactccaaccagtgggccggggctaatgctggatattatggctacggtcaaggctatgaggcctatgggtacccccagtctcaggaccctaatatgtataattatggagctggagcttatgctggctatccaaattaccaacaacaaccagtagcacagcaaccgccgcagcaacagtgagaggtccagtgacgctactgtcatttgggtgattgacgtggaaatatttatgagttgtaagatgagcttcggatgcaagctggattaggtatacagacatgattttcgtagtactcagattctgagttgccctcgtatcagagcttgtggtcccaatagcctgcagctgcagctaaaacgatctattttggtagcggaatgttttatctgcttattttgtaccgtgtcttccgctactgcggcggagccttgataacttgctatgttggatttttcccgagtgttatcgcatgaatgttgtcatttgccttggtgccatgttggtgttggcaaacgagcgagcagaacctgcagatcgagcagtacctgagcaccattttaacatggtttaacctttttagctggctcttgttaggattggtacattttcactgagtagggcacctagccgaaccgctcggttttcggtgttggcattttgagaagttcggtcatccgtgtcggctttctgttttgttaggtttgtatcgtagatagtactatacgtagaggtgtttgaaatagtgatgagataagaaatgagataaaagagttgttggatacagtcttacatcgtacatcgaatcga

SEQ ID NO: 217422 - DNA, 542 bp, Zea Mays
gtggggttcaacgcccatgtttatggacttcttatgtcgcttgctgtgcaaaatgtgaagctaattcgtgacaagcatactggacaacttcagggctatggttttattgaattcataagccgcgctgctgctgaaagagttcttcagacttacaacgggacaatgatgccaaatgttgagttgccattccggttgaattgggctagtgctggtgaaaaacgtgatgacacccccgactatacaatatttgttggtgatttggctgctgatgttacagactatgtattacaagagacatttagggcacattacccttctgtgaagggtgcaaaagttgtaacagacaagctgacaatgcgcacaaagggttatggttttgtgaagtttggtgatcctaatgagcaagctcgtgcaatgactgagatgaatggcatgctatgttcttctaggcctatgcgtattgggcctgctgcaaacaagaaagctactgttgttcaggagaaaggagggttctgaaatactcgtaaaactgctgttgtctt

SEQ ID NO: 217423 - DNA, 1157 bp, Zea Mays
gaggaattttacgaacagggaaaggaaaaagaaattcaccatcaaaataggacgaagaaaatctaagaaactgaaatccaacaggggaatttccctttcggctgctgcgaaactgcagccaaccaaggagtggaggagtaggagtagcggcagtcaaagcgtggcgggcggacgggcgggcaagctggaacccgttggatcggtggtatcaaggaatcggaagagggacccggctctcccctccccaccccgcgtcccacgtcggttcccctaatctgcgtccgcggcgtgatatgagacggttctgtaattgctgatcggcgtgatgaattttaggccaatagttcttatcttcctcctgctcgtgctcattgtcacatcacagtttgagtggaagcagcatattggtgaggctgaggcgaatccaacagctacacgaaggaggcaacaggcgcttggaagggaggatgctgttaaagagaaagtaatattggcacaagagaaaaacattcagcagcttaatgagcttattcagagccttcagcttcagctattgcattgccggggcagtaacagttctgctcagaccgcctcaagccacagcgaagtggagggacatgaaatgattggtgactgataacctctcatcccctcccctctgttgacataggtagtttgcttcagagtataaccaagacaagaacagaagctcttcaggcaatggaaactcttgttgtcgccttacggtgggccggtagagttactggtattatgtgctttacgttatcagtatcacctccttttgcattctcacccagcgtgtacagggttttagtatgttggtctaggttactttgctgatcaaggttcgaatgtatttgttcttttaaacatatgcactccgatctttatatgatggaccatttctttgtgtctgtgacggcgtttttttcatgctcggcatgttgcagagctcttgtttctgtgcaagattcaaaattttacccagcaaattttgttctttgccaactacgggtgacagcggagcgaagaggagagggcaagaaagagataaaagcggcactctccagtttgaagcaagggattgaattccacttcgctgcaatgaagagatgtgtaccaagcattctcttgct

SEQ ID NO: 217424 - DNA, 840 bp, Zea Mays
agaaattcaccatcaaaataggacgaagaaaatctaagaaactgaaatccaacaggggaatttccctttcggctgctgcgaaactgcagccaaccaaggagtggaggagtaggagtagcggcagtcaaagcgtggcgggcggacgggcgggcaagctggaacccgttggatcggtggtatcaaggaatcggaagagggacccggctctcccctccccaccccgcgtcccacgtcggttcccctaatctgcgtccgcggcgtgatatgagacggttctgtaattgctgatcggcgtgatgaattttaggccaatagttcttatcttcctcctgctcgtgctcattgtcacatcacagtttgagtggaagcagcatattggtgaggctgaggcgaatccaacagctacacgaaggaggcaacaggcgcttggaagggaggatgctgttaaagagaaagtaatattggcacaagagaaaaacattcagcagcttaatgagcttattcagagccttcagcttcagctattgcattgccggggcagtaacagttctgctcagaccgcctcaagccacagcgaagtggagggacatgaaatgattggtgactgataacctctcatcccctcccctctgttgacataggtagtttgcttcagagtataaccaagacaagaacagaagctcttcaggcaatggaaactcttgttgtcgccttacggtgggccgcggagcgaagaggagagggcaagaaagagataaaagcggcactctccagtttgaagcaagggattgaattccacttcgctgcaatgaagagatgtgtaccaagcattctcttgct

SEQ ID NO: 217425 - DNA, 2446 bp, Zea Mays
gttcaacttcgacggcggccccagcctcgctacactgtcgctatccattttccccgtcacgagctgccatgagcaattaagtcttcttcacttcctggttcccagtattggtcgaggcgatctgacggagggagcagccaagtcagcaagtaccgcagcaccaagcagtcgaacagcgccgaagatgccagggctcgccgcgtcggcgtccgcagctccggcgccgttctcgttggcgacctcgcgcttaaccccggttgcaagacctgctccaagtttcagaacgcaagcttgtggattgaggtgctggattgctgcaaagctgaaactccgcaaggcattgaaaaggcatcacggatggcaacttcaaagaaatctagatgctcgagggaatgataacgttccagattgcttggaggctgcatctctgactgaaaagagaagtcattggaacatgcatcttgcttatggttgtcactctattgggaaatccgttgtcttgagtccgttactttgcatgtgcagatgtgcttatcacagttgtcattattgtcttaatgccttatgatttcgtcagtgctgctgacactggattgcttcatacttttgatagttacattcaatttgcattagcattataagcaaaaaaatgctcaagagaaactttcttcgtcatattatcttacaactactttttactgcaaacttcttggcaatttttgtctttatgctttcatgttgccctgactgtttcccctttatgcagattctggaggtgaaatggccaacacaagctctgatactttggatagttcaactgttcaggaaaaaccagtggttccgggacacatcatctctgaaatcagttctcatgttcaaaaggaagagtctgctgtgtccaaaagacgctctaacaatgaaccatctctttgcattgctgtaattggagctactgaatgttggtatatttgggtattctaggaagaaattgacagatgagggcttaagatctataattgaagccaatttgacctgccgggtggatcaccatgaaaattgtgatgacaagctaattgagttcctcaaaaagacgtattatgtagatgccggacatgacaaccaagaagggatggttagattaaattctaggatgtcacaaatagagggcattggtgctgcaaacagaatattctaccttgctgttccacaagaggcactccttgatgtagcattgccactggctgacggtgcccaaactaagcaaggctggaatagaataattatcgagaaaccatttggctttactggtttgtcctcactgcgggtaacacaatctatgctgtcaaggtttgaggagaagcaaatttacaggattgaccaccttctggggaaggatctgatcgaaaatcttactgtcttgagattttctaacttggtgtttgaacctttgtggagtcgaacttacatacggaatgtgcaggtcattttttctgaagaaacatcaaatgaaatacaagggaggtactttggaaattatgggataatccgtgacatagttcacagccacattcttcaaacaatagctctatttgctatggaaccacctgtaagtcttgatggagaggatatccgagatgaaaaggtgaaggttctcagatcaattcggaaagtgaaccttgatgatgttgttcttggtcaacttaaagatatgtctggtaaagttgacagatacacaaaatccatgataccaacctattttgctgctgctatgtacattgacaatgcacgctgggatggggtaccattttttatcaggacaggcatgggacttatgacgaatagagcagaaattcgaattcagtttcgccatgtccctggtaatatctaccgtgaacgctttggccatgacatagatctcgacacaaacgagctggttctacgcgatcaacctgaagaagcaatcctgttgaaagtcaacaacaaggtcccagggcttgggctccagctggatgcttcagaactgaacctgctttaccgggataggtacaacaccgaggtaccagattcgtatgaacatcttctactggacgtgctagatggagatagtcatttattcatgcgcagcgacgaactggctgccgcatggaatgtgctcactccgataatccatgagatagatcagaacagagtagttcctgagctctacgaggctggggacagagggcctatcaatgcttaccatctcgctgctaaacatggggtgcgatgggatgacgactgtcagatgtacaatatgccttctgtaatcggcctgatcaaggactttcaaggagacatgcctttcaaggagatatgcaaacatggtttctttcctgtcctgtagactgtagcactgttgattcaagttggaaaaagaaaaaaaggagaaaagaaaatatgcttgcga

SEQ ID NO: 217426 - DNA, 2227 bp, Zea Mays
cagcggttcaacttcgacggcggccccagcctcgctacactgtcgctatccattttccccgtcacgagctgccatgagcaattaagtcttcttcacttcctggttcccagtattggtcgaggcgatctgacggagggagcagccaagtcagcaagtaccgcagcaccaagcagtcgaacagcgccgaagatgccagggctcgccgcgtcggcgtccgcagctccggcgccgttctcgttggcgacctcgcgcttaaccccggttgcaagacctgctccaagtttcagaacgcaagcttgtggattgaggtgctggattgctgcaaagctgaaactccgcaaggcattgaaaaggcatcacggatggcaacttcaaagaaatctagatgctcgagggaatgataacgttccagattgcttggaggctgcatctctgactgaaaagagaagtcattggaacatgcatcttgcttatgattctggaggtgaaatggccaacacaagctctgatactttggatagttcaactgttcaggaaaaaccagtggttccgggacacatcatctctgaaatcagttctcatgttcaaaaggaagagtctgctgtgtccaaaagacgctctaacaatgaaccatctctttgcattgctgtaattggagctactgaatgttggtatatttgggtattctaggaagaaattgacagatgagggcttaagatctataattgaagccaatttgacctgccgggtggatcaccatgaaaattgtgatgacaagctaattgagttcctcaaaaagacgtattatgtagatgccggacatgacaaccaagaagggatggttagattaaattctaggatgtcacaaatagagggcattggtgctgcaaacagaatattctaccttgctgttccacaagaggcactccttgatgtagcattgccactggctgacggtgcccaaactaagcaaggctggaatagaataattatcgagaaaccatttggctttactggtttgtcctcactgcgggtaacacaatctatgctgtcaaggtttgaggagaagcaaatttacaggattgaccaccttctggggaaggatctgatcgaaaatcttactgtcttgagattttctaacttggtgtttgaacctttgtggagtcgaacttacatacggaatgtgcaggtcattttttctgaagaaacatcaaatgaaatacaagggaggtactttggaaattatgggataatccgtgacatagttcacagccacattcttcaaacaatagctctatttgctatggaaccacctgtaagtcttgatggagaggatatccgagatgaaaaggtgaaggttctcagatcaattcggaaagtgaaccttgatgatgttgttcttggtcaacttaaagatatgtctggtaaagttgacagatacacaaaatccatgataccaacctattttgctgctgctatgtacattgacaatgcacgctgggatggggtaccattttttatcaggacaggcatgggacttatgacgaatagagcagaaattcgaattcagtttcgccatgtccctggtaatatctaccgtgaacgctttggccatgacatagatctcgacacaaacgagctggttctacgcgatcaacctgaagaagcaatcctgttgaaagtcaacaacaaggtcccagggcttgggctccagctggatgcttcagaactgaacctgctttaccgggataggtacaacaccgaggtaccagattcgtatgaacatcttctactggacgtgctagatggagatagtcatttattcatgcgcagcgacgaactggctgccgcatggaatgtgctcactccgataatccatgagatagatcagaacagagtagttcctgagctctacgaggctggggacagagggcctatcaatgcttaccatctcgctgctaaacatggggtgcgatgggatgacgactggtgagtcgatacatggcaaagattctcgatgcgcaacgagattcattaccaatttttgtcgttgtatcgcagtcagatgtacaatatgccttctgtaatcggcctgatcaaggactttcaaggagacatgcctttcaaggagatatgcaaacatggtttctttcctgtcctgtagactgtagcactgttgattcaagttggaaaaagaaaaaaaggagaaaagaaaatatgcttgcga

SEQ ID NO: 217427 - DNA, 2601 bp, Zea Mays
tgtaaagctacagcggttcaacttcgacggcggccccagcctcgctacactgtcgctatccattttccccgtcacgagctgccatgagcaattaagtcttcttcacttcctggttcccagtattggtcgaggcgatctgacggagggagcagccaagtcagcaagtaccgcagcaccaagcagtcgaacagcgccgaagatgccagggctcgccgcgtcggcgtccgcagctccggcgccgttctcgttggcgacctcgcgcttaaccccggttgcaagacctgctccaagtttcagaacgcaagcttgtggattgaggtgctggattgctgcaaagctgaaactccgcaaggcattgaaaaggcatcacggatggcaacttcaaagaaatctagatgctcgagggaatgataacgttccagattgcttggaggctgcatctctgactgaaaagagaagtcattggaacatgcatcttgcttatggttgtcactctattgggaaatccgttgtcttgagtccgttactttgcatgtgcagatgtgcttatcacagttgtcattattgtcttaatgccttatgatttcgtcagtgctgctgacactggattgcttcatacttttgatagttacattcaatttgcattagcattataagcaaaaaaatgctcaagagaaactttcttcgtcatattatcttacaactactttttactgcaaacttcttggcaatttttgtctttatgctttcatgttgccctgactgtttcccctttatgcagattctggaggtgaaatggccaacacaagctctgatactttggatagttcaactgttcaggaaaaaccagtggttccgggacacatcatctctgaaatcagttctcatgttcaaaaggaagagtctgctgtgtccaaaagacgctctaacaatgaaccatctctttgcattgctgtaattggagctactggtgagctggcaagaactaaagtttttccagcattatttgctctgtattacagtggttttcttcctcggaatgttggtatatttgggtattctaggaagaaattgacagatgagggcttaagatctataattgaagccaatttgacctgccgggtggatcaccatgaaaattgtgatgacaagctaattgagttcctcaaaaagacgtattatgtagatgccggacatgacaaccaagaagggatggttagattaaattctaggatgtcacaaatagagggcattggtgctgcaaacagaatattctaccttgctgttccacaagaggcactccttgatgtagcattgccactggctgacggtgcccaaactaagcaaggctggaatagaataattatcgagaaaccatttggctttactggtttgtcctcactgcgggtaacacaatctatgctgtcaaggtttgaggagaagcaaatttacaggattgaccaccttctggggaaggatctgatcgaaaatcttactgtcttgagattttctaacttggtgtttgaacctttgtggagtcgaacttacatacggaatgtgcaggtcattttttctgaagaaacatcaaatgaaatacaagggaggtactttggaaattatgggataatccgtgacatagttcacagccacattcttcaaacaatagctctatttgctatggaaccacctgtaagtcttgatggagaggatatccgagatgaaaaggtgaaggttctcagatcaattcggaaagtgaaccttgatgatgttgttcttggtcaacttaaagatatgtctggtaaagttgacagatacacaaaatccatgataccaacctattttgctgctgctatgtacattgacaatgcacgctgggatggggtaccattttttatcaggacaggcatgggacttatgacgaatagagcagaaattcgaattcagtttcgccatgtccctggtaatatctaccgtgaacgctttggccatgacatagatctcgacacaaacgagctggttctacgcgatcaacctgaagaagcaatcctgttgaaagtcaacaacaaggtcccagggcttgggctccagctggatgcttcagaactgaacctgctttaccgggataggtacaacaccgaggtaccagattcgtatgaacatcttctactggacgtgctagatggagatagtcatttattcatgcgcagcgacgaactggctgccgcatggaatgtgctcactccgataatccatgagatagatcagaacagagtagttcctgagctctacgaggctggggacagagggcctatcaatgcttaccatctcgctgctaaacatggggtgcgatgggatgacgactggtgagtcgatacatggcaaagattctcgatgcgcaacgagattcattaccaatttttgtcgttgtatcgcagtcagatgtacaatatgccttctgtaatcggcctgatcaaggactttcaaggagacatgcctttcaaggagatatgcaaacatggtttctttcctgtcctgtagactgtagcactgttgattcaagttggaaaaagaaaaaaaggagaaaagaaaatatgcttgcga

SEQ ID NO: 217428 - DNA, 2305 bp, Zea Mays
tgtaaagctacagcggttcaacttcgacggcggccccagcctcgctacactgtcgctatccattttccccgtcacgagctgccatgagcaattaagtcttcttcacttcctggttcccagtattggtcgaggcgatctgacggagggagcagccaagtcagcaagtaccgcagcaccaagcagtcgaacagcgccgaagatgccagggctcgccgcgtcggcgtccgcagctccggcgccgttctcgttggcgacctcgcgcttaaccccggttgcaagacctgctccaagtttcagaacgcaagcttgtggattgaggtgctggattgctgcaaagctgaaactccgcaaggcattgaaaaggcatcacggatggcaacttcaaagaaatctagatgctcgagggaatgataacgttccagattgcttggaggctgcatctctgactgaaaagagaagtcattggaacatgcatcttgcttatgattctggaggtgaaatggccaacacaagctctgatactttggatagttcaactgttcaggaaaaaccagtggttccgggacacatcatctctgaaatcagttctcatgttcaaaaggaagagtctgctgtgtccaaaagacgctctaacaatgaaccatctctttgcattgctgtaattggagctactggtgagctggcaagaactaaagtttttccagcattatttgctctgtattacagtggttttcttcctcggaatgttggtatatttgggtattctaggaagaaattgacagatgagggcttaagatctataattgaagccaatttgacctgccgggtggatcaccatgaaaattgtgatgacaagctaattgagttcctcaaaaagacgtattatgtagatgccggacatgacaaccaagaagggatggttagattaaattctaggatgtcacaaatagagggcattggtgctgcaaacagaatattctaccttgctgttccacaagaggcactccttgatgtagcattgccactggctgacggtgcccaaactaagcaaggctggaatagaataattatcgagaaaccatttggctttactggtttgtcctcactgcgggtaacacaatctatgctgtcaaggtttgaggagaagcaaatttacaggattgaccaccttctggggaaggatctgatcgaaaatcttactgtcttgagattttctaacttggtgtttgaacctttgtggagtcgaacttacatacggaatgtgcaggtcattttttctgaagaaacatcaaatgaaatacaagggaggtactttggaaattatgggataatccgtgacatagttcacagccacattcttcaaacaatagctctatttgctatggaaccacctgtaagtcttgatggagaggatatccgagatgaaaaggtgaaggttctcagatcaattcggaaagtgaaccttgatgatgttgttcttggtcaacttaaagatatgtctggtaaagttgacagatacacaaaatccatgataccaacctattttgctgctgctatgtacattgacaatgcacgctgggatggggtaccattttttatcaggacaggcatgggacttatgacgaatagagcagaaattcgaattcagtttcgccatgtccctggtaatatctaccgtgaacgctttggccatgacatagatctcgacacaaacgagctggttctacgcgatcaacctgaagaagcaatcctgttgaaagtcaacaacaaggtcccagggcttgggctccagctggatgcttcagaactgaacctgctttaccgggataggtacaacaccgaggtaccagattcgtatgaacatcttctactggacgtgctagatggagatagtcatttattcatgcgcagcgacgaactggctgccgcatggaatgtgctcactccgataatccatgagatagatcagaacagagtagttcctgagctctacgaggctggggacagagggcctatcaatgcttaccatctcgctgctaaacatggggtgcgatgggatgacgactggtgagtcgatacatggcaaagattctcgatgcgcaacgagattcattaccaatttttgtcgttgtatcgcagtcagatgtacaatatgccttctgtaatcggcctgatcaaggactttcaaggagacatgcctttcaaggagatatgcaaacatggtttctttcctgtcctgtagactgtagcactgttgattcaagttggaaaaagaaaaaaaggagaaaagaaaatatgcttgcga

SEQ ID NO: 217429 - DNA, 1532 bp, Zea Mays
ccccactccaactccaagcatgcagccccgctcggcttccgttgccaggctgccacgccgtcgccgtctcgccgcctaaaacctccctcccccccctcgcaccactccgctcacctctcttcacgccgccgtagccggcgagtagcagcgggtacgtgcctttgcggtgtaccttattggctgagccttccctttgccgaggaagagcacagaagcagggaggtcggcatggcggaggtgcatctaggtctgccaggtccctgggcggcggattacagggagatggccgaccactacaccactaagatcggtggagtccctgattggccaactggtgatatgggcttcaagcccgagactcttcagtgcagcttatgtgggaccaagctttgtcttgttgctcaggtacatgcgcctgtggcaaagctaaacattgaggagaggataatctatgtgcttgtttgcccgacaccagaatgtggacctaaacctcaaagttggaaggttctaagagttcaaaaatgccataatgttatgcaaacagaaggtggtggtgatgaattaggtcaaccgaatggaccttcttctacaagtcttccagaagaacagaatgataaaaataaaattcctgagacaaatgatgacgattttgatctagatgccttagccgaagcacttgaacaagctgcaactttggcatcaaactcaaagaagaagaacaaatcgaagcatgctaatgctcctgtaaaacgtcctgtattgaaggagcaagcatgtgatctgagcatacctgtccttccttgtttttacatacattataataaggaactatatgggggcaaaggcgctgtgggttcaagtagcagtgagttggttttggacaaagaaatcatggatgccgcaaatgacgaagaagaaaaatgggaaggagaaaagtatgagtacgatagagctattggtgctgacagaacttttttaaaattcaagaaacggctggatgcatatccccagcaatgctttaggtattcttatggtggcaagccactgttggctacaacaaaattacaagatcctggcacctgtaggctgtgtggttcaccacgccagtatgaactgcaattgatgtctcctttatcatactttctccatgaagctggagacggttcctcaaattatgcacccagcagctggacttggctgactgttataatatacacctgccccaagagctgctgcccgtcctcatgcggtggaaagccccagagctgttgttggggagcagcggaggaggagatcctgattcaggaggatgaagtcctttaggatctaaccagtgctggttgagaaactattcccgatttgaacatgtgcctggattgtcaactccaatcaagggtggccatgttacgcttgagcatcaagggatatgatccgatgcagctcgagaaatttacaatctgcaacaacgagtggtaggaagaattattcacctgtaagaaagactggtatcatctttccgctcattgatgagg

SEQ ID NO: 217430 - DNA, 6368 bp, Zea Mays
ccccactccaactccaagcatgcagccccgctcggcttccgttgccaggctgccacgccgtcgccgtctcgccgcctaaaacctccctcccccccctcgcaccactccgctcacctctcttcacgccgccgtagccggcgagtagcagcgggtacgtgcctttgcggtgtaccttattggctgagccttccctttgccgaggaagagcacagaagcagggaggtcggcatggcggaggtgcatctaggtctgccaggtccctgggcggcggattacagggagatggccgaccactacaccactaagatcggtggagtccctgattggccaactggtgatatgggcttcaagcccgagactcttcagtgcagcttatgtgggaccaagctttgtcttgttgctcaggtacatgcgcctgtggcaaagctaaacattgaggagaggataatctatgtgcttgtttgcccgacaccagaatgtggacctaaacctcaaagttggaaggttctaagagttcaaaaatgccataatgttatgcaaacagaaggtggtggtgatgaattaggtcaaccgaatggaccttcttctacaagtcttccagaagaacagaatgataaaaataaaattcctgagacaaatgatgacgattttgatctagatgccttagccgaagcacttgaacaagctgcaactttggcatcaaactcaaagaagaagaacaaatcgaagcatgctaatgctcctgtaaaacgtcctgtattgaaggagcaagcatgtgatctgagcatacctgtccttccttgtttttacatacattataataaggaactatatgggggcaaaggcgctgtgggttcaagtagcagtgagttggttttggacaaagaaatcatggatgccgcaaatgacgaagaagaaaaatgggaaggagaaaagtatgagtacgatagagctattggtgctgacagaacttttttaaaattcaagaaacggctggatgcatatccccagcaatgctttaggtattcttatggtggcaagccactgttggctacaacaaaattacaagatcctggcacctgtaggctgtgtggttcaccacgccagtatgaactgcaattgatgtctcctttatcatactttctccatgaagctggagacggttcctcaaattatgcacccagcagctggacttggctgactgttataatatacacctgccccaagagctgctgcccgtcctcatgcggtggaaagccccagagctgttgttggggagcagcggaggaggagatcctgattcaggaggatgaagtcctttaggatctaaccagtgctggttgagaaactattcccgatttgaacatgtaatatgcagtttttttttgttctccaatggttagagttgtaaagctatctgaaattttgaagtgtgttttgttattgtgccctggtatactgcagaactgtcatacttcacacagtatcatatcagactagtaagatttttttttctttgtggctgttgttttccgctgcaaaatcatttttttctaggtgcctggattgtcaactccaatcaagggtggccatgttacgcttgagcatcaagggatatgatccgctcgagaaatttacaatctgcaacaacgagtggtaggaagaattattcacctgtaagaaagactggtatcatctttccgctcattgatgagggttcaacttcagcaacaaggaaacaaggtgctgccacttctgttcgtgccaagatcaggagacttttgttttaatagaacatctccagacactgatggccaacagcatgagggaactggatgtgtgagcagaggagtcattagcgtcatccaaagaaatgcaggtttaacgggtgttggaaaggtgcaaggggtgcatcaggagtttgcatttctcatggcggtgggcagaggttgcaacaaaggtgctgagagtcggacaacattctgcaaggctcatggaggagggagacgatgccaagagttaggctgcaccaaaagcgtggcagggaagacagagttctgtatcgctcatggtggtgggcgctggtgtgggatcaaggaatgctcgagtgcggcaagggggaaatccggattctgcctaaaacacggtgaagggaaaaggtggaggatcgagggttgcactcgcggtgctgaaggtcattctgggctgtgcatctcacacggaggtggccgccggtgccagcacccgaactgcgagctacagaaagacagtgcgctaccatcaaatagctctgattctgagccagaagctatggaattggatgacaatggagcaggaaaatcccatagcatcgagggaaacagggattctcctatagacactgatgaaggccagccatctatggatgttgatattaagggaaaatcatctctcaacgatgatgttaatggaaagtcttcttctgagccattttccaatcctccaatcaacatgagtgtggaaagcctagagaagttttgcaaagaagcgtcgaggtccttctttgatgaagttggtctgattagccatcagataaattcctacaatgagtttgtctcgcatgggctccaggagctttttgattcgctgggtgaagtgattgttgaacctggctatgatccttcaaagaaaggatcaggtagctggaagcatgcaatcatcaagtttgggagagtgaagcttgaaaagcctgtgttttggactggcaaagatgaggtttctgttgattttaaaccttggcatgctcgtctccagaatatgacatatgcttcaagacttagagtagaagtgactattcaggtttattctttggagaaaagtgacaaatctaaaacagggaatgatggttttgttcaaaaaaggaacttcatgaatgaaactcactggatatttattggcctccttccagttatggtgaaatcaaacttatgtttgttgcatagtcttaaggaaagtgagtgcctgtttgatgcaggtggatactttttggtcaagggaatggagaaggtatttattgctcaagagctaagatgtctaaggaggctttggattagtgaccgtccttgctggactatctcttttatgtctgaaatgaagcgtagacgtatatatattaaactagttgaatctacaaggagtgaagatttcagtgggagcaaaatcatttccatttcctttttgtatgcgacaatgccagtttggttgttgttctttgcacttggaatatcgtcagataaggaagcctttgatgtgatagatatgcaagattgcgatgcttctgttatcaacacgatatctgcaactatcaaagaatctgatgagctgtgtggaggctttcgtaaatcagataaagctcgtcaatatgttgatgagttggtaaaaagttcgaaatttcctccagtggagtcctttgatgactatatcgctaagtttctgtttcctggtattagtggaaataggaacaaagcacttttcttagggtacatggtgaaatgtctgctaatggcttttactgggaagcgtaaatgtgataataaggatgatttcaggaacaagaggctggacctacctggtgaattgcttggaagggaacttagggcacatcttaggcaagcagagagacgcatggttaaggccattcaaagagatttaaacagtgaccgtgagttacaagatcttgaacgttatatagatgcatcgattgttactaatggtctaaatcgtgccttttccactggttcttggtgccatccctacaaaagagctgaacggtgctcaggaattgttgcaactctaaggagaactaatcctcttcaaatgatgtctgacttgaggaaaacccggcagcgggttgcttatgctgggaaagctggtgatgcaagatatccgaatccatcctattggggaaaactgtgttttatgtccactccggatggtgaaaactgtggacttgtaaaaaatctagctgttacttcaattgttagctcaaaggtggtgcagcccttgattgagagcttcatttcttgtggaatgaataagctgaatgacattcctactgagcacattcaaagaatggacaagatctttttgaatggcaattggctaggatcttgttctgattcagcttcatttgtatttcgattaaggtgcatgagacgcagcagtctgattgatcctcaggttgaaattaaaagggacaagcattacaaggaggttcgtctgttttcagatgcagggcgaatcctcagaccacttcttgtggttgagaaccttaataaaatcagaaagcccaagggacgctcattctctttccaggaattaatgcaacaagaaataattgaattcattggtgtcgaagaggaggaagatatacaatgtgcctggggaatcagacatttgtttgagagtgaaggagctatatctagttatactcactgtgagctggatccttcctttattctgggattaagctgtggtatcattccttttgcaaaccataattttgctcggagggtattgtaccaatctgaaaaacactcgcaacaagctattgggtactcaacctcaaatccacgcatcagagttgacactctttctcatcaactatattatcctcagaggcctcttttcaaaacagttatagccgactgtcttggcaggtcagactgcactacttttggaagaaaagatgacttcacgagaccagaatatttcaatggacaaaatgcaattgtagcagtcaatgttcatcaggggtttaatcaagaggattccctggttatgaatagagcttctcttgaacgaggtatgtttaggactgaacacctcaggagctataaggcagatgtagaaaacaaggatggaaccaagcgactgaaattgaaggaaaagatagactttgggaaaacggaaagcaaaagaggacgtgttgacaatcttgatgatgatggcttaccctacattggtgcaagtcttcagaccaatgacattgttattggaaaagtctcagaatctggagaagaccacagtattaagttgaagcatacagaaaagggaatggttcagaaagtattgctttcagcaaatgatgaagggaagaattttgctgtggttactctaagacaggtgaggacaccttgccttggagataagttttccagcatgcatggccaaaaaggtgttgttggttttctagaatctcaagagaacttcccatttactcacgacggtatagtcccagacatcgtgataaatccacatgccttcccaacacgtcaaactcccggacagctgcttgaagctgctcttgggaagggaatagcctgcaaaggtacaatgagatacgcaacaccattcaccacagcatcagttgatgttattgcagaacagttgcacaaggctggatattcacgatggggagccgagaacgttctaaatggtcgaactggtgaaagaatgaaatccttggttttcatgggccctaccttttaccagaggctgattcatatgtccgaagataaggtgaaataccgtaatactgggccggtccaccccctcacgaggcagcctgtcgctgacaggaaaaggttcggtggagtcaagtttggggaaatggagcgtgattgcctcctcgcccatgggtcagctgccaacctgcatgagcgcctcttcatgctgagtgacttctcccagatgcacatctgccagacgtgcgagcgcgtggctaatgttgtcatgaggtctgtccccggaggcaaaaagatccgtggcccctactgtgggttctgcaagtcttcggagaacattgtgagaatcaacgtgccctacggcgcgaagctgctctaccaggaactattcagcatggggatctgcctcaagtttgagaccgaagtctgctagagcttgtaggcttgcttgtatccagacatccagttattatgtacatagagttagcctatgacgatctcatgctggcagctatgtgaaatcgtgtgccgatgtgtgataccggcggcacagcaaggatgggcgagttcgatggagtgaaacggcagtgtcaggtgggtgtctcaaagctggtggggcaatctacctctgcttagagaataaactctgttgaaactagaaaccttgcagcgttttatatgctgttttcgtcctgcccatctgataaactatgttcatgtgaacgaacactcgtttcctgtttcctgcttggattgcgctggtgcatgcctttttgtttttaagattgtggttttgtggagcacctgtattgctttgtggggatcagggaatgttgctacttggatctcaccgcttcccagttg

SEQ ID NO: 217431 - DNA, 4607 bp, Zea Mays
cttttctcgttgccgttggttgggccgtctatccaaacctgtgctgtgataaaccgtgatctcgcacagaagatcacatgatgcccttgccctccttgatccccgctaaggtactcaccatgaaaagccgtatctgtctcggcggacaggacccgctcgtcactgagaccgggacccgcagagcattgcttgaccgctggcccgcctccgcctgttagaaccaccgggcatcgtcgacgccgccggttgcccattaaacccccgtccccgtctcgaggtgatcatcccgcagcgctacaacgcccgaactctccgtccctcactctcagtctccgacacattctacgaaccgcctcccactaccgctcattgccgccggtcgccggagacgcgctgcaccgccagctgtccgccttcgcccgccgaccccggcctgccgcagcttccccttcacccgccagggtataagctgccagtgcttgtgtcatggaagagctacagaaagacagtgcgctaccatcaaatagctctgattctgagccagaagctatggaattggatgacaatggagcaggaaaatcccatagcatcgagggaaacagggattctcctatagacactgatgaaggccagccatctatggatgttgatattaagggaaaatcatctctcaacgatgatgttaatggaaagtcttcttctgagccattttccaatcctccaatcaacatgagtgtggaaagcctagagaagttttgcaaagaagcgtcgaggtccttctttgatgaagttggtctgattagccatcagataaattcctacaatgagtttgtctcgcatgggctccaggagctttttgattcgctgggtgaagtgattgttgaacctggctatgatccttcaaagaaaggatcaggtagctggaagcatgcaatcatcaagtttgggagagtgaagcttgaaaagcctgtgttttggactggcaaagatgaggtttctgttgattttaaaccttggcatgctcgtctccagaatatgacatatgcttcaagacttagagtagaagtgactattcaggtttattctttggagaaaagtgacaaatctaaaacagggaatgatggttttgttcaaaaaaggaacttcatgaatgaaactcactggatatttattggcctccttccagttatggtgaaatcaaacttatgtttgttgcatagtcttaaggaaagtgagtgcctgtttgatgcaggtggatactttttggtcaagggaatggagaaggtatttattgctcaagagctaagatgtctaaggaggctttggattagtgaccgtccttgctggactatctcttttatgtctgaaatgaagcgtagacgtatatatattaaactagttgaatctacaaggagtgaagatttcagtgggagcaaaatcatttccatttcctttttgtatgcgacaatgccagtttggttgttgttctttgcacttggaatatcgtcagataaggaagcctttgatgtgatagatatgcaagattgcgatgcttctgttatcaacacgatatctgcaactatcaaagaatctgatgagctgtgtggaggctttcgtaaatcagataaagctcgtcaatatgttgatgagttggtaaaaagttcgaaatttcctccagtggagtcctttgatgactatatcgctaagtttctgtttcctggtattagtggaaataggaacaaagcacttttcttagggtacatggtgaaatgtctgctaatggcttttactgggaagcgtaaatgtgataataaggatgatttcaggaacaagaggctggacctacctggtgaattgcttggaagggaacttagggcacatcttaggcaagcagagagacgcatggttaaggccattcaaagagatttaaacagtgaccgtgagttacaagatcttgaacgttatatagatgcatcgattgttactaatggtctaaatcgtgccttttccactggttcttggtgccatccctacaaaagagctgaacggtgctcaggaattgttgcaactctaaggagaactaatcctcttcaaatgatgtctgacttgaggaaaacccggcagcgggttgcttatgctgggaaagctggtgatgcaagatatccgaatccatcctattggggaaaactgtgttttatgtccactccggatggtgaaaactgtggacttgtaaaaaatctagctgttacttcaattgttagctcaaaggtggtgcagcccttgattgagagcttcatttcttgtggaatgaataagctgaatgacattcctactgagcacattcaaagaatggacaagatctttttgaatggcaattggctaggatcttgttctgattcagcttcatttgtatttcgattaaggtgcatgagacgcagcagtctgattgatcctcaggttgaaattaaaagggacaagcattacaaggaggttcgtctgttttcagatgcagggcgaatcctcagaccacttcttgtggttgagaaccttaataaaatcagaaagcccaagggacgctcattctctttccaggaattaatgcaacaagaaataattgaattcattggtgtcgaagaggaggaagatatacaatgtgcctggggaatcagacatttgtttgagagtgaaggagctatatctagttatactcactgtgagctggatccttcctttattctgggattaagctgtggtatcattccttttgcaaaccataattttgctcggagggtattgtaccaatctgaaaaacactcgcaacaagctattgggtactcaacctcaaatccacgcatcagagttgacactctttctcatcaactatattatcctcagaggcctcttttcaaaacagttatagccgactgtcttggcaggtcagactgcactacttttggaagaaaagatgacttcacgagaccagaatatttcaatggacaaaatgcaattgtagcagtcaatgttcatcaggggtttaatcaagaggattccctggttatgaatagagcttctcttgaacgaggtatgtttaggactgaacacctcaggagctataaggcagatgtagaaaacaaggatggaaccaagcgactgaaattgaaggaaaagatagactttgggaaaacggaaagcaaaagaggacgtgttgacaatcttgatgatgatggcttaccctacattggtgcaagtcttcagaccaatgacattgttattggaaaagtctcagaatctggagaagaccacagtattaagttgaagcatacagaaaagggaatggttcagaaagtattgctttcagcaaatgatgaagggaagaattttgctgtggttactctaagacaggtgaggacaccttgccttggagataagttttccagcatgcatggccaaaaaggtgttgttggttttctagaatctcaagagaacttcccatttactcacgacggtatagtcccagacatcgtgataaatccacatgccttcccaacacgtcaaactcccggacagctgcttgaagctgctcttgggaagggaatagcctgcaaaggtacaatgagatacgcaacaccattcaccacagcatcagttgatgttattgcagaacagttgcacaaggctggatattcacgatggggagccgagaacgttctaaatggtcgaactggtgaaagaatgaaatccttggttttcatgggccctaccttttaccagaggctgattcatatgtccgaagataaggtgaaataccgtaatactgggccggtccaccccctcacgaggcagcctgtcgctgacaggaaaaggttcggtggagtcaagtttggggaaatggagcgtgattgcctcctcgcccatgggtcagctgccaacctgcatgagcgcctcttcatgctgagtgacttctcccagatgcacatctgccagacgtgcgagcgcgtggctaatgttgtcatgaggtctgtccccggaggcaaaaagatccgtggcccctactgtgggttctgcaagtcttcggagaacattgtgagaatcaacgtgccctacggcgcgaagctgctctaccaggaactattcagcatggggatctgcctcaagtttgagaccgaagtctgctagagcttgtaggcttgcttgtatccagacatccagttattatgtacatagagttagcctatgacgatctcatgctggcagctatgtgaaatcgtgtgccgatgtgtgataccggcggcacagcaaggatgggcgagttcgatggagtgaaacggcagtgtcaggtgggtgtctcaaagctggtggggcaatctacctctgcttagagaataaactctgttgaaactagaaaccttgcagcgttttatatgctgttttcgtcctgcccatctgataaactatgttcatgtgaacgaacactcgtttcctgtttcctgcttggattgcgctggtgcatgcctttttgtttttaagattgtggttttgtggagcacctgtattgctttgtggggatcagggaatgttgctacttggatctcaccgcttcccagttg

SEQ ID NO: 217432 - DNA, 1816 bp, Zea Mays
atggggaggcactctaattataagacgtcgtgtctcctccgatcaaaagcttctccagtctccacactcccacttcttcctcgccgcgctccatccaaagtcataacaacggaggagctctccaatccatacatgcgtgaagaccttcacatttctgtgcaacgagggaccggcggcaactggaagctggaattccgtccgcgcagacctcaccgtccctgcaacgagccgggcttcggcggcgccttggcgaggatggtgatgccgatctcgagcggcggcgaccaccacggcgcggagcccctgctcccggagaagcagcgcggcggcggggccggggcggacgatgccggcgacgacttccacggcgcgtccttctccggcgcggtgttcaacctctccaccaccatcgtgggcgcgggcatcatggcgctcccggccaccatgaaggtgctcggcctcgtcccgggcctcgccctgatcgcgctctccgcgctgctcacggacgcctccatcgagctcctcgtcaggttcaaccgcgccgcgggcgtcaggacctacgggaagaccatgggcgacgccttcggggtgctcggcagggggttgctccagctgtgcgtcgtcgtcaacaacgtcggcatcttggtcgtctacatgatcatcattggtgacgtgctatctggaacctcctccagcggcgtgcaccatcacggcgtgcttgaaggatggttcggcgaaaaccggtggaacggacgcttcgcgatcctcgccatcgcaacgctcggtgtgttcactccgctggcatgtgtcaagcgcgtcgactcactgcgatacacgtccgctctatcggtggctctggccgttgttttcgtcgtgatcactgccgggatcgctatgttcaagctggcgagagggcagattctaatgcctcggctattcgccgacgtccatgactggccgtccatctggaggctcttcacagcggctccagttcttcttcttcggcttcctcctcttcggcgactcgacgctggacgacgtcctcgccaacttcgacaccgacctcggcatcccttacagctcgatcttcaacgacgccgtcagggtcagctacgtgctccacctcatgctcgtcttccccatcgtgttccaggcgctgcggctcaacatggacgggctcctcttcccctcggcgcggccgctgccctgtgacaaccgaaggttcggtggtctgacggcggcgctccttgtggtgatattcctcgccgccaatttcatcccaaatatctgggacgccttccagttcaccggagccacggcttccgtctgcgtcgcctacattttccctgctgcgatcacactaagggatcctcatggcatagcgaagaagagagacaaggtcctggcagtgttcatgattgttcttgctgtggtggcaaacaccgtggcagtgtacagcgacgcttgctcgtgatcttaaatggcagccatggctacgtcaagcgcacgcgtatctaaaaattagtcagggctcaaagtgccgtaactatgtatatagggcgtctgatccaccatagtcctaaggcgggatccataattgatgtgaacaaaagtgattaacataatgaatattcttagatccgggtttgttaatggttctgaattttaaagccctttctttgattaagtaaggaagaactacttagaacccttggaagtctatgaggaagctggcctttagttgatcctagaattggattaattttggttgtaacaaggagtaacattgttgagatggtcccttgactgccatgat

SEQ ID NO: 217433 - DNA, 3467 bp, Zea Mays
gttccgtgtcgtgtcggaccccaccacaaccctcttctccgtttcgtttcccgaccaggcctcgccggctcaccgcccccgccgcgcccgccatggacttctcggaacaggacgtcgacgtcttcggcgaggactacgacgtccacgacggcggcgccgaggccgaggccgaggccgacggcggcggggactcgtcgggctcctcctccccatcatcgtcctcgtcgtcctctgccgccgcgtcctcctcatcctcaagtggcggctcaagcctcagcagcagcggcggcgctgccggtgagggcgaggatggcgccgatgcgggggacggggaggaatacgattcgtccaacctcatagccacaaggagcgccggcgccgccggctatctggacgatgagaggagggaatatgagaaccaggaggtagaggaggagagagatttgttcggctcagataacgaagagtacgtcagaactccggcgcgcagccactacctagtcccagtgcttcctccaattcggaacactaataatcattctcgaggaggctttggaggacgaggtggtagaggcccaccacttcttccaaggccaggaggccatccagggcgacataactttggttacgggagattcgggaatgggcgtcatgttgaaggtttagtttcagatatgaagcttaataagagcgaagaaacattgtctagaaaagctgttacttttcaggagccttgtgagattgcatgcttaagccgtgttgagggtggagaggtgtattttgatgatcgcagcttgaggctcttcaaacgtgaaatctgtgaataccgcggtgcagatctcaataaaggattcgagtcatatatagagaagagagatttgggttctgaaggatttggcgatctactcgcatgcatacgaaattccaacatacttcttcagaatactatacattttgtgacataccgcaacaatcttaataagatattggccactgcttacctaagagaaccatggaagatgggcgttcataaaagaaggggtgttgtatatcttgatgttcataagctccctgaaagaccaaaaagtgaagttgagcgtaagagatgttattggggctattcttttgaaaaccttgccactgagaactcattcagcgacgatggaaggggtatcgatgcaaatgtagagttttgttctgtaataaagacaaaattgggtgcccatcggattgtcatgggtgctgagatggactgctgtgatgcaactgatgatggcaggaggttctatgtggagctgaaaacaagcagagagctggaataccatacagtggaagcatatgaaaaagaaaagctacttagattttggattcaatcgtttcttgccggtgttccttatgttgttgtgggattcaggaatgatgctggcatacttgtacggacggaaagactaagaaccaaagatattacacaaaaggtgaaggcaaagaactactggcagggtggcgtttgccttgcctttgccgatgaagtcttatgttggttgtatgggactgtcaaagagaatgaagactatgttcttcaatttgtacatccatttaaccgcctcgaacttctgcgtgcccagtccccctgtccggaagccataacgttgcatgtgcagcagctctcaggtgcagcggactagattctagcagtgacctcggcggggactacttgccttggagaaaaacccaattctagcagcagcactgaacaatggttgatctggcaacttactcaaccccaattaccaagcagatgtgctaatgcatcaaagaactgatgagatcgatcactggtctagctacatccatggtttacactcttgaatggccaaagagattttgaatccatcaaacatgtatttccattgtaacattattacataataaacaatacagacagagctactagtgctgtgctactgtaacattattgcatcaaatcctgtaaacttcagcaagggatggatgttcttaaacatccgaattgtcagcctttataagtcataatatgtaagcagaactttttcgtactctagcgttttgaaataataaatttcattaatgacgattagaatggtgagtggctgtcgcctatggctgcagatggttttatgctcacaaggcatcgtggattgcaatgtgaacctgctgtaatacgagctttaaaggtcaccttttgtcattgtttgtgtaggcgctgtggaattgttcatgatgagtcccggtcccgctgcctgtcccaagaacatctcgcttctcgcacgggcacagcaggtcaacgctctacacgcctcgacgccttgtccggcctgcaaagctgcagccccgctgcccagccgcctgcctcaaccctctccctctatcttcgtgagccagcggggaaggaaggaagcaacacccagggtaggatgggggtaggcgagtgcaagagcaacgactacggcgccgccgcatactgggacgcccgctactcctccggctcgccagcttccgccgccgccggctgtgggttcttcgactggtaccagacgtacccggcgctgcggccgctcctccgcgcccgcgtcccgacctcctcccgcgtcctgatgctcggctgcggcaactcccttttgtcggaggatatggtgaaggatggttacgaggacattgtaaacatagacatttcatctgtggtcatcgagcaaatgagagagaaacacaaggagattacacagctaacatatatgcagatggatattagagacatgggatttttcggtgatgagtcatttgattgtgtccttgataaagggaccctggatgctatgatgtgtgctgatgatgctcctcatggtgctttcaaaatgctagcagaagtggcaaggcttttgatgcctcatgggatctacttattgataacatatggtgctccaaaggaacgtgtcccacttctggaccagtccggatgcagctggagtattgcactctacatcatgcccacagctggataccaactgagaatgagtaaaggtgctcaacatcttataatggaggaggttacactcacagagggtggccaactgccacctgactatgttctcaaagatccagattcacatttcatttatgtttgtgagaagttggaagagaaagggactaattgcagagatactgatccaaaggaatcaacaaatgcaaattaactcactaccaacttcagatttcattttgattattgctggggaagtttgttgttgcaaaggcatagtcggagctcgtcttttgaatcatgtgttacccttcgtatgaaaaacctggctggcttcgccccgactgggtgtttggtttaaagaacgtgttagtatcttttcacttctcatttttttgtttggtttcacttctcactttttagtgcagagataacacaaaattaggaaaat

SEQ ID NO: 217434 - DNA, 1713 bp, Zea Mays
gatggcaggaggttctatgtggagctgaaaacaagcagagagctggaataccatacagtggaagcatatgaaaaagaaaagctacttagattttggattcaatcgtttcttgccggtgttccttatgttgttgtgggattcaggaatgatgctggcatacttgtacggacggaaagactaagaaccaaagatattacacaaaaggtgaaggcaaagaactactggcagggtggcgtttgccttgcctttgccgatgaagtcttatgttggttgtatgggactgtcaaagagaatgaagactatgttcttcaatttgtacatccatttaaccgcctcgaacttctgcgtgcccagtccccctgtccggaagccataacgttgcatgtgcagcagctctcagatggttttatgctcacaaggcatcgtggattgcaatgtgaacctgctgtaatacgagctttaaaggtcaccttttgtcattgtttgtgtaggcgctgtggaattgttcatgatgagtcccggtcccgctgcctgtcccaagaacatctcgcttctcgcacgggcacagcaggtcaacgctctacacgcctcgacgccttgtccggcctgcaaagctgcagccccgctgcccagccgcctgcctcaaccctctccctctatcttcgtgagccagcggggaaggaaggaagcaacacccagggtaggatgggggtaggcgagtgcaagagcaacgactacggcgccgccgcatactgggacgcccgctactcctccggctcgccagcttccgccgccgccggctgtgggttcttcgactggtaccagacgtacccggcgctgcggccgctcctccgcgcccgcgtcccgacctcctcccgcgtcctgatgctcggctgcggcaactcccttttgtcggaggatatggtgaaggatggttacgaggacattgtaaacatagacatttcatctgtggtcatcgagcaaatgagagagaaacacaaggagattacacagctaacatatatgcagatggatattagagacatgggatttttcggtgatgagtcatttgattgtgtccttgataaagggaccctggatgctatgatgtgtgctgatgatgctcctcatggtgctttcaaaatgctagcagaagtggcaaggcttttgatgcctcatgggatctacttattgataacatatggtgctccaaaggaacgtgtcccacttctggaccagtccggatgcagctggagtattgcactctacatcatgcctggataccaactgagaatgagtaaaggtgctcaacatcttataatggaggaggttacactcacagagggtggccaactgccacctgactatgttctcaaagatccagattcacatttcatttatgtttgtgagaagttggaagagaaagggactaattgcagagatactgatccaaaggaatcaacaaatgcaaattaactcactaccaacttcagatttcattttgattattgctggggaagtttgttgttgcaaaggcatagtcggagctcgtcttttgaatcatgtgttacccttcgtatgaaaaacctggctggcttcgccccgactgggtgtttggtttaaagaacgtgttagtatcttttcacttctcatttttttgtttggtttcacttctcactttttagtgcagagataacacaaaattaggaaaat

SEQ ID NO: 217435 - DNA, 619 bp, Zea Mays
cttgataaagtgtgctgatgatgctcctcatggtgctttcaaaatgctagcagaagtggcaaggcttttgatgcctcatgggatctacttattgataacatatggtgctccaaaggaacgtgtcccacttctggaccagtccggatgcagctggagtattgcactctacatcatgcccacagctggataccaactgagaatgagtaaaggtgctcaacatcttataatggaggaggttacactcacagagggtggccaactgccacctgactatgttctcaaagatccagattcacatttcatttatgtttgtgagaagttggaagagaaagggactaattgcagagatactgatccaaaggaatcaacaaatgcaaattaactcactaccaacttcagatttcattttgattattgctggggaagtttgttgttgcaaaggcatagtcggagctcgtcttttgaatcatgtgttacccttcgtatgaaaaacctggctggcttcgccccgactgggtgtttggtttaaagaacgtgttagtatcttttcacttctcatttttttgtttggtttcacttctcactttttagtgcagagataacacaaaattaggaaaat

SEQ ID NO: 217436 - DNA, 3170 bp, Zea Mays
caggcttccgagttccgactactgggcgccacacgcggcgcaagcgcaggaggcacgccatctgttcttgctgtcgctctccccaaccccaagcataaacccctgtgtcctcgtacaaaccgaaaccgaaaccaaactccgccacgagtggggcgagcggatacacgagctcgtgaaagcttgatctgctctccttgttttcgatctttcgcagtcgccgatcccccctcccgctcgaggttgctgtttttctttttgagatttcccccggatcttttcggtgctgttttgttgttgtttcgtttcaggatcgcgtagtctcggcgatttccccgagagtggttcttggaacttcagggttggaggaatacggtgtgcgctagacagcagtctccgcggttgttgtacacttacacaatgttgacatatcctatattgaacgaccgatcaattgatcagtggacggttactgagttgaaggatgagcttgagcgaaggtatctgcctgtcagtggttcgaaggatgagcttttgaagagactctttgaggccatgcaggatgagatacttgatggtgagggaaaaacaactgttgtaacttcccctcctgaggaattgaaaggtggtgaaactcctggttccattgatgtatctgttaaccaggcttcaattgagcaacatgttcataaaggtgcttccgaggttgcgaaacagggggtaggtcttgttatctctgttacagaagcttatgatgaaagtacatttgctacttcagaagttactcaggaggctgtggttggtactgcagaagttagtcagagaagtttggatgctgttgcagaagttgagtcttgtctagttgatgcagctgcaactgatgaacccgatggtaatggtcaaggttcagcttcaagtggtgatactatagtgaaggaaggaagtccgcgctctgaaggtcatggcaatactattgagaagaccccagaagatggcaccaataagaaaatagctgtcgatgatgaaccttctgaccttactggtggtgacatcaagttgggcctcgatgtgcacagcaagattctaaagctggaagatgaacccgcacctcctcatgatatgttgcataatcatgaggattctgatgttgttgcagttgctgagccagaagatgacacaagcaaaaaaatgataagtgatgatgtaccgactggtcttatgcataccaatgttgagttaggtgccaaggtagactgcaaaattgaacaggaagaagtatcaacattgtctgatgctgctgcattgcattcttatcctaaggaacatattgtggctgtggcaaaaggccttgcgctcccaaggaggatgctgatgtcaggctacacaagtaatatagacttggacagaaaagaggagagtcctgacataaattcttgtgagaaactgaacttaaataggagttcaggtgatgaatcaatggatgaggatgtgatggaaaggaagcatgccgattcctatatcaaacctgaagatcttagaggaaagacaaaggttacttcggagcatgtgtttaaagatgtttctctgcttgatactcgtgctgagggttcccctgcacactcaaaggaagttgtcactgaagagaagctatcaactccaactgaaaagaggaaacttgaagatcaagaagtcattgaaaataatgagccaatcaaacgccagtacctatggaacgaggatgctgtcaatatttctgatcaacaagcatccaaaataactagtactggtactcagaaggaagttatttgtcctgctccagaacgttcttttggcaggcctaatacagtagcaagaagaaattctccaaaggagcggattgtaccacctgccaaaacatccgcaacaacttctttaagaattgatcggtttgtgcgcccatttactctgaaagctgtgaaagaacttcttggtaaaactggatccatctgcagtttttggatggatgaaatcaagactcactgctatgtcacatactcttcagtggaggaagctgtggccacgaggaatgctgtctacgacctccagtggccctcaaacaacaacaattatctgatcgctgaatttgtcgatccagaagaggtttattgcccactccagcacggtttgccaaggtgcctcccacctctgaccctggaccagcaagggagagccttcctccccctccactgagcctggaacctgcccggacactggatgagctcttcaagaagacacagacgtacccaaggatttactacatgccactgtcagaagaggaggtatctgctaaacgtgcagctcacgacaaagctgttttcagatgcaaccatacttgtcacggcacagcgatcgacaggctctcttctccgcagctgactccaccagaccagcagctgcagctctatgaagaactactgcaccgtacttgtccctacatttagctggtattgtgttgaaaggctttagtagtttgttgtgagggaagacctgattgggtacgtggtattttggagttaaggataccgtggcttctccaaatcacgatggcgtgtaattttggcattccatagagtaccacggtttctcaaaactaagatgatgacaaaacatcagggatttgggtccaagtgatggtgtaaatgcagaaaattgacagcattttggcttctccaaatcacgatggctcgttgagtacttttcatgctctatcacactttgttaatagcatcgcacttattgtaggacaaacactgcaaagcaaagtgtattttgtgtccatgttttgagtggcttagtgtccaactcactagtgatcgatagtcttcatgttgtatagcgagtaagcgttcctattgcagtgaattgagtaatttgtttgagtggcactagatggagtgttgcaagattgtgatgcttgttactcttagggctgatttggtgaccagagatcacgggagaattgggaggaaattagtttatttcttccctcaatccccttccatccttccgggattcccttgtcaccaaatcacccctgattgtcacctcctaacaacttggtggcttgcattctccattgtgaagcccacgtgaaggttgtgcgtgacttcataaattcgacatctacaacattg

SEQ ID NO: 217437 - DNA, 3222 bp, Zea Mays
caggcttccgagttccgactactgggcgccacacgcggcgcaagcgcaggaggcacgccatctgttcttgctgtcgctctccccaaccccaagcataaacccctgtgtcctcgtacaaaccgaaaccgaaaccaaactccgccacgagtggggcgagcggatacacgagctcgtgaaagcttgatctgctctccttgttttcgatctttcgcagtcgccgatcccccctcccgctcgaggttgctgtttttctttttgagatttcccccggatcttttcggtgctgttttgttgttgtttcgtttcaggatcgcgtagtctcggcgatttccccgagagtggttcttggaacttcagggttggaggaatacggtgtgcgctagacagcagtctccgcggttgttgtacacttacacaatgttgacatatcctatattgaacgaccgatcaattgatcagtggacggttactgagttgaaggatgagcttgagcgaaggtatctgcctgtcagtggttcgaaggatgagcttttgaagagactctttgaggccatgcaggatgagatacttgatggtgagggaaaaacaactgttgtaacttcccctcctgaggaattgaaaggtggtgaaactcctggttccattgatgtatctgttaaccaggcttcaattgagcaacatgttcataaaggtgcttccgaggttgcgaaacagggggtaggtcttgttatctctgttacagaagcttatgatgaaagtacatttgctacttcagaagttactcaggaggctgtggttggtactgcagaagttagtcagagaagtttggatgctgttgcagaagttgagtcttgtctagttgatgcagctgcaactgatgaacccgatggtaatggtcaaggttcagcttcaagtggtgatactatagtgaaggaaggaagtccgcgctctgaaggtcatggcaatactattgagaagaccccagaagatggcaccaataagaaaatagctgtcgatgatgaaccttctgaccttactggtggtgacatcaagttgggcctcgatgtgcacagcaagattctaaagctggaagatgaacccgcacctcctcatgatatgttgcataatcatgaggattctgatgttgttgcagttgctgagccagaagatgacacaagcaaaaaaatgataagtgatgatgtaccgactggtcttatgcataccaatgttgagttaggtgccaaggtagactgcaaaattgaacaggaagaagtatcaacattgtctgatgctgctgcattgcattcttatcctaaggaacatattgtggctgtggcaaaaggccttgcgctcccaaggaggatgctgatgtcaggctacacaagtaatatagacttggacagaaaagaggagagtcctgacataaattcttgtgagaaactgaacttaaataggagttcaggtgatgaatcaatggatgaggatgtgatggaaaggaagcatgccgattcctatatcaaacctgaagatcttagaggaaagacaaaggttacttcggagcatgtgtttaaagatgtttctctgcttgatactcgtgctgagggttcccctgcacactcaaaggaagttgtcactgaagagaagctatcaactccaactgaaaagaggaaacttgaagatcaagaagtcattgaaaataatgagccaatcaaacgccagtacctatggaacgaggatgctgtcaatatttctgatcaacaagcatccaaaataactagtactggtactcagaaggaagttatttgtcctgctccagaacgttcttttggcaggcctaatacagtagcaagaagaaattctccaaaggagcggattgtaccacctgccaaaacatccgcaacaacttctttaagaattgatcggtttgtgcgcccatttactctgaaagctgtgaaagaacttcttggtaaaactggatccatctgcagtttttggatggatgaaatcaagactcactgctatgtcacatactcttcagtggaggaagctgtggccacgaggaatgctgtctacgacctccagtggccctcaaacaacaacaattatctgatcgctgaatttgtcgatccagaagagcaaccttccaacaggcaatggctaaccaaactctagtacctccccatgttcctgctacttcgagaggtttattgcccactccagcacggtttgccaaggtgcctcccacctctgaccctggaccagcaagggagagccttcctccccctccactgagcctggaacctgcccggacactggatgagctcttcaagaagacacagacgtacccaaggatttactacatgccactgtcagaagaggaggtatctgctaaacgtgcagctcacgacaaaggtagaaggggatagtgggctttagtttgtcgctcaagctggtattttgctgactccaccagaccagcagctgcagctctatgaagaactactgcaccgtacttgtccctacatttagctggtattgtgttgaaaggctttagtagtttgttgtgagggaagacctgattgggtacgtggtattttggagttaaggataccgtggcttctccaaatcacgatggcgtgtaattttggcattccatagagtaccacggtttctcaaaactaagatgatgacaaaacatcagggatttgggtccaagtgatggtgtaaatgcagaaaattgacagcattttggcttctccaaatcacgatggctcgttgagtacttttcatgctctatcacactttgttaatagcatcgcacttattgtaggacaaacactgcaaagcaaagtgtattttgtgtccatgttttgagtggcttagtgtccaactcactagtgatcgatagtcttcatgttgtatagcgagtaagcgttcctattgcagtgaattgagtaatttgtttgagtggcactagatggagtgttgcaagattgtgatgcttgttactcttagggctgatttggtgaccagagatcacgggagaattgggaggaaattagtttatttcttccctcaatccccttccatccttccgggattcccttgtcaccaaatcacccctgattgtcacctcctaacaacttggtggcttgcattctccattgtgaagcccacgtgaaggttgtgcgtgacttcataaattcgacatctacaacattg

SEQ ID NO: 217438 - DNA, 3202 bp, Zea Mays
cgagttccgactactgggcgccacacgcggcgcaagcgcaggaggcacgccatctgttcttgctgtcgctctccccaaccccaagcataaacccctgtgtcctcgtacaaaccgaaaccgaaaccaaactccgccacgagtggggcgagcggatacacgagctcgtgaaagcttgatctgctctccttgttttcgatctttcgcagtcgccgatcccccctcccgctcgaggttcttggaacttcagggttggaggaatacggtgtgcgctagacagcagtctccgcggttgttgtacacttacacaatgttgacatatcctatattgaacgaccgatcaattgatcagtggacggttactgagttgaaggatgagcttgagcgaaggtatctgcctgtcagtggttcgaaggatgagcttttgaagagactctttgaggccatgcaggatgagatacttgatggtgagggaaaaacaactgttgtaacttcccctcctgaggaattgaaaggtggtgaaactcctggttccattgatgtatctgttaaccaggcttcaattgagcaacatgttcataaaggtgcttccgaggttgcgaaacagggggtaggtcttgttatctctgttacagaagcttatgatgaaagtacatttgctacttcagaagttactcaggaggctgtggttggtactgcagaagttagtcagagaagtttggatgctgttgcagaagttgagtcttgtctagttgatgcagctgcaactgatgaacccgatggtaatggtcaaggttcagcttcaagtggtgatactatagtgaaggaaggaagtccgcgctctgaaggtcatggcaatactattgagaagaccccagaagatggcaccaataagaaaatagctgtcgatgatgaaccttctgaccttactggtggtgacatcaagttgggcctcgatgtgcacagcaagattctaaagctggaagatgaacccgcacctcctcatgatatgttgcataatcatgaggattctgatgttgttgcagttgctgagccagaagatgacacaagcaaaaaaatgataagtgatgatgtaccgactggtcttatgcataccaatgttgagttaggtgccaaggtagactgcaaaattgaacaggaagaagtatcaacattgtctgatgctgctgcattgcattcttatcctaaggaacatattgtggctgtggcaaaaggccttgcgctcccaaggaggatgctgatgtcaggctacacaagtaatatagacttggacagaaaagaggagagtcctgacataaattcttgtgagaaactgaacttaaataggagttcaggtgatgaatcaatggatgaggatgtgatggaaaggaagcatgccgattcctatatcaaacctgaagatcttagaggaaagacaaaggttacttcggagcatgtgtttaaagatgtttctctgcttgatactcgtgctgagggttcccctgcacactcaaaggaagttgtcactgaagagaagctatcaactccaactgaaaagaggaaacttgaagatcaagaagtcattgaaaataatgagccaatcaaacgccagtacctatggaacgaggatgctgtcaatatttctgatcaacaagcatccaaaataactagtactggtactcagaaggaagttatttgtcctgctccagaacgttcttttggcaggcctaatacagtagcaagaagaaattctccaaaggagcggattgtaccacctgccaaaacatccgcaacaacttctttaagaattgatcggtttgtgcgcccatttactctgaaagctgtgaaagaacttcttggtaaaactggatccatctgcagtttttggatggatgaaatcaagactcactgctatgtcacatactcttcagtggaggaagctgtggccacgaggaatgctgtctacgacctccagtggccctcaaacaacaacaattatctgatcgctgaatttgtcgatccagaagaggtaaagctcaaacttgaaactccaccatctcaaattcctcctatcagtctgagcacagctacagcacagcagacagcaaccttccaacaggcaatggctaaccaaactctagtacctccccatgttcctgctacttcgagaggtttattgcccactccagcacggtttgccaaggtgcctcccacctctgaccctggaccagcaagggagagccttcctccccctccactgagcctggaacctgcccggacactggatgagctcttcaagaagacacagacgtacccaaggatttactacatgccactgtcagaagaggaggtatctgctaaacgtgcagctcacgacaaagctgttttcagatgcaaccatacttgtcacggcacagcgatcgacaggctctcttctccgcagctgactccaccagaccagcagctgcagctctatgaagaactactgcaccgtacttgtccctacatttagctggtattgtgttgaaaggctttagtagtttgttgtgagggaagacctgattgggtacgtggtattttggagttaaggataccgtggcttctccaaatcacgatggcgtgtaattttggcattccatagagtaccacggtttctcaaaactaagatgatgacaaaacatcagggatttgggtccaagtgatggtgtaaatgcagaaaattgacagcattttggcttctccaaatcacgatggctcgttgagtacttttcatgctctatcacactttgttaatagcatcgcacttattgtaggacaaacactgcaaagcaaagtgtattttgtgtccatgttttgagtggcttagtgtccaactcactagtgatcgatagtcttcatgttgtatagcgagtaagcgttcctattgcagtgaattgagtaatttgtttgagtggcactagatggagtgttgcaagattgtgatgcttgttactcttagggctgatttggtgaccagagatcacgggagaattgggaggaaattagtttatttcttccctcaatccccttccatccttccgggattcccttgtcaccaaatcacccctgattgtcacctcctaacaacttggtggcttgcattctccattgtgaagcccacgtgaaggttgtgcgtgacttcataaattcgacatctacaacattg

SEQ ID NO: 217439 - DNA, 3068 bp, Zea Mays
cgcaagcgcaggaggcacgccatctgttcttgctgtcgctctccccaaccccaagcataaacccctgtgtcctcgtacaaaccgaaaccgaaaccaaactccgccacgagtggggcgagcggatacacgagctcgtgaaagcttgatctgctctccttgttttcgatctttcgcagtcgccgatcccccctcccgctcgagggttcttggaacttcagggttggaggaatacggtgtgcgctagacagcagtctccgcggttgttgtacacttacacaatgttgacatatcctatattgaacgaccgatcaattgatcagtggacggttactgagttgaaggatgagcttgagcgaaggtatctgcctgtcagtggttcgaaggatgagcttttgaagagactctttgaggccatgcaggatgagatacttgatggtgagggaaaaacaactgttgtaacttcccctcctgaggaattgaaaggtggtgaaactcctggttccattgatgtatctgttaaccaggcttcaattgagcaacatgttcataaaggtgcttccgaggttgcgaaacaggggaagttagtcagagaagtttggatgctgttgcagaagttgagtcttgtctagttgatgcagctgcaactgatgaacccgatggtaatggtcaaggttcagcttcaagtggtgatactatagtgaaggaaggaagtccgcgctctgaaggtcatggcaatactattgagaagaccccagaagatggcaccaataagaaaatagctgtcgatgatgaaccttctgaccttactggtggtgacatcaagttgggcctcgatgtgcacagcaagattctaaagctggaagatgaacccgcacctcctcatgatatgttgcataatcatgaggattctgatgttgttgcagttgctgagccagaagatgacacaagcaaaaaaatgataagtgatgatgtaccgactggtcttatgcataccaatgttgagttaggtgccaaggtagactgcaaaattgaacaggaagaagtatcaacattgtctgatgctgctgcattgcattcttatcctaaggaacatattgtggctgtggcaaaaggccttgcgctcccaaggaggatgctgatgtcaggctacacaagtaatatagacttggacagaaaagaggagagtcctgacataaattcttgtgagaaactgaacttaaataggagttcaggtgatgaatcaatggatgaggatgtgatggaaaggaagcatgccgattcctatatcaaacctgaagatcttagaggaaagacaaaggttacttcggagcatgtgtttaaagatgtttctctgcttgatactcgtgctgagggttcccctgcacactcaaaggaagttgtcactgaagagaagctatcaactccaactgaaaagaggaaacttgaagatcaagaagtcattgaaaataatgagccaatcaaacgccagtacctatggaacgaggatgctgtcaatatttctgatcaacaagcatccaaaataactagtactggtactcagaaggaagttatttgtcctgctccagaacgttcttttggcaggcctaatacagtagcaagaagaaattctccaaaggagcggattgtaccacctgccaaaacatccgcaacaacttctttaagaattgatcggtttgtgcgcccatttactctgaaagctgtgaaagaacttcttggtaaaactggatccatctgcagtttttggatggatgaaatcaagactcactgctatgtcacatactcttcagtggaggaagctgtggccacgaggaatgctgtctacgacctccagtggccctcaaacaacaacaattatctgatcgctgaatttgtcgatccagaagaggtaaagctcaaacttgaaactccaccatctcaaattcctcctatcagtctgagcacagctacagcacagcagacagcaaccttccaacaggcaatggctaaccaaactctagtacctccccatgttcctgctacttcgagaggtttattgcccactccagcacggtttgccaaggtgcctcccacctctgaccctggaccagcaagggagagccttcctccccctccactgagcctggaacctgcccggacactggatgagctcttcaagaagacacagacgtacccaaggatttactacatgccactgtcagaagaggaggtatctgctaaacgtgcagctcacgacaaaggtagaaggggatagtgggctttagtttgtcgctcaagctggtattttgctgactccaccagaccagcagctgcagctctatgaagaactactgcaccgtacttgtccctacatttagctggtattgtgttgaaaggctttagtagtttgttgtgagggaagacctgattgggtacgtggtattttggagttaaggataccgtggcttctccaaatcacgatggcgtgtaattttggcattccatagagtaccacggtttctcaaaactaagatgatgacaaaacatcagggatttgggtccaagtgatggtgtaaatgcagaaaattgacagcattttggcttctccaaatcacgatggctcgttgagtacttttcatgctctatcacactttgttaatagcatcgcacttattgtaggacaaacactgcaaagcaaagtgtattttgtgtccatgttttgagtggcttagtgtccaactcactagtgatcgatagtcttcatgttgtatagcgagtaagcgttcctattgcagtgaattgagtaatttgtttgagtggcactagatggagtgttgcaagattgtgatgcttgttactcttagggctgatttggtgaccagagatcacgggagaattgggaggaaattagtttatttcttccctcaatccccttccatccttccgggattcccttgtcaccaaatcacccctgattgtcacctcctaacaacttggtggcttgcattctccattgtgaagcccacgtgaaggttgtgcgtgacttcataaattcgacatctacaacattg

SEQ ID NO: 217440 - DNA, 3762 bp, Zea Mays
gtgacgacggcatgacacaggcaggcagcgtgctggttacacggcgtccgaatcagcagttacccgcgtctctagtctgtactttccaggccatcgtctccttccccttctttcaccggcctcgagtcacacgcgtgagatctgtgccttccgccgcggccacatgccacacaacgacgcccggcgagcttcaccgcgatagaggagctccaggaggacggccgctccgcgcacgccctccgcctccgcgctttcttctccgacccagcgcttttcccgcccgatctcgtcgcccgctcatcctctgcgccgcccggtgctgatccacagattttgctagaagagaaaatagcagcagaagaaaagttggcactcacggagtatgatctgcgcctagccaaagaagacctttcacagttgaagcttgaattacaaaaacaaaaagaatcatctcctgatgattcaaatgggctccttttgggtgcttctatacgcgaaggatatactaggcaacaagaaaattgggatgtgaaaatttcagcattaggccctctaaaggataatgaacgaaaagatcttaattgcgctgtaaaagaatacttgcttttggcagggtatcgacttgctgttatgacattcattgaggaggttcctgatcaagaccttgatgtttggccaaacagttcagcttgtgttcctgatgcccttcgtcgttattactatcagtatctttcttctactgcagaggctgcagaggaaaaaatatccatacttcaggaaaatgaaacattactcaaggacaatgaacgactcaatgctgaaaatgattccttgatgaagagcagggaaggagctaatagtcaggttgccgctttaaggaagtctttggaagctgcacacaaggatataaaagacaaggaaaaaatgattcaagacttgaggcagtcactggatgtccagaggaaggagctgaatgactgcagagctgaaatcacagccctgaagatgtacatcgaagggactcaatcaatcaaacaattgtttgttggaactagtgatggtgtaaagtcgcattcctttgctaattctgtgggagcatcatcattgaataatgaagatgaagattcaaaaggatctgaagccataacaaataagctagcatcagcagtaaatattactgatgatacgcagaaagatcgccaagttctagaaagtagcgctgaagagtaatctgcatggagcttccatgactggtaaaagccaggggagttcagatggcatatccatgtatttatctattgagaaactagagagcccaagtaaacaaaaatcttcagataagattgctttggagactataaagatagtttcagatgcacttccaaagattgttccttatgtgctcataaaccatcgtgaggaacttcttccattgatcatatgtgctatagaaaagcatccagatagcgatgtacgggattccttgactcatacattgtttaacctgataaaacggcctgatggagaacagagacgcatcataatggatgcttgtgtagaattagcaaagagcgttggtgagatgaggacagaaactgagttacttccacaatgttgggagcagataaaccaccaatatgaggagcgcagattgcttgttgctcagtcgtgcggtgaacttgccgtttatgtccgtccagagatacgagattccctcattttatccattgtgcaacaacttgtcgaagatgctgcaacagttgtaagggaagctgcaacacataacctggcattgcttcttcctatgtttccaaatctggacaaatattataaggttgaggagctaatgttccaattggtctgtgacccgtctggggcggttgtggaagttgcactcaaggaacttgttcctgctgtagtaagatggggagataaattggatcagatatcaagagtactattggctcatatcctggcatctgctcagcgatgtccacctatttcaggtgttgaagaaagctatacaaacttgcccctttgcatcagctgatccaacaagctctacaccagagaacttctcagcatcctgcctaaaatcatatgcaacaggtgactctgagtggtcagcatttgagtggatgcacactgattgcctgccagatttgatcaagcttgcctgcttgttgcctgtgaaagaagataacttaagaaccatcatcacaaagtacctcttggaagtatctggactctacggtaaagattatctggagcacattatgctacctgtatttcttgtagctgctggtgacattgatagtggcgattttacctattttcctctatcaatccagccaaaagtccgtggcttgcgtccgaaaacttcaactgctgaaaaacttgccatcatgtgtgtcttcccattattgttatctggtattttgggttctccttccagtcgtcaacagttggaagagtatctgagaaaagtacttatccaaaacaccaaggatggttcattttctatgcatcatactactgagatcattaacgcagttcggtttctttgcttatttgtggagcaccatagtgtcatctttaacattttgtgggagatggttgcgagctcggataccagcctgaaaataaatgctgcggctctactgagagcacttgtaccctacacggatgtgaaaatagcatcaactcatattttgccagcacttgttacccttggctctgatcaaaacttgaaagtaaaatatgccagtatagatgcatttggagctgttgctcagcatttcaaaaatgacatggttgttgacaaaatacgcattcaaatggatgcttttcttgaagatggatcacatgaagcttctgtttctgttattcgtgcacttgcagtagctgtacctcattcaacagataggctacgtgaatatcttttaaccaagatatttaagatgacatgcatcacacctgtcggcaatgatattgaacggcgtcgtgaaagagcaaatgtactctgtgaagcgctccgggctctggatgctacagatcttcctgctatgggtatacgtgatttgcttctgccatcaatacaaaatctgttaaaagatctggatgctctagaccctgcgcacaaggaggctttagaaatcataagccgggaaaggtcagggggtacgctggaaagcattagcaaggtaatgggggcgcatcttgggattgcatcatctgtcagcagtttctttggtgagaacagtctcctcacaaagaaagaaggtggcgaggaacatgatcctgctggccccaccgctcctgagcaaaacctgcaggctcagccagagagcacgaggtttggtcgcataatgaggagcggctttggagacatattgcgaggtcaaagcaaaggacagtgatgcacttagattgaaatgatcaattacatacatagctgccgataccacattctttgtttgtaagttgacagaatatacctcaagggttgtatgttatttgccgagataaaaaaaaaggatttgacgttgcaaatctagcatcaaacttcctgtatgtaagttgcctgtagttagctgctcatttataagatgctaataattgtgtctttgtttcatttgtttttataaataaaatatataactagatatgagacactttgcccatcttttctgaaatttggatgttatagttggctgacatcatgtaattgatctgctttggttgaaggaacggtgggttctg

SEQ ID NO: 217441 - DNA, 3938 bp, Zea Mays
gttacccgcgtctctagtctgtactttccaggccatcgtctccttccccttctttcaccggcctcgagtcacacgcgtgagatctgtgccttccgccgcggccacatgccacacaacgacgcccggcgagcttcaccgcgatagaggtaggcccgcccgataccaaggaggatggcggcagtgggcgttggtgcagcggacgagcggtgggcttcgttgtgcaactgcgtggtgaacttcttgctggaggagcggtatcacctcacggcgctagagctattgcaggagctccaggaggacggccgctccgcgcacgccctccgcctccgcgctttcttctccgacccagcgcttttcccgcccgatctcgtcgcccgctcatcctctgcgccgcccggtgctgatccacagattttgctagaagagaaaatagcagcagaagaaaagttggcactcacggagtatgatctgcgcctagccaaagaagacctttcacagttgaagcttgaattacaaaaacaaaaagaatcatctcctgatgattcaaatgggctccttttgggtgcttctatacgcgaaggatatactaggcaacaagaaaattgggatgtgaaaatttcagcattaggccctctaaaggataatgaacgaaaagatcttaattgcgctgtaaaagaatacttgcttttggcagggtatcgacttgctgttatgacattcattgaggaggttcctgatcaagaccttgatgtttggccaaacagttcagcttgtgttcctgatgcccttcgtcgttattactatcagtatctttcttctactgcagaggctgcagaggaaaaaatatccatacttcaggaaaatgaaacattactcaaggacaatgaacgactcaatgctgaaaatgattccttgatgaagagcagggaaggagctaatagtcaggttgccgctttaaggaagtctttggaagctgcacacaaggatataaaagacaaggaaaaaatgattcaagacttgaggcagtcactggatgtccagaggaaggagctgaatgactgcagagctgaaatcacagccctgaagatgtacatcgaagggactcaatcaatcaaacaattgtttgttggaactagtgatggtgtaaagtcgcattcctttgctaattctgtgggagcatcatcattgaataatgaagatgaagattcaaaaggatctgaagccataacaaataagctagcatcagcagtaaatattactgatgatacgcagaaagatcgccaagttctagaaagtagcgctgaaggttcctcagtttcagaaactccagtgtctttcacagctgttgagaatgacagctatggtacatcaaaagaagataaatctgtgtcaaatatctcatcgaataatgtatgttttcagagtaatctgcatggagcttccatgactggtaaaagccaggggagttcagatggcatatccatgtatttatctattgagaaactagagagcccaagtaaacaaaaatcttcagataagattgctttggagactataaagatagtttcagatgcacttccaaagattgttccttatgtgctcataaaccatcgtgaggaacttcttccattgatcatatgtgctatagaaaagcatccagatagcgatgtacgggattccttgactcatacattgtttaacctgataaaacggcctgatggagaacagagacgcatcataatggatgcttgtgtagaattagcaaagagcgttggtgagatgaggacagaaactgagttacttccacaatgttgggagcagataaaccaccaatatgaggagcgcagattgcttgttgctcagtcgtgcggtgaacttgccgtttatgtccgtccagagatacgagattccctcattttatccattgtgcaacaacttgtcgaagatgctgcaacagttgtaagggaagctgcaacacataacctggcattgcttcttcctatgtttccaaatctggacaaatattataaggttgaggagctaatgttccaattggtctgtgacccgtctggggcggttgtggaagttgcactcaaggaacttgttcctgctgtagtaagatggggagataaattggatcagatatcaagagtactattggctcatatcctggcatctgctcagcgatgtccacctatttcaggtgttgaagaaagctatacaaacttgcccctttgcatcagctgatccaacaagctctacaccagagaacttctcagcatcctgcctaaaatcatatgcaacaggtgactctgagtggtcagcatttgagtggatgcacactgattgcctgccagatttgatcaagcttgcctgcttgttgcctgtgaaagaagataacttaagaaccatcatcacaaagtacctcttggaagtatctggactctacggtaaagattatctggagcacattatgctacctgtatttcttgtagctgctggtgacattgatagtggcgattttacctattttcctctatcaatccagccaaaagtccgtggcttgcgtccgaaaacttcaactgctgaaaaacttgccatcatgtgtgtcttcccattattgttatctggtattttgggttctccttccagtcgtcaacagttggaagagtatctgagaaaagtacttatccaaaacaccaaggatggttcattttctatgcatcatactactgagatcattaacgcagttcggtttctttgtgtcatctttaacattttgtgggagatggttgcgagctcggataccagcctgaaaataaatgctgcggctctactgagagcacttgtaccctacacggatgtgaaaatagcatcaactcatattttgccagcacttgttacccttggctctgatcaaaacttgaaagtaaaatatgccagtatagatgcatttggagctgttgctcagcatttcaaaaatgacatggttgttgacaaaatacgcattcaaatggatgcttttcttgaagatggatcacatgaagcttctgtttctgttattcgtgcacttgcagtagctgtacctcattcaacagataggctacgtgaatatcttttaaccaagatatttaagatgacatgcatcacacctgtcggcaatgatattgaacggcgtcgtgaaagagcaaatgtactctgtgaagcgctccgggctctggatgctacagatcttcctgctatgggtatacgtgatttgcttctgccatcaatacaaaatctgttaaaagatctggatgctctagaccctgcgcacaaggaggctttagaaatcataagccgggaaaggtcagggggtacgctggaaagcattagcaaggtaatgggggcgcatcttgggattgcatcatctgtcagcagtttctttggtgagaacagtctcctcacaaagaaagaaggtggcgaggaacatgatcctgctggccccaccgctcctgagcaaaacctgcaggctcagccagagagcacgaggtttggtcgcataatgaggagcggctttggagacatattgcgaggtcaaagcaaaggacagtgatgcacttagattgaaatgatcaattacatacatagctgccgataccacattctttgtttgtaagttgacagaatatacctcaagggttgtatgttatttgccgagataaaaaaaaaggatttgacgttgcaaatctagcatcaaacttcctgtatgtaagttgcctgtagttagctgctcatttataagatgctaataattgtgtctttgtttcatttgtttttataaataaaatatataactagatatgagacactttgcccatcttttctgaaatttggatgttatagttggctgacatcatgtaattgatctgctttggttgaaggaacggtgggttctg

SEQ ID NO: 217442 - DNA, 4339 bp, Zea Mays
gtactttccaggccatcgtctccttccccttctttcaccggcctcgagtcacacgcgtgagatctgtgccttccgccgcggccacatgccacacaacgacgcccggcgagcttcaccgcgatagaggtaggcccgcccgataccaaggaggatggcggcagtgggcgttggtgcagcggacgagcggtgggcttcgttgtgcaactgcgtggtgaacttcttgctggaggagcggtatcacctcacggcgctagagctattgcaggagctccaggaggacggccgctccgcgcacgccctccgcctccgcgctttcttctccgacccagcgcttttcccgcccgatctcgtcgcccgctcatcctctgcgccgcccggtgctgatccacagattttgctagaagagaaaatagcagcagaagaaaagttggcactcacggagtatgatctgcgcctagccaaagaagacctttcacagttgaagcttgaattacaaaaacaaaaagaatcatctcctgatgattcaaatgggctccttttgggtgcttctatacgcgaaggatatactaggcaacaagaaaattgggatgtgaaaatttcagcattaggccctctaaaggataatgaacgaaaagatcttaattgcgctgtaaaagaatacttgcttttggcagggtatcgacttgctgttatgacattcattgaggaggttcctgatcaagaccttgatgtttggccaaacagttcagcttgtgttcctgatgcccttcgtcgttattactatcagtatctttcttctactgcagaggctgcagaggaaaaaatatccatacttcaggaaaatgaaacattactcaaggacaatgaacgactcaatgctgaaaatgattccttgatgaagagcagggaaggagctaatagtcaggttgccgctttaaggaagtctttggaagctgcacacaaggatataaaagacaaggaaaaaatgacttgaggcagtcactggatgtccagaggaaggagctgaatgactgcagagctgaaatcacagccctgaagatgtacatcgaagggactcaatcaatcaaacaattgtttgttggaactagtgatggtgtaaagtcgcattcctttgctaattctgtgggagcatcatcattgaataatgaagatgaagattcaaaaggatctgaagccataacaaataagctagcatcagcagtaaatattactgatgatacgcagaaagatcgccaagttctagaaagtagcgctgaaggttcctcagtttcagaaactccagtgtctttcacagctgttgagaatgacagctatggtacatcaaaagaagataaatctgtgtcaaatatctcatcgaataatgtatgttttcagagtaatctgcatggagcttccatgactggtaaaagccaggggagttcagatggcatatccatgtatttatctattgagaaactagagagcccaagtaaacaaaaatcttcagataagattgctttggagactataaagatagtttcagatgcacttccaaagattgttccttatgtgctcataaaccatcgtgaggaacttcttccattgatcatatgtgctatagaaaagcatccagatagcgatgtacgggattccttgactcatacattgtttaacctgataaaacggcctgatggagaacagagacgcatcataatggatgcactctagagctgctgctcctccaccaagattcaaaagagagatcatcctgcagcggacataactcctgcaaaccaccatctttgagaaattcaaaccagaattgcttggtgaaaacacaagaaaccaatagatgattaatattttcaggttcctgatcacacagcggcagcgttccggatgcgatagcccacgctttgcaagcctatcagttgtccaacacctgtcatgctccacatgcataacctttctcgtcatactgctttttttgtacttatacctgttttccttgtcatgtgcttgcaggcttgtgtagaattagcaaagagcgttggtgagatgaggacagaaactgagttacttccacaatgttgggagcagataaaccaccaatatgaggagcgcagattgcttgttgctcagtcgtgcggtgaacttgccgtttatgtccgtccagagatacgagattccctcattttatccattgtgcaacaacttgtcgaagatgctgcaacagttgtaagggaagctgcaacacataacctggcattgcttcttcctatgtttccaaatctggacaaatattataaggttgaggagctaatgttccaattggtctgtgacccgtctggggcggttgtggaagttgcactcaaggaacttgttcctgctgtagtaagatggggagataaattggatcagatatcaagagtactattggctcatatcctggcatctgctcagcgatgtccacctatttcaggtgttgaaggtacaatagactctcatcttcgtgttttaggagaacaagagcgctggaatattggtgtccttcttcggatgttgactgagttgcttccatttattcatcagaaagctatacaaacttgcccctttgcatcagctgatccaacaagctctacaccagagaacttctcagcatcctgcctaaaatcatatgcaacaggtgactctgagtggtcagcatttgagtggatgcacactgattgcctgccagatttgatcaagcttgcctgcttgttgcctgtgaaagaagataacttaagaaccatcatcacaaagtacctcttggaagtatctggactctacggtaaagattatctggagcacattatgctacctgtatttcttgtagctgctggtgacattgatagtggcgattttacctattttcctctatcaatccagccaaaagtccgtggcttgcgtccgaaaacttcaactgctgaaaaacttgccatcatgtgtgtcttcccattattgttatctggtattttgggttctccttccagtcgtcaacagttggaagagtatctgagaaaagtacttatccaaaacaccaaggatggttcattttctatgcatcatactactgagatcattaacgcagttcggtttctttgcttatttgtggagcaccatagtgtcatctttaacattttgtgggagatggttgcgagctcggataccagcctgaaaataaatgctgcggctctactgagagcacttgtaccctacacggatgtgaaaatagcatcaactcatattttgccagcacttgttacccttggctctgatcaaaacttgaaagtaaaatatgccagtatagatgcatttggagctgttgctcagcatttcaaaaatgacatggttgttgacaaaatacgcattcaaatggatgcttttcttgaagatggatcacatgaagcttctgtttctgttattcgtgcacttgcagtagctgtacctcattcaacagataggctacgtgaatatcttttaaccaagatatttaagatgacatgcatcacacctgtcggcaatgatattgaacggcgtcgtgaaagagcaaatgtactctgtgaagcgctccgggctctggatgctacagatcttcctgctatgggtatacgtgatttgcttctgccatcaatacaaaatctgttaaaagatctggatgctctagaccctgcgcacaaggaggctttagaaatcataagccgggaaaggtcagggggtacgctggaaagcattagcaaggtaatgggggcgcatcttgggattgcatcatctgtcagcagtttctttggtgagaacagtctcctcacaaagaaagaaggtggcgaggaacatgatcctgctggccccaccgctcctgagcaaaacctgcaggctcagccagagagcacgaggtttggtcgcataatgaggagcggctttggagacatattgcgaggtcaaagcaaaggacagtgatgcacttagattgaaatgatcaattacatacatagctgccgataccacattctttgtttgtaagttgacagaatatacctcaagggttgtatgttatttgccgagataaaaaaaaaggatttgacgttgcaaatctagcatcaaacttcctgtatgtaagttgcctgtagttagctgctcatttataagatgctaataattgtgtctttgtttcatttgtttttataaataaaatatataactagatatgagacactttgcccatcttttctgaaatttggatgttatagttggctgacatcatgtaattgatctgctttggttgaaggaacggtgggttctg

SEQ ID NO: 217443 - DNA, 4014 bp, Zea Mays
gtactttccaggccatcgtctccttccccttctttcaccggcctcgagtcacacgcgtgagatctgtgccttccgccgcggccacatgccacacaacgacgcccggcgagcttcaccgcgatagaggtaggcccgcccgataccaaggaggatggcggcagtgggcgttggtgcagcggacgagcggtgggcttcgttgtgcaactgcgtggtgaacttcttgctggaggagcggtatcacctcacggcgctagagctattgcaggagctccaggaggacggccgctccgcgcacgccctccgcctccgcgctttcttctccgacccagcgcttttcccgcccgatctcgtcgcccgctcatcctctgcgccgcccggtgctgatccacagattttgctagaagagaaaatagcagcagaagaaaagttggcactcacggagtatgatctgcgcctagccaaagaagacctttcacagttgaagcttgaattacaaaaacaaaaagaatcatctcctgatgattcaaatgggctccttttgggtgcttctatacgcgaaggatatactaggcaacaagaaaattgggatgtgaaaatttcagcattaggccctctaaaggataatgaacgaaaagatcttaattgcgctgtaaaagaatacttgcttttggcagggtatcgacttgctgttatgacattcattgaggaggttcctgatcaagaccttgatgtttggccaaacagttcagcttgtgttcctgatgcccttcgtcgttattactatcagtatctttcttctactgcagaggctgcagaggaaaaaatatccatacttcaggaaaatgaaacattactcaaggacaatgaacgactcaatgctgaaaatgattccttgatgaagagcagggaaggagctaatagtcaggttgccgctttaaggaagtctttggaagctgcacacaaggatataaaagacaaggaaaaaatgattcaagacttgaggcagtcactggatgtccagaggaaggagctgaatgactgcagagctgaaatcacagccctgaagatgtacatcgaagggactcaatcaatcaaacaattgtttgttggaactagtgatggtgtaaagtcgcattcctttgctaattctgtgggagcatcatcattgaataatgaagatgaagattcaaaaggatctgaagccataacaaataagctagcatcagcagtaaatattactgatgatacgcagaaagatcgccaagttctagaaagtagcgctgaaggttcctcagtttcagaaactccagtgtctttcacagctgttgagaatgacagctatggtacatcaaaagaagataaatctgtgtcaaatatctcatcgaataatgtatgttttcagagtaatctgcatggagcttccatgactggtaaaagccaggggagttcagatggcatatccatgtatttatctattgagaaactagagagcccaagtaaacaaaaatcttcagataagattgctttggagactataaagatagtttcagatgcacttccaaagattgttccttatgtgctcataaaccatcgaacttcttccattgatcatatgtgctatagaaaagcatccagatagcgatgtacgggattccttgactcatacattgtttaacctgataaaacggcctgatggagaacagagacgcatcataatggatgcttgtgtagaattagcaaagagcgttggtgagatgaggacagaaactgagttacttccacaatgttgggagcagataaaccaccaatatgaggagcgcagattgcttgttgctcagtcgtgcggtgaacttgccgtttatgtccgtccagagatacgagattccctcattttatccattgtgcaacaacttgtcgaagatgctgcaacagttgtaagggaagctgcaacacataacctggcattgcttcttcctatgtttccaaatctggacaaatattataaggttgaggagctaatgttccaattggtctgtgacccgtctggggcggttgtggaagttgcactcaaggaacttgttcctgctgtagtaagatggggagataaattggatcagatatcaagagtactattggctcatatcctggcatctgctcagcgatgtccacctatttcaggtgttgaaggtacaatagactctcatcttcgtgttttaggagaacaagagcgctggaatattggtgtccttcttcggatgttgactgagttgcttccatttattcatcagaaagctatacaaacttgcccctttgcatcagctgatccaacaagctctacaccagagaacttctcagcatcctgcctaaaatcatatgcaacaggtgactctgagtggtcagcatttgagtggatgcacactgattgcctgccagatttgatcaagcttgcctgcttgttgcctgtgaaagaagataacttaagaaccatcatcacaaagtacctcttggaagtatctggactctacggtaaagattatctggagcacattatgctacctgtatttcttgtagctgctggtgacattgatagtggcgattttacctattttcctctatcaatccagccaaaagtccgtggcttgcgtccgaaaacttcaactgctgaaaaacttgccatcatgtgtgtcttcccattattgttatctggtattttgggttctccttccagtcgtcaacagttggaagagtatctgagaaaagtacttatccaaaacaccaaggatggttcattttctatgcatcatactactgagatcattaacgcagttcggtttctttgtgtcatctttaacattttgtgggagatggttgcgagctcggataccagcctgaaaataaatgctgcggctctactgagagcacttgtaccctacacggatgtgaaaatagcatcaactcatattttgccagcacttgttacccttggctctgatcaaaacttgaaagtaaaatatgccagtatagatgcatttggagctgttgctcagcatttcaaaaatgacatggttgttgacaaaatacgcattcaaatggatgcttttcttgaagatggatcacatgaagcttctgtttctgttattcgtgcacttgcagtagctgtacctcattcaacagataggctacgtgaatatcttttaaccaagatatttaagatgacatgcatcacacctgtcggcaatgatattgaacggcgtcgtgaaagagcaaatgtactctgtgaagcgctccgggctctggatgctacagatcttcctgctatgggtatacgtgatttgcttctgccatcaatacaaaatctgttaaaagatctggatgctctagaccctgcgcacaaggaggctttagaaatcataagccgggaaaggtcagggggtacgctggaaagcattagcaaggtaatgggggcgcatcttgggattgcatcatctgtcagcagtttctttggtgagaacagtctcctcacaaagaaagaaggtggcgaggaacatgatcctgctggccccaccgctcctgagcaaaacctgcaggctcagccagagagcacgaggtttggtcgcataatgaggagcggctttggagacatattgcgaggtcaaagcaaaggacagtgatgcacttagattgaaatgatcaattacatacatagctgccgataccacattctttgtttgtaagttgacagaatatacctcaagggttgtatgttatttgccgagataaaaaaaaaggatttgacgttgcaaatctagcatcaaacttcctgtatgtaagttgcctgtagttagctgctcatttataagatgctaataattgtgtctttgtttcatttgtttttataaataaaatatataactagatatgagacactttgcccatcttttctgaaatttggatgttatagttggctgacatcatgtaattgatctgctttggttgaaggaacggtgggttctg

SEQ ID NO: 217444 - DNA, 4012 bp, Zea Mays
actttccaggccatcgtctccttccccttctttcaccggcctcgagtcacacgcgtgagatctgtgccttccgccgcggccacatgccacacaacgacgcccggcgagcttcaccgcgatagaggtaggcccgcccgataccaaggaggatggcggcagtgggcgttggtgcagcggacgagcggtgggcttcgttgtgcaactgcgtggtgaacttcttgctggaggagcggtatcacctcacggcgctagagctattgcaggagctccaggaggacggccgctccgcgcacgccctccgcctccgcgctttcttctccgacccagcgcttttcccgcccgatctcgtcgcccgctcatcctctgcgccgcccggtgctgatccacagattttgctagaagagaaaatagcagcagaagaaaagttggcactcacggagtatgatctgcgcctagccaaagaagacctttcacagttgaagcttgaattacaaaaacaaaaagaatcatctcctgatgattcaaatgggctccttttgggtgcttctatacgcgaaggatatactaggcaacaagaaaattgggatgtgaaaatttcagcattaggccctctaaaggataatgaacgaaaagatcttaattgcgctgtaaaagaatacttgcttttggcagggtatcgacttgctgttatgacattcattgaggaggttcctgatcaagaccttgatgtttggccaaacagttcagcttgtgttcctgatgcccttcgtcgttattactatcagtatctttcttctactgcagaggctgcagaggaaaaaatatccatacttcaggaaaatgaaacattactcaaggacaatgaacgactcaatgctgaaaatgattccttgatgaagagcagggaaggagctaatagtcaggttgccgctttaaggaagtctttggaagctgcacacaaggatataaaagacaaggaaaaaatgattcaagacttgaggcagtcactggatgtccagaggaaggagctgaatgactgcagagctgaaatcacagccctgaagatgtacatcgaagggactcaatcaatcaaacaattgtttgttggaactagtgatggtgtaaagtcgcattcctttgctaattctgtgggagcatcatcattgaataatgaagatgaagattcaaaaggatctgaagccataacaaataagctagcatcagcagtaaatattactgatgatacgcagaaagatcgccaagttctagaaagtagcgctgaaggttcctcagtttcagaaactccagtgtctttcacagctgttgagaatgacagctatggtacatcaaaagaagataaatctgtgtcaaatatctcatcgaataatgtatgttttcagagtaatctgcatggagcttccatgactggtaaaagccaggggagttcagatggcatatccatgtatttatctattgagaaactagagagcccaagctttggagactataaagatagtttcagatgcacttccaaagattgttccttatgtgctcataaaccatcgtgaggaacttcttccattgatcatatgtgctatagaaaagcatccagatagcgatgtacgggattccttgactcatacattgtttaacctgataaaacggcctgatggagaacagagacgcatcataatggatgcttgtgtagaattagcaaagagcgttggtgagatgaggacagaaactgagttacttccacaatgttgggagcagataaaccaccaatatgaggagcgcagattgcttgttgctcagtcgtgcggtgaacttgccgtttatgtccgtccagagatacgagattccctcattttatccattgtgcaacaacttgtcgaagatgctgcaacagttgtaagggaagctgcaacacataacctggcattgcttcttcctatgtttccaaatctggacaaatattataaggttgaggagctaatgttccaattggtctgtgacccgtctggggcggttgtggaagttgcactcaaggaacttgttcctgctgtagtaagatggggagataaattggatcagatatcaagagtactattggctcatatcctggcatctgctcagcgatgtccacctatttcaggtgttgaaggtacaatagactctcatcttcgtgttttaggagaacaagagcgctggaatattggtgtccttcttcggatgttgactgagttgcttccatttattcatcagaaagctatacaaacttgcccctttgcatcagctgatccaacaagctctacaccagagaacttctcagcatcctgcctaaaatcatatgcaacaggtgactctgagtggtcagcatttgagtggatgcacactgattgcctgccagatttgatcaagcttgcctgcttgttgcctgtgaaagaagataacttaagaaccatcatcacaaagtacctcttggaagtatctggactctacggtaaagattatctggagcacattatgctacctgtatttcttgtagctgctggtgacattgatagtggcgattttacctattttcctctatcaatccagccaaaagtccgtggcttgcgtccgaaaacttcaactgctgaaaaacttgccatcatgtgtgtcttcccattattgttatctggtattttgggttctccttccagtcgtcaacagttggaagagtatctgagaaaagtacttatccaaaacaccaaggatggttcattttctatgcatcatactactgagatcattaacgcagttcggtttctttgcttatttgtggagcaccatagtgtcatctttaacattttgtgggagatggttgcgagctcggataccagcctgaaaataaatgctgcggctctactgagagcacttgtaccctacacggatgtgaaaatagcatcaactcatattttgccagcacttgttacccttggctctgatcaaaacttgaaagtaaaatatgccagtatagatgcatttggagctgttgctcagcatttcaaaaatgacatggttgttgacaaaatacgcattcaaatggatgcttttcttgaagatggatcacatgaagcttctgtttctgttattcgtgcacttgcagtagctgtacctcattcaacagataggctacgtgaatatcttttaaccaagatatttaagatgacatgcatcacacctgtcggcaatgatattgaacggcgtcgtgaaagagcaaatgtactctgtgaagcgctccgggctctggatgctacagatcttcctgctatgggtatacgtgatttgcttctgccatcaatacaaaatctgttaaaagatctggatgctctagaccctgcgcacaaggaggctttagaaatcataagccgggaaaggtcagggggtacgctggaaagcattagcaaggtaatgggggcgcatcttgggattgcatcatctgtcagcagtttctttggtgagaacagtctcctcacaaagaaagaaggtggcgaggaacatgatcctgctggccccaccgctcctgagcaaaacctgcaggctcagccagagagcacgaggtttggtcgcataatgaggagcggctttggagacatattgcgaggtcaaagcaaaggacagtgatgcacttagattgaaatgatcaattacatacatagctgccgataccacattctttgtttgtaagttgacagaatatacctcaagggttgtatgttatttgccgagataaaaaaaaaggatttgacgttgcaaatctagcatcaaacttcctgtatgtaagttgcctgtagttagctgctcatttataagatgctaataattgtgtctttgtttcatttgtttttataaataaaatatataactagatatgagacactttgcccatcttttctgaaatttggatgttatagttggctgacatcatgtaattgatctgctttggttgaaggaacggtgggttctg

SEQ ID NO: 217445 - DNA, 2198 bp, Zea Mays
gaggaatatgcacaattatattaggtcgaagaagccgccactgccggatctggcgcagcgctagggcacaacgtgcgttggcgaggcaggcgagcgtgccgtgggtctgcgtgcccttggagctcctccaggtgacgtagggccatcacgccaattcacagttcgagatccgacgctggagccgccgctccaccagctcatcggcggtagctccgtgcggacagcgacgtcgacgcgtcgtcatctggtggcatggcagcggtggtcctcaccgatggctcagccatccgcaagagcgcaagcatggggacctctccctcgtcttcgcggggtccaccagcgacagcgcgtccccaactgttgggcccgacctcgccgacagcggtgtggggccatgacttcgaacgacatcgtcctccgcgagccatgagcgtaaaaaggttaggtactgccctatctctgcccctcctctctaatcgatcaatggtaatagcacactacgagtactcttgccattgtattccattagcgacaaatctgctagaaaactatgttatggctagaaactgttagaagtttcaggaatggtgttttatgttacctcgtcatatttttcaagatacatgtcttgtggtcgaaatttcttaagatttcttagttgtcttatagttttgattaagttgacaacttgaagtctggatagagaaattaatgatgaaccagtgtgcaatataagacatatatcatatttaatggtttagtgacatccttattagcacccgttttgaggacatggacttccacatacgtggctgattctcttgaaccatgacggtacaatctctgatttcaactgaagaaaatctctgctttcctgtcctttcccatgaaaatcgtccgagagatgactaggatgaaggatgagaggaataggctgaggatgatcatggcacagtacttggtgtggcttcattcttcatgcaagatctgagcaaccttgagtagcaaatcgaggggaagggtacgagcagcttcggcaagcgccggaacaagacgcacacgctctgcatccgctgcagcagccgtagcttccacctccagaagagcacctgctcctcctgcgattacactgccgcccgcatccgcaagtaaggacaagcctccacgtcgatagaagcaaatcaatccatttcgtttgacaagtagaagattatctgtgttcaaccaaatggacataattagtgctgttttgcaaaagcattttggattttccagtctcaaagcattccaaaaggaagtcttggatgcttggtttgctcatgaggattgtgttctcctaacagccataggatcaggaggtaccaaaggaaatgagcaaaacatagcatacagtctcagatgctgcaggatcacatgaaaattattgaagacgacggtccaggtgcagccttctatgccagtgctaaggccatgactaatggaaatcacactttctatggacctctcaagcaacaacctcaatggataaggcatattaaatagtaatgctccttccatttcataatgtgtaaggcatattaaatttcttttaagaacgaaactttataaacattgaccatcaaatagtaaataaaatacatgtagattcatatttcacgtggttttgtagtaattgagaatgatttcaagatgaattaatggtgaaagcattccttgaaagacttcttaaatcctaatatgccttgtaaaatgacaatggatggaatagtttacaacatgacaaactgtccacctgaaattaaaaggataaatattattaatttctaaaggttgttttatgccgtcattgcttatcttgtgtagcattacttcttcagcatcatgggagaaaatcttactgtcagggttcagaggatgttgtacggaatgaagttggttgatttgacgaagaagaaaacatttttagtcttgtggctgtgcgtctagctgttgatgcagctgatgagaagtcggctatagccgagagaatttcagtcatcctgcagaaatatgtcttcccatatgacttctttcgttgttggatttatcatcgagtggagagtggcaatacttagtctggccactacttgtgcttgccaactttgcttaggtaatttcttggcctacttttaagcggtgtcatctgtagacaaaatgag

SEQ ID NO: 217446 - DNA, 3552 bp, Zea Mays
gtcaatttattttagtttccggtcccatataggaattgaatatatcgtaatgcacactagtgggtgaagcaacagcatcatcgcttccatattattgcatcttccgactccctcgattcaccagtcaacggcttcatttcttcgctgcaccattaggctccgttctacttctacctaataacagggtgtagttgtttaatttgaaatggactctgaagccagtatgttcgatcacattgagctcatgctacttgatgaaaagtgtggagccgtcagacatgccattatcatttttaacagcaatcaccaataatttctcagaggatcagacaattggccgtggtgggtttgctgtggtttacaagggactgctgcgaaatggactatccgttgcggtaaagaagttctatgataccattgaactatctgatgaaatgtaccgtaaagaggttcaatccatgatgaggttgaaacatgcaaatatagtacgtttttttggatactgtgctgacacacagtggaaaatgttcaaacacgatggaagacatgtgattgcagaagcacgccaacgattgctttgctttgaatttgtgcctaatggaagtcttgataaatatatatctgatatgtttcatggcctcgaatggagaaagcgctatcagataatcaggggaatttgtgagggcttgcgttatcttcatgatgagaatgttcttcacttagatcttaagccttcaaatatactgcttgatcataatcttgttcctaaaattactgattttggtctctcaagatgctttgatgataataaaactcgaaccgttacagcaaatctgattggatcggtgggatacctggcaccagaattttttagtggattgatctctttcaagtcagatgtatatagccttggtgttataatcatggaggtggtgacaggaataaaaggatactgcgaaattgaagatgtacttgaaagctggagaaaaagattgaaaatgccaatgggagatgcactggaacaaataagggtctgcgttgagattggcaccatgtgcattgagagtaacccattgaatcgtccagatctcaggcatataatcgagctgtttgatgaaatggaaaacatgcggctggttacaaaaactacaagttcattaggaacccagggaagtgatgaacatgattcagaagaaacgattgcttcagctatcactgatgaaaagagagagaaactttcagtactaagtacgttgcctaagtatttaccatttgcattcctcgaggatatcacagatggtttttctaaagaacggcagcttggcagaggtgggttcggagtggtttataagggaatccttagtgatggatataccattgctgtccgcagactccttagattccagggaattgagatgaaacaattcgacaatgaggttaatatactcatggagcttagacacaaaaatattgtcaatctcctgggatactgccacgaggttaggggtacgtacgtacagtacaaaggaaaacctgtattcgcagaaacctccgaacagttgctctgctacgagtatctgcactgtggaagcatcgacaagtacatttttggaaaaaaccatgaactagattggcacacgcgttacaaaatgattaaagggatctgtgagggtttacattacctccacgagaatgacagagctccaattattcatttgaacttgaagccagcaaatgttttgctagacgcagccatggaacctaggatcacagattttggtttatcaaggcttattggtgaagggaatactagaatagtcaacacacacactcctggaccaatagggtacatggcacctgaataccgttacatgggggaagtttcacgcaaggtagacatattcagcttgggtattcttatactagagattgtaactggtcaagacaatagtaccaaagttgactttatcgatcatgtatgtgaacactgcatggaagggccacaaataaaatttatgtatccctctctggaacctgaattacatgatcaggtagaactgtgcatcaaaattggcctagagtgtgtccagacagatcgaaaaaaaagacctactgcaggggacattatacgtaagctcgaggaaggaaccaaattgggccctacaccatcccgtgaaaatattactacagaaattggtaagccacagatgttttcgtttgaactcctgaatgacatcacagaaagcttcagtccgggacgcctgcgtgggacaggtggatttggatatgtttatgaggggataccacatggtaacgagggagcgatggccgtgaagaggcttaaagaaaaaataggtatatcaccgaaacagtttgagaatgaggttcataatctgagcagaatcgagcacaggaatattgtacggcttataggctactgcgatgaaatacgggaaatactatctcatggtaaaaacaagaatgatccacctattcgcgaacatattcaagaaaggttattgtgttacgagtatatgcctaagggaagccttgacaagataatttatgataacctcgattggcatacgcgatataaaataatagaaggtatttgccatggcttacattgtcttcacgagggtcaacaggatattcagattgcgcatttggacttaaaaccagcaaatatattacttgacagtgacatggttcctaaacttgctgattttggtatgtcaaggctcttcagtctcgaacaagtttatatccttgcttccaagcctatgggaacaattggctacatagcaccggaataccttgaccacaaaaaggtatcaacaaaggcagatatatatagtttcggcattgtagtactggaaatcgtaacacgaaaacagtgcccacgcagttacgcagacataaatgctcagcattttatccaccatctgcgtcaaaatttgacaaaagataactacgtcaaatccatgtacccggcccttgaagcggactgccttcagcaagtgaaactgtgcatagaaattgggctgaactgcgtggagaaggaacctacaaagagaccaactgccagggaaataatctctatgtttaatcaaaaaaaggattcgagcagatctggggtatctaactgcatcgttaatgtgatagaggcgtggctatcaaggcttccatggcatccttggcctctaactttgctccgtcagacttaagcttgatggcaacagcggtatttgaaagatttgcaagggtgtccgcttgagttcctgcgatgcagcggaaggaagaaaaaaactagcagattaaaaatgagaatggggatcttgtatatctatttatgttttatccttttcatagaaaaattacaagctatgattttgatggtatagtggcaatattatgtcaatgtaacattcaatgggcatcgaattaaaatataatctaagtattttttttcctagcattgtaaggcgtagaaatatatgtcaatactcctttcattttaaattggaagtcgttctggatttgtttttacat

SEQ ID NO: 217447 - DNA, 3561 bp, Zea Mays
gtttccggtcccatataggaattgaatatatcgtaatgcacactagtgggtgaagcaacagcatcatcgcttccatattattgcatcttccgactccctcgattcaccagtcaacggcttcatttcttcgctgcaccattaggctccgttctacttctacctaataacagtttgaagggtgtagttgtttaatttgaaatggactctgaagccagtatgttcgatcacattgagctcatgctacttgatgaaaagtgtggagccgtcagacatgccattatcatttttaacagcaatcaccaataatttctcagaggatcagacaattggccgtggtgggtttgctgtggtttacaagggactgctgcgaaatggactatccgttgcggtaaagaagttctatgataccattgaactatctgatgaaatgtaccgtaaagaggttcaatccatgatgaggttgaaacatgcaaatatagtacgtttttttggatactgtgctgacacacagtggaaaatgttcaaacacgatggaagacatgtgattgcagaagcacgccaacgattgctttgctttgaatttgtgcctaatggaagtcttgataaatatatatctgatatgtttcatggcctcgaatggagaaagcgctatcagataatcaggggaatttgtgagggcttgcgttatcttcatgatgagaatgttcttcacttagatcttaagccttcaaatatactgcttgatcataatcttgttcctaaaattactgattttggtctctcaagatgctttgatgataataaaactcgaaccgttacagcaaatctgattggatcggtgggatacctggcaccagaattttttagtggattgatctctttcaagtcagatgtatatagccttggtgttataatcatggaggtggtgacaggaataaaaggatactgcgaaattgaagatgtacttgaaagctggagaaaaagattgaaaatgccaatgggagatgcactggaacaaataagggtctgcgttgagattggcaccatgtgcattgagagtaacccattgaatcgtccagatctcaggcatataatcgagctgtttgatgaaatggaaaacatgcggctggttacaaaaactacaagttcattaggaacccagggaagtgatgaacatgattcagaagaaacgattgcttcagctatcactgatgaaaagagagagaaactttcagtactaagtacgttgcctaagtatttaccatttgcattcctcgaggatatcacagatggtttttctaaagaacggcagcttggcagaggtgggttcggagtggtttataagggaatccttagtgatggatataccattgctgtccgcagactccttagattccagggaattgagatgaaacaattcgacaatgaggttaatatactcatggagcttagacacaaaaatattgtcaatctcctgggatactgccacgaggttaggggtacgtacgtacagtacaaaggaaaacctgtattcgcagaaacctccgaacagttgctctgctacgagtatctgcactgtggaagcatcgacaagtacatttttgttctatttttttaaaggaaaaaaccatgaactagattggcacacgcgttacaaaatgattaaagggatctgtgagggtttacattacctccacgagaatgacagagctccaattattcatttgaacttgaagccagcaaatgttttgctagacgcagccatggaacctaggatcacagattttggtttatcaaggcttattggtgaagggaatactagaatagtcaacacacacactcctggaccaatagggtacatggcacctgaataccgttacatgggggaagtttcacgcaaggtagacatattcagcttgggtattcttatactagagattgtaactggtcaagacaatagtaccaaagttgactttatcgatcatgtatgtgaacactgcatggaagggccacaaataaaatttatgtatccctctctggaacctgaattacatgatcaggtagaactgtgcatcaaaattggcctagagtgtgtccagacagatcgaaaaaaaagacctactgcaggggacattatacgtaagctcgaggaaggaaccaaattgggccctacaccatcccgtgaaaatattactacagaaattggtaagccacagatgttttcgtttgaactcctgaatgacatcacagaaagcttcagtccgggacgcctgcgtgggacaggtggatttggatatgtttatgaggggataccacatggtaacgagggagcgatggccgtgaagaggcttaaagaaaaaataggtatatcaccgaaacagtttgagaatgaggttcataatctgagcagaatcgagcacaggaatattgtacggcttataggctactgcgatgaaatacgggaaatactatctcatggtaaaaacaagaatgatccacctattcgcgaacatattcaagaaaggttattgtgttacgagtatatgcctaagggaagccttgacaagataatttatgataacctcgattggcatacgcgatataaaataatagaaggtatttgccatggcttacattgtcttcacgagggtcaacaggatattcagattgcgcatttggacttaaaaccagcaaatatattacttgacagtgacatggttcctaaacttgctgattttggtatgtcaaggctcttcagtctcgaacaagtttatatccttgcttccaagcctatgggaacaattggctacatagcaccggaataccttgaccacaaaaaggtatcaacaaaggcagatatatatagtttcggcattgtagtactggaaatcgtaacacgaaaacagtgcccacgcagttacgcagacataaatgctcagcattttatccaccatctgcgtcaaaatttgacaaaagataactacgtcaaatccatgtacccggcccttgaagcggactgccttcagcaagtgaaactgtgcatagaaattgggctgaactgcgtggagaaggaacctacaaagagaccaactgccagggaaataatctctatgtttaatcaaaaaaaggattcgagcagatctggggtatctaactgcatcgttaatgtgatagaggcgtggctatcaaggcttccatggcatccttggcctctaactttgctccgtcagacttaagcttgatggcaacagcggtatttgaaagatttgcaagggtgtccgcttgagttcctgcgatgcagcggaaggaagaaaaaaactagcagattaaaaatgagaatggggatcttgtatatctatttatgttttatccttttcatagaaaaattacaagctatgattttgatggtatagtggcaatattatgtcaatgtaacattcaatgggcatcgaattaaaatataatctaagtattttttttcctagcattgtaaggcgtagaaatatatgtcaatactcctttcattttaaattggaagtcgttctggatttgtttttacat

SEQ ID NO: 217448 - DNA, 2811 bp, Zea Mays
accgaaattgggcaatgaagctgcaactaaagtctgcagacagttgggattttgtgatgaccaggaacatatttccttcgaagacgcccaaaagtacttgaaagctggagaaaaagattgaaaatgccaatgggagatgcactggaacaaataagggtctgcgttgagattggcaccatgtgcattgagagtaacccattgaatcgtccagatctcaggcatataatcgagctgtttgatgaaatggaaaacatgcggctggttacaaaaactacaagttcattaggaacccagggaagtgatgaacatgattcagaagaaacgattgcttcagctatcactgatgaaaagagagagaaactttcagtactaagtacgttgcctaagtatttaccatttgcattcctcgaggatatcacagatggtttttctaaagaacggcagcttggcagaggtgggttcggagtggtttataaggtatgccaacatccttgcgtttcatgttcattatgcatatttatatttgtgcaatctgagaactgagacgcgacagtaaaccgattgagtggtaacatatatatcttctttgcaacagggaatccttagtgatggatataccattgctgtccgcagactccttagattccagggaattgagatgaaacaattcgacaatgaggttaatatactcatggagcttagacacaaaaatattgtcaatctcctgggatactgccacgaggttaggggtacgtacgtacagtacaaaggaaaacctgtattcgcagaaacctccgaacagttgctctgctacgagtatctgcactgtggaagcatcgacaagtacatttttgttctatttttttaaaggaaaaaaccatgaactagattggcacacgcgttacaaaatgattaaagggatctgtgagggtttacattacctccacgagaatgacagagctccaattattcatttgaacttgaagccagcaaatgttttgctagacgcagccatggaacctaggatcacagattttggtttatcaaggcttattggtgaagggaatactagaatagtcaacacacacactcctggaccaatagggtacatggcacctgaataccgttacatgggggaagtttcacgcaaggtagacatattcagcttgggtattcttatactagagattgtaactggtcaagacaatagtaccaaagttgactttatcgatcatgtatgtgaacactgcatggaagggccacaaataaaatttatgtatccctctctggaacctgaattacatgatcaggtagaactgtgcatcaaaattggcctagagtgtgtccagacagatcgaaaaaaaagacctactgcaggggacattatacgtaagctcgaggaaggaaccaaattgggccctacaccatcccgtgaaaatattactacagaaattggtaagccacagatgttttcgtttgaactcctgaatgacatcacagaaagcttcagtccgggacgcctgcgtgggacaggtggatttggatatgtttatgaggggataccacatggtaacgagggagcgatggccgtgaagaggcttaaagaaaaaataggtatatcaccgaaacagtttgagaatgaggttcataatctgagcagaatcgagcacaggaatattgtacggcttataggctactgcgatgaaatacgggaaatactatctcatggtaaaaacaagaatgatccacctattcgcgaacatattcaagaaaggttattgtgttacgagtatatgcctaagggaagccttgacaagataatttatgataacctcgattggcatacgcgatataaaataatagaaggtatttgccatggcttacattgtcttcacgagggtcaacaggatattcagattgcgcatttggacttaaaaccagcaaatatattacttgacagtgacatggttcctaaacttgctgattttggtatgtcaaggctcttcagtctcgaacaagtttatatccttgcttccaagcctatgggaacaattggctacatagcaccggaataccttgaccacaaaaaggtatcaacaaaggcagatatatatagtttcggcattgtagtactggaaatcgtaacacgaaaacagtgcccacgcagttacgcagacataaatgctcagcattttatccaccatctgcgtcaaaatttgacaaaagataactacgtcaaatccatgtacccggcccttgaagcggactgccttcagcaagtgaaactgtgcatagaaattgggctgaactgcgtggagaaggaacctacaaagagaccaactgccagggaaataatctctatgtttaatcaaaaaaaggattcgagcagatctggggtatctaactgcatcgttaatgtgatagaggcgtggctatcaaggcttccatggcatccttggcctctaactttgctccgtcagacttaagcttgatggcaacagcggtatttgaaagatttgcaagggtgtccgcttgagttcctgcgatgcagcggaaggaagaaaaaaactagcagattaaaaatgagaatggggatcttgtatatctatttatgttttatccttttcatagaaaaattacaagctatgattttgatggtatagtggcaatattatgtcaatgtaacattcaatgggcatcgaattaaaatataatctaagtattttttttcctagcattgtaaggcgtagaaatatatgtcaatactcctttcattttaaattggaagtcgttctggatttgtttttacat

SEQ ID NO: 217449 - DNA, 1703 bp, Zea Mays
cccgaatgaccttttgtgttcgtcgtctccccaaaaggacctcccaagacctggcatctccagcgaatgcgacgccgggaaccaccgaccgtgcgtcctctctcctcgtgcgcttcgcccgtctccacagttggtgcagcttgcgacgcaacttggattctctcctctcctctcctctcgttgcaacaaggcagtccagtgaatgagacggatggccccagctgtgcctgtagctgatgcatgatggagctgagcctgtggatctgaggccgtcgtcttccactgggtcgcgctcctgttcgctccgtcgtcagaaatgcaggcagcgccagcaggtcttgcttcacgctcctcgcggatggtggcccctccggcccgcgccgatgcagttgaagctccttccgaagtgagtgaaaagtgttccttgctccttccaaagtttagagatcacagcagcgaggtataatcggagatttgcactatgctattgttgaagtgacgcatttttaaggtttagggcagtttacggcaatgcagttcaagctcctcctttttattgttcaagtgacataactataatttaagtatttgtttgcgccagtttacataactatacattaagtattgtttatggcagaactataatatttgtgcagtgactatattttaagtatacttcacataaatatagtttaagtatttgttttgcgacaatttacataactatacattttaagtattgttcagtgactatttgagtttacataactatactttatagaatctatcacaaaacacaggcaaaagacattgttgggagtagtaggggcacaaaaaccgtgggcgcctcgctcaacacgagcaacattgtttacggcactagcagaaatgcagaatacgtccgcgccatctattatccagcacacatgatccgatatgttttagcgttaggagcattatatatttggattgcaatactgatgtgtgagagaatctcattcttctatttgtattgtaggcacaaagattaaatagagtttggaatggtcttttagacgccattagacacatgcaagtctcagccgatgagttgaggaggttgaccagacgcaaccatgtgcctgagtatgtagagtacctacgcaaaaatagattatgaagcccatgtgagtgctgttactgaaattgcacaaggtctagaccacgtgagcacagatttggcggaagttcttattggtccgcaacctcttcttgaagattatgaagcccttggtttgtacgatgatttccaatgcgatggtgaagatagctctgtggactcggatgagatcaatgatcgtcgtctatcgcatatgaacgagcgtatatgagatatttgtttgcgagagagttcagtttgccattgatgtctgtagcttatgaagcccttagttagttgccactgttgttcctggtacttgtatgaattgggttatgaaaatgaagagttgtgttatgagttgtattttgtgatcatataatggcttcatgtgataattctgcacctgttgtcactgttgttatgagttgtatcttatgaagcccttagttagttgccactgttgttcctggtacctgttgatcatacaattgttagttgtcactgttgttcctggtgctcatgatttcaagatcattttgataattctacaccttgttgctca

SEQ ID NO: 217450 - DNA, 7373 bp, Zea Mays
ctaaaggcctaaaccctagcctccttgctcctgcgctccggtcgccggtgcgtcccctcctccgctggccgccggcgccggtgcaatcacccgccgccgccagtgcatccgtccagggctgcacggccacctgtgcccactgggttgtgcggtcctaacgcaagttcggcgccgaccaccgccgaactgaagccgtctgcccacacccactcgcggcagcaccgccggacggctcccggcactgcgccagtgcgtgctgcctccggtatagcggctgccggatcccgccgcggcacctgcagaggcactaatcactaacagttactgcactgttggtatgcgagtcctagtttgctgctcatgctctaagatatgaggtagttctgtgtgagggatttgaaagatggcgtcaaaaggtccccggtcaaggctagaccatgacacaagagctaggcgtcagaaggctcttgaagctccaagggagcctcgacggccaaaagttcactgggaccatgtccttgctgagatgttgtggctggcaaaggagtttgattctgagagaaaatggaagttgtccatggccaaaaagattgctcaaagagcaaataagagcatagttgatcaagcagcaaagggcgagagaaaacagaagggaaagcaggttgtctataagcatcaactggagcttgaggagagaaagaagaaggcacttgataagcaacttgatttccttttaggtcagactgaaaggtattcaacaatgttggcggaaaaccttgtagatatgccctattctcaaaacctagaaaccgagacttcgcagataaaccaaccatcccatcaagaggtagtagcagaagagaacttaaacgcaaccattccggatgatcttgataatatggaagtcgatgatgattatgggagctccttggatgaagagccagaagatgatgagcacactatcgatgaggatgaagctcagattaccgaagctgagcgcaatgaagaactagctgctttagaggcagaagctgacctaccactggatgttattctcaagatgtatacaaaaaccaaagttactccgaaccaggctaatgggtgtgatcatgaacttgctcactcttcaagtgacgaaggcaattcttctgaggaagtggatgatggtcattcttatgctgagtttgtgaagaagaatcatggtaaaagtaatggaaatatttcttctatcaatgatcaggaggacgaagattacattgctgctgaagaagtaaaggatgacgaagcaactttgtccgaagaggaacaattggcaaagaaagaagatcctgatcatctggaagagattaagttactgcagaaggagagcgagataccactagaagaacttcttgcgaggtaccgagaggatggctgtgcagatcatgaaacagctgagttggagaattcaccccattttgttgaagaggtcaataccgacaagtctttgaatgatcaatctgtgaacattttggaagcgaaaagtgatatttttgtggatcaccaatccagggatgtgctggaaactgagcacacgactctacaatcagaaattgcatcagagccttgtgctcaacaaaattttgtggaagagaataatctcactgatgttaagacagtcaatgaagataagagtgatgatgtaattgctgatgctgcagctgctgcaagatcagcacaaccaactggcaacaccttcttgactacaaaagtgcgcacaaaattcccattccttcttaagcattctcttcgtgaataccagcatatagggctggattggttagttgctatgtatgagaagaggcttaatggaattctagcagatgaaatgggtttaggcaagacaatcatgactatctccttgcttgcgcaccttgcgtgtgagaaggggatatggggtcctcatcttattgtcgtgccgactagtgttatgctaaattgggagactgaatttcttaagtggtgtcctgcttttaaaatactgacttatttcggaagtgcaaaggaaagaaagcagaagcgtcagggctggatgaaaccaaattacttccatgtttgcatcacaacatataggcttgtcattcaggattctaaagtgtttaagcgaaaaaagtggaagtatcttattcttgatgaggctcatctgataaagaactggaaatcacagcgttggcagacattgctcaacttcaattcaaagagacgtattcttctgactggaactccactgcaaaatgaccttatggaactttggtccctcatgcattttttgatgcctcatgtatttcagtctcatcaagagttcaaggattggttctgcaatccaatttccgggatggtggaaggtcaagataaagtaaacaaagaagttatagatcgattgcacaatgtccttcggccatttatactgcgtcgactgaaaagagatgttgagaaacagttaccaaagaagcatgagcatgtcatatattgccgactttctagaaggcaaaggaacttgtatgaagaatttgtcgctagctcagagacacaagcaaccctggcgagtgggaattattttggcatgataagcatcatcatgcaacttagaaaggtctgtaaccatccagatctttttgaaggtcggccaataataagctcatttgacatggctggtattaacatgcagctcagctattcagtctgcatgctccttgataagagtccattttctcaggtggacctgtctgatatgaattttgtgtttactcaaaatgaatttagcatgagttcctgggaagctgacgaggtcatctccgcctttccttcaagtatcacctccagggactgtgacctggatattttttgctctaataaggatcatcagggaagtaatttgacaaacatttttgaagatattcagaaagccctacaggaggagagaataaaggaatccagagaaagggcagcttctgttgcatggtggaatagagttagatgccaaaagagacctgtctatggcacaaacatgagacatgttttgactgtaaagcatcctgtatcaaatattcttaataagaggaacaatccattgtgccacatggactattcatcacgccttgcagatcttgttcttccatctgtggaacgctttcagaaaatgctttattttgttgaatcatttacattcgcaattccagctgctcgagctcctccccctgtttgctggtgcagcaaaggaaagtctcctgtttttattgatccagcatatagagaaaaatgcatgtacaagttttctcccattctgtctcctataaggtctgctatcgttcgtcgtcaagtctactttcctgataggcgtttgatccagtttgactgtgggaagttgcaggaacttgctattctgttaaggcgtttgaaatcagaaggccacagggccttgatatttactcagatgactaagatgcttgacgtcttggaagagttcataaatttatatgggtatacatatttgcgattagatggttctactcccccagaagagaggcagactctaatgcagaggttcaacacaaatccaaagtttttccttttcattttgtccacacgtagtggtggtgtgggaatcaaccttgtaggtgcagacactgttatcttctatgacagtgactggaaccctgcaatggaccaacaagcacaggacagatgccacaggattggtcagactcgtgaagttcacatatatagactcatcagtgaaagcactatagaggagaacattctcaagaaagcaaatcagaaacgagctcttgatgatttagtgatacaacgtggtagctacaatacggaattcttcaagaaacttgatcctatggagttcttttccgggcacacatctcttcgtgtggaaggtcaggagaagaattgctctacatccgtgggagcttcaaatgatgtggatctggctctgtcaattgcagatgttgaagcagctattagacaggcagaagatgaagctgactatatggctctcaagaagttggaggaggaagaagctgtggacaatcaagaattcagtgaggaggttgcgggcagaccagaggaggatgaattggttaatgaggaggatggaaaacctgatgagcacattaatgaagatcacaaatactactcttctgatgtagagaaggagaagcacattactttgtctaccaatcgattaaacaatgaaaaggctcttacattggctgttggtgatgaagatactgacatgcttgctgatgtgaaacagatggcagcagcagctgctgcagcagggcaagcatgttcatcttttgagaaccagctccggccaattgatagatatgcaatgcgctttatggaactctgggatccagtaattgacaaagctgctgtcaatcatcaagtaaatgttgaggaggaagaatgggagcttgatcgcattgaaaaactcaaagaggatttagaagcggaaattgatgaagaccaagaaccactatcgtatcaatcatgggatgttgattttgctacgacagcctatcggcaacatgttgaggctttaactcaaaagcagttgttggaagaacaggaaagacaggctcaggaagcagcaaaagagttggaagagaataatgataatatgagtcaccgcagaaagtcaaacaagaataaaaagaagactggcaaattcaagtcccagaaaagaccgcgtttgtcttctgaatcagaagtcattctggaggaaacctctgtagatacaatgagcattgatgacaatgcaccctcacctgagcttataagtgatgaatcgccacaccattattctaacaagcgtaagaagattatgtctgctactgaggaagatagtaacagcagaagtttaaaaaagtttaagaaaactaaatcaagttttatttctgagttgtcacctaggccgaaggaggaccttaatgattcagatccaaaatcagtggctagaactaaaagtgatggcagactttccatcccttgcatgccagtaaagcgtgttattgtgataaagcctgagagattgaaaaagaagggaatatggtctcgagattgtgcttcagactcatggacatctgaggaagatgcagttctttgtggaactgtgcatgagtatggtcctctttgggaactggcaagtgattttcttcactccttgccaggcgggtcctcctataggggaagatatcatcatcctttgcattgctgtgagagatacagagaacttttctgcaaatatgcaatatcagcaacagataattctaacagtgaaaaggctccttctgggactggaaaggctgtacttagagtatctgaggatcaagctcagatgttggtgaatgtgaccagtgaacttcccaacaatgaattgcttctccagaaacacttcatggctgtaatttcatctgtatggagatcaaaatgttgccgtcatccctgctgttttaggaataagcctggtggatcaagtgagaactggcccatggtaaactttagaccaagcgtcaatctagttagggaagcccttgcagctggtcaggctaagtttacgctaactgtgattccaccaccgtcaagaaaccaggaatactcacggaattatttagaattagagttagatttcttgaaagatcaacatgcctatgaggaagacttcccgtctgtactaaatgtatccatactggaaccagaatcatccaaacaggctccagagccagtggaacaatcattgttatctgaactttcatgtagacaggctgagaaccgactcaggatagcgtcagaagcttgttatgatggtgaaagttttcattgggcatcatcatctttccacataaatgatgctgcccgccacaaatctggtttgaagtctatagggaagcacaaagcagcatcggaatctggtagacctcccaaatccaaagtccagaagattactgaattgcatcaggaagggccaattgccatgagtaattttctctgtatgcctgctcaactattgccaagtacagctgacttccacattagtgactccctatctgactttggtatcaacgattatgaattcaactactctgaggatctcttgcaagagtttgacgccctcgagttcttcccagatcagggtgactctggtctccttggtattgaagagttagaacctctttcggatttcacagatatcggatgaacatagatgagcaaattatggttgatgggatgctgtcctataccaagaggagacaagatcgcctctggcaggagcccaaggatataggttgagttgctcaaccatgcacagatgtgctgcaagctttatcatggctggctggagcaaagctgctggcttggtgaggtcacattgatctgacaagcttgaggatgggtttgcactaatggcggcattgggtaatttccatacatgtaccaacagagaaggtaaaagaggaggccctcagcaccacccatttgttgctgtatatcgtgttcattctctgtttaatccaatgttgtttggctattttgccactgaaaacatctcacatgtcaagttggtggatgccatctctatcagaaatttaggatgtggcgccaatgtccaaagaatgatcagtcaagtgcagcttatcggcgcattatatttggtcaggaatcaatgcatgacatcaatatgatcagaactgctgttccagtttcatttgaggaatgcaatttctggtgattcgggatgcaagtttttcataggaggtaaagagcgtgggcatagttgtacatgtaataaaatgaataaggttctgtgaactctcggtctcggttatgccaattaatagccataatttgttgttagaggccagggggctttttgatcagcgggctgctgctgtgagccggtaacaatgtagctgattgtgcgcctccatattgttttcttggtaagtggactttgcatcactgccaagcaacgatgagatagagtaattggtctgtttcgcgcaaaaatactacgagcttgtattcagtcttgacctccagtaacctgaacgctgagaatgtttggccaaccacataatacgtaggctgactagctgagaatatctagctaatcccgtaatctgtaagctgagaatgtatggtgaatcccataatctgtaagctgagattgtttggccaatcaaggtcacaatgctgcctacaagctgagaatgtttggccaattaaggtctagctgatgtccttagcagaaaacaaaattttctaaacgcaaactgttttaataatagtaagaaaacagggctccacttatttgt

SEQ ID NO: 217451 - DNA, 7518 bp, Zea Mays
ctaaaggcctaaaccctagcctccttgctcctgcgctccggtcgccggtgcgtcccctcctccgctggccgccggcgccggtgcaatcacccgccgccgccagtgcatccgtccagggctgcacggccacctgtgcccactgggttgtgcggtcctaacgcaagttcggcgccgaccaccgccgaactgaagccgtctgcccacacccactcgcggcagcaccgccggacggctcccggcactgcgccagtgcgtgctgcctccggtatagcggctgccggatcccgccgcggcacctgcaggcactaatcactaacagttactgcactgttggtatgcgagtcctagtttgctgctcatgctctaagatatgaggtagttctgtgtgagggatttgaaagatggcgtcaaaaggtccccggtcaaggctagaccatgacacaagagctaggcgtcagaaggctcttgaagctccaagggagcctcgacggccaaaagttcactgggaccatgtccttgctgagatgttgtggctggcaaaggagtttgattctgagagaaaatggaagttgtccatggccaaaaagattgctcaaagagcaaataagagcatagttgatcaagcagcaaagggcgagagaaaacagaaggaggaagaacatagaatgcgaaaagttgccgttaatatttcaaaggatgtgaagaagttctggatcaaaatagaaaagctggttgtctataagcatcaactggagcttgaggagagaaagaagaaggcacttgataagcaacttgatttccttttaggtcagactgaaaggtattcaacaatgttggcggaaaaccttgtagatatgccctattctcaaaacctagaaaccgagacttcgcagataaaccaaccatcccatcaagaggtagtagcagaagagaacttaaacgcaaccattccggatgatcttgataatatggaagtcgatgatgattatgggagctccttggatgaagagccagaagatgatgagcacactatcgatgaggatgaagctcagattaccgaagctgagcgcaatgaagaactagctgctttagaggcagaagctgacctaccactggatgttattctcaagatgtatacaaaaaccaaagttactccgaaccaggctaatgggtgtgatcatgaacttgctcactcttcaagtgacgaaggcaattcttctgaggaagtggatgatggtcattcttatgctgagtttgtgaagaagaatcatggtaaaagtaatggaaatatttcttctatcaatgatcaggaggacgaagattacattgctgctgaagaagtaaaggatgacgaagcaactttgtccgaagaggaacaattggcaaagaaagaagatcctgatcatctggaagagattaagttactgcagaaggagagcgagataccactagaagaacttcttgcgaggtaccgagaggtacagttagattttccatttatttcttcgaacaacttactgtggtccatttgtaatacctttttttatatttaggatggctgtgcagatcatgaaacagctgagttggagaattcaccccattttgttgaagaggtcaataccgacaagtctttgaatgatcaatctgtgaacattttggaagcgaaaagtgatatttttgtggatcaccaatccagggatgtgctggaaactgagcacacgactctacaatcagaaattgcatcagagccttgtgctcaacaaaattttgtggaagagaataatctcactgatgttaagacagtcaatgaagataagagtgatgatgtaattgctgatgctgcagctgctgcaagatcagcacaaccaactggcaacaccttcttgactacaaaagtgcgcacaaaattcccattccttcttaagcattctcttcgtgaataccagcatatagggctggattggttagttgctatgtatgagaagaggcttaatggaattctagcagatgaaatgggtttaggcaagacaatcatgactatctccttgcttgcgcaccttgcgtgtgagaaggggatatggggtcctcatcttattgtcgtgccgactagtgttatgctaaattgggagactgaatttcttaagtggtgtcctgcttttaaaatactgacttatttcggaagtgcaaaggaaagaaagcagaagcgtcagggctggatgaaaccaaattacttccatgtttgcatcacaacatataggcttgtcattcaggattctaaagtgtttaagcgaaaaaagtggaagtatcttattcttgatgaggctcatctgataaagaactggaaatcacagcgttggcagacattgctcaacttcaattcaaagagacgtattcttctgactggaactccactgcaaaatgaccttatggaactttggtccctcatgcattttttgatgcctcatgtatttcagtctcatcaagagttcaaggattggttctgcaatccaatttccgggatggtggaaggtcaagataaagtaaacaaagaagttatagatcgattgcacaatgtccttcggccatttatactgcgtcgactgaaaagagatgttgagaaacagttaccaaagaagcatgagcatgtcatatattgccgactttctagaaggcaaaggaacttgtatgaagaatttgtcgctagctcagagacacaagcaaccctggcgagtgggaattattttggcatgataagcatcatcatgcaacttagaaaggtctgtaaccatccagatctttttgaaggtcggccaataataagctcatttgacatggctggtattaacatgcagctcagctattcagtctgcatgctccttgataagagtccattttctcaggtggacctgtctgatatgaattttgtgtttactcaaaatgaatttagcatgagttcctgggaagctgacgaggtcatctccgcctttccttcaagtatcacctccagggactgtgacctggatattttttgctctaataaggatcatcagggaagtaatttgacaaacatttttgaagatattcagaaagccctacaggaggagagaataaaggaatccagagaaagggcagcttctgttgcatggtggaatagagttagatgccaaaagagacctgtctatggcacaaacatgagacatgttttgactgtaaagcatcctgtatcaaatattcttaataagaggaacaatccattgtgccacatggactattcatcacgccttgcagatcttgttcttccatctgtggaacgctttcagaaaatgctttattttgttgaatcatttacattcgcaattccagctgctcgagctcctccccctgtttgctggtgcagcaaaggaaagtctcctgtttttattgatccagcatatagagaaaaatgcatgtacaagttttctcccattctgtctcctataaggtctgctatcgttcgtcgtcaagtctactttcctgataggcgtttgatccagtttgactgtgggaagttgcaggaacttgctattctgttaaggcgtttgaaatcagaaggccacagggccttgatatttactcagatgactaagatgcttgacgtcttggaagagttcataaatttatatgggtatacatatttgcgattagatggttctactcccccagaagagaggcagactctaatgcagaggttcaacacaaatccaaagtttttccttttcattttgtccacacgtagtggtggtgtgggaatcaaccttgtaggtgcagacactgttatcttctatgacagtgactggaaccctgcaatggaccaacaagcacaggacagatgccacaggattggtcagactcgtgaagttcacatatatagactcatcagtgaaagcactatagaggagaacattctcaagaaagcaaatcagaaacgagctcttgatgatttagtgatacaacgtggtagctacaatacggaattcttcaagaaacttgatcctatggagttcttttccgggcacacatctcttcgtgtggaaggtcaggagaagaattgctctacatccgtgggagcttcaaatgatgtggatctggctctgtcaattgcagatgttgaagcagctattagacaggcagaagatgaagctgactatatggctctcaagaagttggaggaggaagaagctgtggacaatcaagaattcagtgaggaggttgcgggcagaccagaggaggatgaattggttaatgaggaggatggaaaacctgatgagcacattaatgaagatcacaaatactactcttctgatgtagagaaggagaagcacattactttgtctaccaatcgattaaacaatgaaaaggctcttacattggctgttggtgatgaagatactgacatgcttgctgatgtgaaacagatggcagcagcagctgctgcagcagggcaagcatgttcatcttttgagaaccagctccggccaattgatagatatgcaatgcgctttatggaactctgggatccagtaattgacaaagctgctgtcaatcatcaagtaaatgttgaggaggaagaatgggagcttgatcgcattgaaaaactcaaagaggatttagaagcggaaattgatgaagaccaagaaccactatcgtatcaatcatgggatgttgattttgctacgacagcctatcggcaacatgttgaggctttaactcaaaagcagttgttggaagaacaggaaagacaggctcaggaagcagcaaaagagttggaagagaataatgataatatgagtcaccgcagaaagtcaaacaagaataaaaagaagactggcaaattcaagtcccagaaaagaccgcgtttgtcttctgaatcagaagtcattctggaggaaacctctgtagatacaatgagcattgatgacaatgcaccctcacctgagcttataagtgatgaatcgccacaccattattctaacaagcgtaagaagattatgtctgctactgaggaagatagtaacagcagaagtttaaaaaagtttaagaaaactaaatcaagttttatttctgagttgtcacctaggccgaaggaggaccttaatgattcagatccaaaatcagtggctagaactaaaagtgatggcagactttccatcccttgcatgccagtaaagcgtgttattgtgataaagcctgagagattgaaaaagaagggaatatggtctcgagattgtgcttcagactcatggacatctgaggaagatgcagttctttgtggaactgtgcatgagtatggtcctctttgggaactggcaagtgattttcttcactccttgccaggcgggtcctcctataggggaagatatcatcatcctttgcattgctgtgagagatacagagaacttttctgcaaatatgcaatatcagcaacagataattctaacagtgaaaaggctccttctgggactggaaaggctgtacttagagtatctgaggatcaagctcagatgttggtgaatgtgaccagtgaacttcccaacaatgaattgcttctccagaaacacttcatggctgtaatttcatctgtatggagatcaaaatgttgccgtcatccctgctgttttaggaataagcctggtggatcaagtgagaactggcccatggtaaactttagaccaagcgtcaatctagttagggaagcccttgcagctggtcaggctaagtttacgctaactgtgattccaccaccgtcaagaaaccaggaatactcacggaattatttagaattagagttagatttcttgaaagatcaacatgcctatgaggaagacttcccgtctgtactaaatgtatccatactggaaccagaatcatccaaacaggctccagagccagtggaacaatcattgttatctgaactttcatgtagacaggctgagaaccgactcaggatagcgtcagaagcttgttatgatggtgaaagttttcattgggcatcatcatctttccacataaatgatgctgcccgccacaaatctggtttgaagtctatagggaagcacaaagcagcatcggaatctggtagacctcccaaatccaaagtccagaagattactgaattgcatcaggaagggccaattgccatgagtaattttctctgtatgcctgctcaactattgccaagtacagctgacttccacattagtgactccctatctgactttggtatcaacgattatgaattcaactactctgaggatctcttgcaagagtttgacgccctcgagttcttcccagatcagggtgactctggtctccttggtattgaagagttagaacctctttcggatttcacagatatcggatgaacatagatgagcaaattatggttgatgggatgctgtcctataccaagaggagacaagatcgcctctggcaggagcccaaggatataggttgagttgctcaaccatgcacagatgtgctgcaagctttatcatggctggctggagcaaagctgctggcttggtgaggtcacattgatctgacaagcttgaggatgggtttgcactaatggcggcattgggtaatttccatacatgtaccaacagagaaggtaaaagaggaggccctcagcaccacccatttgttgctgtatatcgtgttcattctctgtttaatccaatgttgtttggctattttgccactgaaaacatctcacatgtcaagttggtggatgccatctctatcagaaatttaggatgtggcgccaatgtccaaagaatgatcagtcaagtgcagcttatcggcgcattatatttggtcaggaatcaatgcatgacatcaatatgatcagaactgctgttccagtttcatttgaggaatgcaatttctggtgattcgggatgcaagtttttcataggaggtaaagagcgtgggcatagttgtacatgtaataaaatgaataaggttctgtgaactctcggtctcggttatgccaattaatagccataatttgttgttagaggccagggggctttttgatcagcgggctgctgctgtgagccggtaacaatgtagctgattgtgcgcctccatattgttttcttggtaagtggactttgcatcactgccaagcaacgatgagatagagtaattggtctgtttcgcgcaaaaatactacgagcttgtattcagtcttgacctccagtaacctgaacgctgagaatgtttggccaaccacataatacgtaggctgactagctgagaatatctagctaatcccgtaatctgtaagctgagaatgtatggtgaatcccataatctgtaagctgagattgtttggccaatcaaggtcacaatgctgcctacaagctgagaatgtttggccaattaaggtctagctgatgtccttagcagaaaacaaaattttctaaacgcaaactgttttaataatagtaagaaaacagggctccacttatttgt

SEQ ID NO: 217452 - DNA, 7356 bp, Zea Mays
ctaaaggcctaaaccctagcctccttgctcctgcgctccggtcgccggtgcgtcccctcctccgctggccgccggcgccggtgcaatcacccgccgccgccagtgcatccgtccagggctgcacggccacctgtgcccactgggttgtgcggtcctaacgcaagttcggcgccgaccaccgccgaactgaagccgtctgcccacacccactcgcggcagcaccgccggacggctcccggcactgcgccagtgcgtgctgcctccggtatagcggctgccggatcccgccgcggcacctgcaggcactaatcactaacagttactgcactgttggtatgcgagtcctagtttgctgctcatgctctaagatatgaggtagttctgtgtgagggatttgaaagatggcgtcaaaaggtccccggtcaaggctagaccatgacacaagagctaggcgtcagaaggctcttgaagctccaagggagcctcgacggccaaaagttcactgggaccatgtccttgctgagatgttgtggctggcaaaggagtttgattctgagagaaaatggaagttgtccatggccaaaaagattgctcaaagagcaaataagagcatagttgatcaagcagcaaagggcgagagaaaacagaagggaaagcaggttgtctataagcatcaactggagcttgaggagagaaagaagaaggcacttgataagcaacttgatttccttttaggtcagactgaaaggtattcaacaatgttggcggaaaaccttgtagatatgccctattctcaaaacctagaaaccgagacttcgcagataaaccaaccatcccatcaagaggtagtagcagaagagaacttaaacgcaaccattccggatgatcttgataatatggaagtcgatgatgattatgggagctccttggatgaagagccagaagatgatgagcacactatcgatgaggatgaagctcagattaccgaagctgagcgcaatgaagaactagctgctttagaggcagaagctgacctaccactggatgttattctcaagatgtatacaaaaaccaaagttactccgaaccaggctaatgggtgtgatcatgaacttgctcactcttcaagtgacgaaggcaattcttctgaggaagtggatgatggtcattcttatgctgagtttgtgaagaagaatcatggtaaaagtaatggaaatatttcttctatcaatgatcaggaggacgaagattacattgctgctgaagaagtaaaggatgacgaagcaactttgtccgaagaggaacaattggcaaagaaagaagatcctgatcatctggaagagattaagttactgcagaaggagagcgagataccactagaagaacttcttgcgaggtaccgagaggatggctgtgcagatcatgaaacagctgagttggagaattcaccccattttgttgaagaggtcaataccgacaagtctttgaatgatcaatctgtgaacattttggaagcgaaaagtgatatttttgtggatcaccaatccagggatgtgctggaaactgagcacacgactctacaatcagaaattgcatcagagccttgtgctcaacaaaattttgtggaagagaataatctcactgatgttaagacagtcaatgaagataagagtgatgatgtaattgctgatgctgcagctgctgcaagatcagcacaaccaactggcaacaccttcttgactacaaaagtgcgcacaaaattcccattccttcttaagcattctcttcgtgaataccagcatatagggctggattggttagttgctatgtatgagaagaggcttaatggaattctagcagatgaaatgggtttaggcaagacaatcatgactatctccttgcttgcgcaccttgcgtgtgagaaggggatatggggtcctcatcttattgtcgtgccgactagtgttatgctaaattgggagactgaatttcttaagtggtgtcctgcttttaaaatactgacttatttcggaagtgcaaaggaaagaaagcagaagcgtcagggctggatgaaaccaaattacttccatgtttgcatcacaacatataggcttgtcattcaggattctaaagtgtttaagcgaaaaaagtggaagtatcttattcttgatgaggctcatctgataaagaactggaaatcacagcgttggcagacattgctcaacttcaattcaaagagacgtattcttctgactggaactccactgcaaaatgaccttatggaactttggtccctcatgcattttttgatgcctcatgtatttcagtctcatcaagagttcaaggattggttctgcaatccaatttccgggatggtggaaggtcaagataaagtaaacaaagaagttatagatcgattgcacaatgtccttcggccatttatactgcgtcgactgaaaagagatgttgagaaacagttaccaaagaagcatgagcatgtcatatattgccgactttctagaaggcaaaggaacttgtatgaagaatttgtcgctagctcagagacacaagcaaccctggcgagtgggaattattttggcatgataagcatcatcatgcaacttagaaaggtctgtaaccatccagatctttttgaaggtcggccaataataagctcatttgacatggctggtattaacatgcagctcagctattcagtctgcatgctccttgataagagtccattttctcaggtggacctgtctgatatgaattttgtgtttactcaaaatgaatttagcatgagttcctgggaagctgacgaggtcatctccgcctttccttcaagtatcacctccagggactgtgacctggatattttttgctctaataaggatcatcagggaagtaatttgacaaacatttttgaagatattcagaaagccctacaggaggagagaataaaggaatccagagaaagggcagcttctgttgcatggtggaatagagttagatgccaaaagagacctgtctatggcacaaacatgagacatgttttgactgtaaagcatcctgtatcaaatattcttaataagaggaacaatccattgtgccacatggactattcatcacgccttgcagatcttgttcttccatctgtggaacgctttcagaaaatgctttattttgttgaatcatttacattcgcaattccagctgctcgagctcctccccctgtttgctggtgcagcaaaggaaagtctcctgtttttattgatccagcatatagagaaaaatgcatgtacaagttttctcccattctgtctcctataaggtctgctatcgttcgtcgtcaagtctactttcctgataggcgtttgatccagtttgactgtgggaagttgcaggaacttgctattctgttaaggcgtttgaaatcagaaggccacagggccttgatatttactcagatgactaagatgcttgacgtcttggaagagttcataaatttatatgggtatacatatttgcgattagatggttctactcccccagaagagaggcagactctaatgcagaggttcaacacaaatccaaagtttttccttttcattttgtccacacgtagtggtggtgtgggaatcaaccttgtaggtgcagacactgttatcttctatgacagtgactggaaccctgcaatggaccaacaagcacaggacagatgccacaggattggtcagactcgtgaagttcacatatatagactcatcagtgaaagcactatagaggagaacattctcaagaaagcaaatcagaaacgagctcttgatgatttagtgatacaacgtggtagctacaatacggaattcttcaagaaacttgatcctatggagttcttttccgggcacacatctcttcgtgtggaaggtcaggagaagaattgctctacatccgtgggagcttcaaatgatgtggatctggctctgtcaattgcagatgttgaagcagctattagacaggcagaagatgaagctgactatatggctctcaagaagttggaggaggaagaagctgtggacaatcaagaattcagtgaggaggttgcgggcagaccagaggaggatgaattggttaatgaggaggatggaaaacctgatgagcacattaatgaagatcacaaatactactcttctgatgtagagaaggagaagcacattactttgtctaccaatcgattaaacaatgaaaaggctcttacattggctgttggtgatgaagatactgacatgcttgctgatgtgaaacagatggcagcagcagctgctgcagcagggcaagcatgttcatcttttgagaaccagctccggccaattgatagatatgcaatgcgctttatggaactctgggatccagtaattgacaaagctgctgtcaatcatcaagtaaatgttgaggaggaagaatgggagcttgatcgcattgaaaaactcaaagaggatttagaagcggaaattgatgaagaccaagaaccactatcgtatcaatcatgggatgttgattttgctacgacagcctatcggcaacatgttgaggctttaactcaaaagcagttgttggaagaacaggaaagacaggctcaggaagcagcaaaagagttggaagagaataatgataatatgagtcaccgcagaaagtcaaacaagaataaaaagaagactggcaaattcaagtcccagaaaagaccgcgtttgtcttctgaatcagaagtcattctggaggaaacctctgtagatacaatgagcattgatgacaatgcaccctcacctgagcttataagtgatgaatcgccacaccattattctaacaagcgtaagaagattatgtctgctactgaggaagatagtaacagcagaagtttaaaaaagtttaagaaaactaaatcaagttttatttctgagttgtcacctaggccgaaggaggaccttaatgattcagatccaaaatcagtggctagaactaaaagtgatggcagactttccatcccttgcatgccagtaaagcgtgttattgtgataaagcctgagagattgaaaaagaagggaatatggtctcgagattgtgcttcagactcatggacatctgaggaagatgcagttctttgtggaactgtgcatgagtatggtcctctttgggaactggcaagtgattttcttcactccttgccaggcgggtcctcctataggggaagatatcatcatcctttgcattgctgtgagagatacagagaacttttctgcaaatatgcaatatcagcaacagataattctaacagtgaaaaggctccttctgggactggaaaggctgtacttagagtatctgaggatcaagctcagatgttggtgaatgtgaccagtgaacttcccaacaatgaattgcttctccagaaacacttcatggctgtaatttcatctgtatggagatcaaaatgttgccgtcatccctgctgttttaggaataagcctggtggatcaagtgagaactggcccatggtaaactttagaccaagcgtcaatctagttagggaagcccttgcagctggtcaggctaagtttacgctaactgtgattccaccaccgtcaagaaaccaggaatactcacggaattatttagaattagagttagatttcttgaaagatcaacatgcctatgaggaagacttcccgtctgtactaaatgtatccatactggaaccagaatcatccaaacaggctccagagccagtggaacaatcattgttatctgaactttcatgtagacaggctgagaaccgactcaggatagcgtcagaagcttgttatgatggtgaaagttttcattgggcatcatcatctttccacataaatgatgctgcccgccacaaatctggtttgaagtctatagggaagcacaaagcagcatcggaatctggtagacctcccaaatccaaagtccagaagattactgaattgcatcaggaagggccaattgccatgagtaattttctctgtatgcctgctcaactattgccaagtacagctgacttccacattagtgactccctatctgactttggtatcaacgattatgaattcaactactctgaggatctcttgcaagagtttgacgccctcgagttcttcccagatcagggtgactctggtctccttggtattgaagagttagaacctctttcggatttcacagatatcggatgaacatagatgagcaaattatggttgatgggatgctgtcctataccaagaggagacaagatcgcctctggcaggagcccaaggatataggttgagttgctcaaccatgcacagatgtgctgcaagctttatcatggctggctggagcaaagctgctggcttggtgaggtcacattgatctgacaagcttgaggatgggtttgcactaatggcggcattgggtaccaacagagaaggtaaaagaggaggccctcagcaccacccatttgttgctgtatatcgtgttcattctctgtttaatccaatgttgtttggctattttgccactgaaaacatctcacatgtcaagttggtggatgccatctctatcagaaatttaggatgtggcgccaatgtccaaagaatgatcagtcaagtgcagcttatcggcgcattatatttggtcaggaatcaatgcatgacatcaatatgatcagaactgctgttccagtttcatttgaggaatgcaatttctggtgattcgggatgcaagtttttcataggaggtaaagagcgtgggcatagttgtacatgtaataaaatgaataaggttctgtgaactctcggtctcggttatgccaattaatagccataatttgttgttagaggccagggggctttttgatcagcgggctgctgctgtgagccggtaacaatgtagctgattgtgcgcctccatattgttttcttggtaagtggactttgcatcactgccaagcaacgatgagatagagtaattggtctgtttcgcgcaaaaatactacgagcttgtattcagtcttgacctccagtaacctgaacgctgagaatgtttggccaaccacataatacgtaggctgactagctgagaatatctagctaatcccgtaatctgtaagctgagaatgtatggtgaatcccataatctgtaagctgagattgtttggccaatcaaggtcacaatgctgcctacaagctgagaatgtttggccaattaaggtctagctgatgtccttagcagaaaacaaaattttctaaacgcaaactgttttaataatagtaagaaaacagggctccacttatttgt

SEQ ID NO: 217453 - DNA, 7638 bp, Zea Mays
ctcgcagtcgcgactcgcctcctccgcgccgttccccattcatcctaaaggcctaaaccctagcctccttgctcctgcgctccggtcgccggtgcgtcccctcctccgctggccgccggcgccggtgcaatcacccgccgccgccagtgcatccgtccagggctgcacggccacctgtgcccactgggttgtgcggtcctaacgcaagttcggcgccgaccaccgccgaactgaagccgtctgcccacacccactcgcggcagcaccgccggacggctcccggcactgcgccagtgcgtgctgcctccggtatagcggctgccggatcccgccgcggcacctgcaggcactaatcactaacagttactgcactgttggtatgcgagtcctagtttgctgctcatgctctaagatatgaggtagttctgtgtgagggatttgaaagatggcgtcaaaaggtccccggtcaaggctagaccatgacacaagagctaggcgtcagaaggctcttgaagctccaagggagcctcgacggccaaaagttcactgggaccatgtccttgctgagatgttgtggctggcaaaggagtttgattctgagagaaaatggaagttgtccatggccaaaaagattgctcaaagagcaaataagagcatagttgatcaagcagcaaagggcgagagaaaacagaaggaggaagaacatagaatgcgaaaagttgccgttaatatttcaaaggatgtgaagaagttctggatcaaaatagaaaagctggcaagttcatttttatcttctaatgtcattgttaactgtgacactactttggatatttcttttttgaagaaaactgagctatattttgcaacttcatttttatcttctaatgtcatgggaaagcaggttgtctataagcatcaactggagcttgaggagagaaagaagaaggcacttgataagcaacttgatttccttttaggtcagactgaaaggtattcaacaatgttggcggaaaaccttgtagatatgccctattctcaaaacctagaaaccgagacttcgcagataaaccaaccatcccatcaagaggtagtagcagaagagaacttaaacgcaaccattccggatgatcttgataatatggaagtcgatgatgattatgggagctccttggatgaagagccagaagatgatgagcacactatcgatgaggatgaagctcagattaccgaagctgagcgcaatgaagaactagctgctttagaggcagaagctgacctaccactggatgttattctcaagatgtatacaaaaaccaaagttactccgaaccaggctaatgggtgtgatcatgaacttgctcactcttcaagtgacgaaggcaattcttctgaggaagtggatgatggtcattcttatgctgagtttgtgaagaagaatcatggtaaaagtaatggaaatatttcttctatcaatgatcaggaggacgaagattacattgctgctgaagaagtaaaggatgacgaagcaactttgtccgaagaggaacaattggcaaagaaagaagatcctgatcatctggaagagattaagttactgcagaaggagagcgagataccactagaagaacttcttgcgaggtaccgagaggatggctgtgcagatcatgaaacagctgagttggagaattcaccccattttgttgaagagggatgtgctggaaactgagcacacgactctacaatcagaaattgcatcagagccttgtgctcaacaaaattttgtggaagagaataatctcactgatgttaagacagtcaatgaagataagagtgatgatgtaattgctgatgctgcagctgctgcaagatcagcacaaccaactggcaacaccttcttgactacaaaagtgcgcacaaaattcccattccttcttaagcattctcttcgtgaataccagcatatagggctggattggttagttgctatgtatgagaagaggcttaatggaattctagcagatgaaatgggtttaggcaagacaatcatgactatctccttgcttgcgcaccttgcgtgtgagaaggggatatggggtcctcatcttattgtcgtgccgactagtgttatgctaaattgggagactgaatttcttaagtggtgtcctgcttttaaaatactgacttatttcggaagtgcaaaggaaagaaagcagaagcgtcagggctggatgaaaccaaattacttccatgtttgcatcacaacatataggcttgtcattcaggattctaaagtgtttaagcgaaaaaagtggaagtatcttattcttgatgaggctcatctgataaagaactggaaatcacagcgttggcagacattgctcaacttcaattcaaagagacgtattcttctgactggaactccactgcaaaatgaccttatggaactttggtccctcatgcattttttgatgcctcatgtatttcagtctcatcaagagttcaaggattggttctgcaatccaatttccgggatggtggaaggtcaagataaagtaaacaaagaagttatagatcgattgcacaatgtccttcggccatttatactgcgtcgactgaaaagagatgttgagaaacagttaccaaagaagcatgagcatgtcatatattgccgactttctagaaggcaaaggaacttgtatgaagaatttgtcgctagctcagagacacaagcaaccctggcgagtgggaattattttggcatgataagcatcatcatgcaacttagaaaggtctgtaaccatccagatctttttgaaggtcggccaataataagctcatttgacatggctggtattaacatgcagctcagctattcagtctgcatgctccttgataagagtccattttctcaggtggacctgtctgatatgaattttgtgtttactcaaaatgaatttagcatgagttcctgggaagctgacgaggtcatctccgcctttccttcaagtatcacctccagggactgtgacctggatattttttgctctaataaggatcatcagggaagtaatttgacaaacatttttgaagatattcagaaagccctacaggaggagagaataaaggaatccagagaaagggcagcttctgttgcatggtggaatagagttagatgccaaaagagacctgtctatggcacaaacatgagacatgttttgactgtaaagcatcctgtatcaaatattcttaataagaggaacaatccattgtgccacatggactattcatcacgccttgcagatcttgttcttccatctgtggaacgctttcagaaaatgctttattttgttgaatcatttacattcgcaattccagctgctcgagctcctccccctgtttgctggtgcagcaaaggaaagtctcctgtttttattgatccagcatatagagaaaaatgcatgtacaagttttctcccattctgtctcctataaggtctgctatcgttcgtcgtcaagtctactttcctgataggcgtttgatccagtttgactgtgggaagttgcaggaacttgctattctgttaaggcgtttgaaatcagaaggccacagggccttgatatttactcagatgactaagatgcttgacgtcttggaagagttcataaatttatatgggtatacatatttgcgattagatggttctactcccccagaagagaggcagactctaatgcagaggttcaacacaaatccaaagtttttccttttcattttgtccacacgtagtggtggtgtgggaatcaaccttgtaggtgcagacactgttatcttctatgacagtgactggaaccctgcaatggaccaacaagcacaggacagatgccacaggattggtcagactcgtgaagttcacatatatagactcatcagtgaaagcactatagaggagaacattctcaagaaagcaaatcagaaacgagctcttgatgatttagtgatacaacgtggtagctacaatacggaattcttcaagaaacttgatcctatggagttcttttccgggcacacatctcttcgtgtggaaggtcaggagaagaattgctctacatccgtgggagcttcaaatgatgtggatctggctctgtcaattgcagatgttgaagcagctattagacaggcagaagatgaagctgactatatggctctcaagaagttggaggaggaagaagctgtggacaatcaagaattcagtgaggaggttgcgggcagaccagaggaggatgaattggttaatgaggaggatggaaaacctgatgagcacattaatgaagatcacaaatactactcttctgatgtagagaaggagaagcacattactttgtctaccaatcgattaaacaatgaaaaggctcttacattggctgttggtgatgaagatactgacatgcttgctgatgtgaaacagatggcagcagcagctgctgcagcagggcaagcatgttcatcttttgagaaccagctccggccaattgatagatatgcaatgcgctttatggaactctgggatccagtaattgacaaagctgctgtcaatcatcaagtaaatgttgaggaggaagaatgggagcttgatcgcattgaaaaactcaaagaggatttagaagcggaaattgatgaagaccaagaaccactatcgtatcaatcatgggatgttgattttgctacgacagcctatcggcaacatgttgaggctttaactcaaaagcagttgttggaagaacaggaaagacaggctcaggaagcagcaaaagagttggaagagaataatgataatatgagcagtcaccgcagaaagtcaaacaagaataaaaagaagactggcaaattcaagtcccagaaaagaccgcgtttgtcttctgaatcagaagtcattctggaggaaacctctgtagatacaatgagcattgatgacaatgcaccctcacctgagcttataagtgatgaatcgccacaccattattctaacaagcgtaagaagattatgtctgctactgaggaagatagtaacagcagaagtttaaaaaagtttaagaaaactaaatcaagttttatttctgagttgtcacctaggccgaaggaggaccttaatgattcagatccaaaatcagtggctagaactaaaagtgatggcagactttccatcccttgcatgccagtaaagcgtgttattgtgataaagcctgagagattgaaaaagaagggaatatggtctcgagattgtgcttcagactcatggacatctgaggaagatgcagttctttgtggaactgtgcatgagtatggtcctctttgggaactggcaagtgattttcttcactccttgccaggcgggtcctcctataggggaagatatcatcatcctttgcattgctgtgagagatacagagaacttttctgcaaatatgcaatatcagcaacagataattctaacagtgaaaaggctccttctgggactggaaaggctgtacttagagtatctgaggatcaagctcagatgttggtgaatgtgaccagtgaacttcccaacaatgaattgcttctccagaaacacttcatggctgtaatttcatctgtatggagatcaaaatgttgccgtcatccctgctgttttaggaataagcctggtggatcaagtgagaactggcccatggtaaactttagaccaagcgtcaatctagttagggaagcccttgcagctggtcaggctaagtttacgctaactgtgattccaccaccgtcaagaaaccaggaatactcacggaattatttagaattagagttagatttcttgaaagatcaacatgcctatgaggaagacttcccgtctgtactaaatgtatccatactggaaccagaatcatccaaacaggctccagagccagtggaacaatcattgttatctgaactttcatgtagacaggctgagaaccgactcaggatagcgtcagaagcttgttatgatggtgaaagttttcattgggcatcatcatctttccacataaatgatgctgcccgccacaaatctggtttgaagtctatagggaagcacaaagcagcatcggaatctggtagacctcccaaatccaaagtccagaagattactgaattgcatcaggaagggccaattgccatgagtaattttctctgtatgcctgctcaactattgccaagtacagctgacttccacattagtgactccctatctgactttggtatcaacgattatgaattcaactactctgaggatctcttgcaagagtttgacgccctcgagttcttcccagatcagggtgactctggtctccttggtattgaagagttagaacctctttcggatttcacagatatcggatgaacatagatgagcaaattatggttgatgggatgctgtcctataccaagaggagacaagatcgcctctggcaggagcccaaggatataggttgagttgctcaaccatgcacagatgtgctgcaagctttatcatggctggctggagcaaagctgctggcttggtgaggtcacattgatctgacaagcttgaggatgggtttgcactaatggcggcattgggtaatttccatacatgtatgtatattggtagtctagaattgtaggatgtagaaatgcttccctcatttgtgtttgagggtagaccttgtaactcgaccacattgaaattttgttgagcaggtaccaacagagaaggtaaaagaggaggccctcagcaccacccatttgttgctgtatatcgtgttcattctctgtttaatccaatgttgtttggctattttgccactgaaaacatctcacatgtcaagttggtggatgccatctctatcagaaatttaggatgtggcgccaatgtccaaagaatgatcagtcaagtgcagcttatcggcgcattatatttggtcaggaatcaatgcatgacatcaatatgatcagaactgctgttccagtttcatttgaggaatgcaatttctggtgattcgggatgcaagtttttcataggaggtaaagagcgtgggcatagttgtacatgtaataaaatgaataaggttctgtgaactctcggtctcggttatgccaattaatagccataatttgttgttagaggccagggggctttttgatcagcgggctgctgctgtgagccggtaacaatgtagctgattgtgcgcctccatattgttttcttggtaagtggactttgcatcactgccaagcaacgatgagatagagtaattggtctgtttcgcgcaaaaatactacgagcttgtattcagtcttgacctccagtaacctgaacgctgagaatgtttggccaaccacataatacgtaggctgactagctgagaatatctagctaatcccgtaatctgtaagctgagaatgtatggtgaatcccataatctgtaagctgagattgtttggccaatcaaggtcacaatgctgcctacaagctgagaatgtttggccaattaaggtctagctgatgtccttagcagaaaacaaaattttctaaacgcaaactgttttaataatagtaagaaaacagggctccacttatttgt

SEQ ID NO: 217454 - DNA, 7732 bp, Zea Mays
cttcgatgccccccctcgcagtcgcgactcgcctcctccgcgccgttccccattcatcctaaaggcctaaaccctagcctccttgctcctgcgctccggtcgccggtgcgtcccctcctccgctggccgccggcgccggtgcaatcacccgccgccgccagtgcatccgtccagggctgcacggccacctgtgcccactgggttgtgcggtcctaacgcaagttcggcgccgaccaccgccgaactgaagccgtctgcccacacccactcgcggcagcaccgccggacggctcccggcactgcgccagtgcgtgctgcctccggtatagcggctgccggatcccgccgcggcacctgcagcaatctgaaggcatactgcactgtctgctcttcaacacattgggcacatatttctctgggtcattgatttttttgtttaacccaaaactatggggctacaaccttccagcgtgatcaatttttacaactgcaataggattttcatgtacaagcagactacaaagaacttggggggacacagaaactgaaatggctacgtcagttccttttccttgctactcactacatattgctagatttctgcaggcactaatcactaacagttactgcactgttggtatgcgagtcctagtttgctgctcatgctctaagatatgaggtagttctgtgtgagggatttgaaagatggcgtcaaaaggtccccggtcaaggctagaccatgacacaagagctaggcgtcagaaggctcttgaagctccaagggagcctcgacggccaaaagttcactgggaccatgtccttgctgagatgttgtggctggcaaaggagtttgattctgagagaaaatggaagttgtccatggccaaaaagattgctcaaagagcaaataagagcatagttgatcaagcagcaaagggcgagagaaaacagaaggaggaagaacatagaatgcgaaaagttgccgttaatatttcaaaggatgtgaagaagttctggatcaaaatagaaaagctggttgtctataagcatcaactggagcttgaggagagaaagaagaaggcacttgataagcaacttgatttccttttaggtcagactgaaaggtattcaacaatgttggcggaaaaccttgtagatatgccctattctcaaaacctagaaaccgagacttcgcagataaaccaaccatcccatcaagaggtagtagcagaagagaacttaaacgcaaccattccggatgatcttgataatatggaagtcgatgatgattatgggagctccttggatgaagagccagaagatgatgagcacactatcgatgaggatgaagctcagattaccgaagctgagcgcaatgaagaactagctgctttagaggcagaagctgacctaccactggatgttattctcaagatgtatacaaaaaccaaagttactccgaaccaggctaatgggtgtgatcatgaacttgctcactcttcaagtgacgaaggcaattcttctgaggaagtggatgatggtcattcttatgctgagtttgtgaagaagaatcatggtaaaagtaatggaaatatttcttctatcaatgatcaggaggacgaagattacattgctgctgaagaagtaaaggatgacgaagcaactttgtccgaagaggaacaattggcaaagaaagaagatcctgatcatctggaagagattaagttactgcagaaggagagcgagataccactagaagaacttcttgcgaggtaccgagaggatggctgtgcagatcatgaaacagctgagttggagaattcaccccattttgttgaagaggtcaataccgacaagtctttgaatgatcaatctgtgaacattttggaagcgaaaagtgatatttttgtggatcaccaatccagggatgtgctggaaactgagcacacgactctacaatcagaaattgcatcagagccttgtgctcaacaaaattttgtggaagagaataatctcactgatgttaagacagtcaatgaagataagagtgatgatgtaattgctgatgctgcagctgctgcaagatcagcacaaccaactggcaacaccttcttgactacaaaagtgcgcacaaaattcccattccttcttaagcattctcttcgtgaataccagcatatagggctggattggttagttgctatgtatgagaagaggcttaatggaattctagcagatgaaatgggtttaggcaagacaatcatgactatctccttgcttgcgcaccttgcgtgtgagaaggggatatggggtcctcatcttattgtcgtgccgactagtgttatgctaaattgggagactgaatttcttaagtggtgtcctgcttttaaaatactgacttatttcggaagtgcaaaggaaagaaagcagaagcgtcagggctggatgaaaccaaattacttccatgtttgcatcacaacatataggcttgtcattcaggattctaaagtgtttaagcgaaaaaagtggaagtatcttattcttgatgaggctcatctgataaagaactggaaatcacagcgttggcagacattgctcaacttcaattcaaagagacgtattcttctgactggaactccactgcaaaatgaccttatggaactttggtccctcatgcattttttgatgcctcatgtatttcagtctcatcaagagttcaaggattggttctgcaatccaatttccgggatggtggaaggtcaagataaagtaaacaaagaagttatagatcgattgcacaatgtccttcggccatttatactgcgtcgactgaaaagagatgttgagaaacagttaccaaagaagcatgagcatgtcatatattgccgactttctagaaggcaaaggaacttgtatgaagaatttgtcgctagctcagagacacaagcaaccctggcgagtgggaattattttggcatgataagcatcatcatgcaacttagaaaggtctgtaaccatccagatctttttgaaggtcggccaataataagctcatttgacatggctggtattaacatgcagctcagctattcagtctgcatgctccttgataagagtccattttctcaggtggacctgtctgatatgaattttgtgtttactcaaaatgaatttagcatgagttcctgggaagctgacgaggtcatctccgcctttccttcaagtatcacctccagggactgtgacctggatattttttgctctaataaggatcatcagggaagtaatttgacaaacatttttgaagatattcagaaagccctacaggaggagagaataaaggaatccagagaaagggcagcttctgttgcatggtggaatagagttagatgccaaaagagacctgtctatggcacaaacatgagacatgttttgactgtaaagcatcctgtatcaaatattcttaataagaggaacaatccattgtgccacatggactattcatcacgccttgcagatcttgttcttccatctgtggaacgctttcagaaaatgctttattttgttgaatcatttacattcgcaattccagctgctcgagctcctccccctgtttgctggtgcagcaaaggaaagtctcctgtttttattgatccagcatatagagaaaaatgcatgtacaagttttctcccattctgtctcctataaggtctgctatcgttcgtcgtcaagtctactttcctgataggcgtttgatccagtttgactgtgggaagttgcaggaacttgctattctgttaaggcgtttgaaatcagaaggccacagggccttgatatttactcagatgactaagatgcttgacgtcttggaagagttcataaatttatatgggtatacatatttgcgattagatggttctactcccccagaagagaggcagactctaatgcagaggttcaacacaaatccaaagtttttccttttcattttgtccacacgtagtggtggtgtgggaatcaaccttgtaggtgcagacactgttatcttctatgacagtgactggaaccctgcaatggaccaacaagcacaggacagatgccacaggattggtcagactcgtgaagttcacatatatagactcatcagtgaaagcactatagaggagaacattctcaagaaagcaaatcagaaacgagctcttgatgatttagtgatacaacgtggtagctacaatacggaattcttcaagaaacttgatcctatggagttcttttccgggcacacatctcttcgtgtggaaggtcaggagaagaattgctctacatccgtgggagcttcaaatgatgtggatctggctctgtcaattgcagatgttgaagcagctattagacaggcagaagatgaagctgactatatggctctcaagaagttggaggaggaagaagctgtggacaatcaagaattcagtgaggaggttgcgggcagaccagaggaggatgaattggttaatgaggaggatggaaaacctgatgagcacattaatgaagatcacaaatactactcttctgatgtagagaaggagaagcacattactttgtctaccaatcgattaaacaatgaaaaggctcttacattggctgttggtgatgaagatactgacatgcttgctgatgtgaaacagatggcagcagcagctgctgcagcagggcaagcatgttcatcttttgagaaccagctccggccaattgatagatatgcaatgcgctttatggaactctgggatccagtaattgacaaagctgctgtcaatcatcaagtaaatgttgaggaggaagaatgggagcttgatcgcattgaaaaactcaaagaggatttagaagcggaaattgatgaagaccaagaaccactatcgtatcaatcatgggatgttgattttgctacgacagcctatcggcaacatgttgaggctttaactcaaaagcagttgttggaagaacaggaaagacaggctcaggaagcagcaaaagagttggaagagaataatgataatatgagtcaccgcagaaagtcaaacaagaataaaaagaagactggcaaattcaagtcccagaaaagaccgcgtttgtcttctgaatcagaagtcattctggaggaaacctctgtagatacaatgagcattgatgacaatgcaccctcacctgagcttataagtgatgaatcgccacaccattattctaacaagcgtaagaagattatgtctgctactgaggaagatagtaacagcagaagtttaaaaaagtttaagaaaactaaatcaagttttatttctgagttgtcacctaggccgaaggaggaccttaatgattcagatccaaaatcagtggctagaactaaaagtgatggcagactttccatcccttgcatgccagtaaagcgtgttattgtgataaagcctgagagattgaaaaagaagggaatatggtctcgagattgtgcttcagactcatggacatctgaggaagatgcagttctttgtggaactgtgcatgagtatggtcctctttgggaactggcaagtgattttcttcactccttgccaggcgggtcctcctataggggaagatatcatcatcctttgcattgctgtgagagatacagagaacttttctgcaaatatgcaatatcagcaacagataattctaacagtgaaaaggctccttctgggactggaaaggctgtacttagagtatctgaggatcaagctcagatgttggtgaatgtgaccagtgaacttcccaacaatgaattgcttctccagaaacacttcatggctgtaatttcatctgtatggagatcaaaatgttgccgtcatccctgctgttttaggaataagcctggtggatcaagtgagaactggcccatggtaaactttagaccaagcgtcaatctagttagggaagcccttgcagctggtcaggctaagtttacgctaactgtgattccaccaccgtcaagaaaccaggaatactcacggaattatttagaattagagttagatttcttgaaagatcaacatgcctatgaggaagacttcccgtctgtactaaatgtatccatactggaaccagaatcatccaaacaggctccagagccagtggaacaatcattgttatctgaactttcatgtagacaggctgagaaccgactcaggatagcgtcagaagcttgttatgatggtgaaagttttcattgggcatcatcatctttccacataaatgatgctgcccgccacaaatctggtttgaagtctatagggaagcacaaagcagcatcggaatctggtagacctcccaaatccaaagtccagaagattactgaattgcatcaggaagggccaattgccatgagtaattttctctgtatgcctgctcaactattgccaagtacagctgacttccacattagtgactccctatctgactttggtatcaacgattatgaattcaactactctgaggatctcttgcaagagtttgacgccctcgagttcttcccagatcagggtgactctggtctccttggtattgaagagttagaacctctttcggatttcacagatatcggatgaacatagatgagcaaattatggttgatgggatgctgtcctataccaagaggagacaagatcgcctctggcaggagcccaaggatataggttgagttgctcaaccatgcacagatgtgctgcaagctttatcatggctggctggagcaaagctgctggcttggtgaggtcacattgatctgacaagcttgaggatgggtttgcactaatggcggcattgggtaccaacagagaaggtaaaagaggaggccctcagcaccacccatttgttgctgtatatcgtgttcattctctgtttaatccaatgttgtttggctattttgccactgaaaacatctcacatgtcaagttggtggatgccatctctatcagaaatttaggatgtggcgccaatgtccaaagaatgatcagtcaagtgcagcttatcggcgcattatatttggtcaggaatcaatgcatgacatcaatatgatcagaactgctgttccagtttcatttgaggaatgcaatttctggtgattcgggatgcaagtttttcataggaggtaaagagcgtgggcatagttgtacatgtaataaaatgaataaggttctgtgaactctcggtctcggttatgccaattaatagccataatttgttgttagaggccagggggctttttgatcagcgggctgctgctgtgagccggtaacaatgtagctgattgtgcgcctccatattgttttcttggtaagtggactttgcatcactgccaagcaacgatgagatagagtaattggtctgtttcgcgcaaaaatactacgagcttgtattcagtcttgacctccagtaacctgaacgctgagaatgtttggccaaccacataatacgtaggctgactagctgagaatatctagctaatcccgtaatctgtaagctgagaatgtatggtgaatcccataatctgtaagctgagattgtttggccaatcaaggtcacaatgctgcctacaagctgagaatgtttggccaattaaggtctagctgatgtccttagcagaaaacaaaattttctaaacgcaaactgttttaataatagtaagaaaacagggctccacttatttgt

SEQ ID NO: 217455 - DNA, 7667 bp, Zea Mays
cttcgatgccccccctcgcagtcgcgactcgcctcctccgcgccgttccccattcatcctaaaggcctaaaccctagcctccttgctcctgcgctccggtcgccggtgcgtcccctcctccgctggccgccggcgccggtgcaatcacccgccgccgccagtgcatccgtccagggctgcacggccacctgtgcccactgggttgtgcggtcctaacgcaagttcggcgccgaccaccgccgaactgaagccgtctgcccacacccactcgcggcagcaccgccggacggctcccggcactgcgccagtgcgtgctgcctccggtatagcggctgccggatcccgccgcggcacctgcagcaatctgaaggcatactgcactgtctgctcttcaacacattgggcacatatttctctgggtcattgatttttttgtttaacccaaaactatggggctacaaccttccagcgtgatcaatttttacaactgcaataggattttcatgtacaagcagactacaaagaacttggggggacacagaaactgaaatggctacgtcagttccttttccttgctactcactacatattgctagatttctgcaggcactaatcactaacagttactgcactgttggtatgcgagtcctagtttgctgctcatgctctaagatatgaggtagttctgtgtgagggatttgaaagatggcgtcaaaaggtccccggtcaaggctagaccatgacacaagagctaggcgtcagaaggctcttgaagctccaagggagcctcgacggccaaaagttcactgggaccatgtccttgctgagatgttgtggctggcaaaggagtttgattctgagagaaaatggaagttgtccatggccaaaaagattgctcaaagagcaaataagagcatagttgatcaagcagcaaagggcgagagaaaacagaaggaggaagaacatagaatgcgaaaagttgccgttaatatttcaaaggatgtgaagaagttctggatcaaaatagaaaagctggttgtctataagcatcaactggagcttgaggagagaaagaagaaggcacttgataagcaacttgatttccttttaggtcagactgaaaggtattcaacaatgttggcggaaaaccttgtagatatgccctattctcaaaacctagaaaccgagacttcgcagataaaccaaccatcccatcaagaggtagtagcagaagagaacttaaacgcaaccattccggatgatcttgataatatggaagtcgatgatgattatgggagctccttggatgaagagccagaagatgatgagcacactatcgatgaggatgaagctcagattaccgaagctgagcgcaatgaagaactagctgctttagaggcagaagctgacctaccactggatgttattctcaagatgtatacaaaaaccaaagttactccgaaccaggctaatgggtgtgatcatgaacttgctcactcttcaagtgacgaaggcaattcttctgaggaagtggatgatggtcattcttatgctgagtttgtgaagaagaatcatggtaaaagtaatggaaatatttcttctatcaatgatcaggaggacgaagattacattgctgctgaagaagtaaaggatgacgaagcaactttgtccgaagaggaacaattggcaaagaaagaagatcctgatcatctggaagagattaagttactgcagaaggagagcgagataccactagaagaacttcttgcgaggtaccgagaggatggctgtgcagatcatgaaacagctgagttggagaattcaccccattttgttgaagagggatgtgctggaaactgagcacacgactctacaatcagaaattgcatcagagccttgtgctcaacaaaattttgtggaagagaataatctcactgatgttaagacagtcaatgaagataagagtgatgatgtaattgctgatgctgcagctgctgcaagatcagcacaaccaactggcaacaccttcttgactacaaaagtgcgcacaaaattcccattccttcttaagcattctcttcgtgaataccagcatatagggctggattggttagttgctatgtatgagaagaggcttaatggaattctagcagatgaaatgggtttaggcaagacaatcatgactatctccttgcttgcgcaccttgcgtgtgagaaggggatatggggtcctcatcttattgtcgtgccgactagtgttatgctaaattgggagactgaatttcttaagtggtgtcctgcttttaaaatactgacttatttcggaagtgcaaaggaaagaaagcagaagcgtcagggctggatgaaaccaaattacttccatgtttgcatcacaacatataggcttgtcattcaggattctaaagtgtttaagcgaaaaaagtggaagtatcttattcttgatgaggctcatctgataaagaactggaaatcacagcgttggcagacattgctcaacttcaattcaaagagacgtattcttctgactggaactccactgcaaaatgaccttatggaactttggtccctcatgcattttttgatgcctcatgtatttcagtctcatcaagagttcaaggattggttctgcaatccaatttccgggatggtggaaggtcaagataaagtaaacaaagaagttatagatcgattgcacaatgtccttcggccatttatactgcgtcgactgaaaagagatgttgagaaacagttaccaaagaagcatgagcatgtcatatattgccgactttctagaaggcaaaggaacttgtatgaagaatttgtcgctagctcagagacacaagcaaccctggcgagtgggaattattttggcatgataagcatcatcatgcaacttagaaaggtctgtaaccatccagatctttttgaaggtcggccaataataagctcatttgacatggctggtattaacatgcagctcagctattcagtctgcatgctccttgataagagtccattttctcaggtggacctgtctgatatgaattttgtgtttactcaaaatgaatttagcatgagttcctgggaagctgacgaggtcatctccgcctttccttcaagtatcacctccagggactgtgacctggatattttttgctctaataaggatcatcagggaagtaatttgacaaacatttttgaagatattcagaaagccctacaggaggagagaataaaggaatccagagaaagggcagcttctgttgcatggtggaatagagttagatgccaaaagagacctgtctatggcacaaacatgagacatgttttgactgtaaagcatcctgtatcaaatattcttaataagaggaacaatccattgtgccacatggactattcatcacgccttgcagatcttgttcttccatctgtggaacgctttcagaaaatgctttattttgttgaatcatttacattcgcaattccagctgctcgagctcctccccctgtttgctggtgcagcaaaggaaagtctcctgtttttattgatccagcatatagagaaaaatgcatgtacaagttttctcccattctgtctcctataaggtctgctatcgttcgtcgtcaagtctactttcctgataggcgtttgatccagtttgactgtgggaagttgcaggaacttgctattctgttaaggcgtttgaaatcagaaggccacagggccttgatatttactcagatgactaagatgcttgacgtcttggaagagttcataaatttatatgggtatacatatttgcgattagatggttctactcccccagaagagaggcagactctaatgcagaggttcaacacaaatccaaagtttttccttttcattttgtccacacgtagtggtggtgtgggaatcaaccttgtaggtgcagacactgttatcttctatgacagtgactggaaccctgcaatggaccaacaagcacaggacagatgccacaggattggtcagactcgtgaagttcacatatatagactcatcagtgaaagcactatagaggagaacattctcaagaaagcaaatcagaaacgagctcttgatgatttagtgatacaacgtggtagctacaatacggaattcttcaagaaacttgatcctatggagttcttttccgggcacacatctcttcgtgtggaaggtcaggagaagaattgctctacatccgtgggagcttcaaatgatgtggatctggctctgtcaattgcagatgttgaagcagctattagacaggcagaagatgaagctgactatatggctctcaagaagttggaggaggaagaagctgtggacaatcaagaattcagtgaggaggttgcgggcagaccagaggaggatgaattggttaatgaggaggatggaaaacctgatgagcacattaatgaagatcacaaatactactcttctgatgtagagaaggagaagcacattactttgtctaccaatcgattaaacaatgaaaaggctcttacattggctgttggtgatgaagatactgacatgcttgctgatgtgaaacagatggcagcagcagctgctgcagcagggcaagcatgttcatcttttgagaaccagctccggccaattgatagatatgcaatgcgctttatggaactctgggatccagtaattgacaaagctgctgtcaatcatcaagtaaatgttgaggaggaagaatgggagcttgatcgcattgaaaaactcaaagaggatttagaagcggaaattgatgaagaccaagaaccactatcgtatcaatcatgggatgttgattttgctacgacagcctatcggcaacatgttgaggctttaactcaaaagcagttgttggaagaacaggaaagacaggctcaggaagcagcaaaagagttggaagagaataatgataatatgagcagtcaccgcagaaagtcaaacaagaataaaaagaagactggcaaattcaagtcccagaaaagaccgcgtttgtcttctgaatcagaagtcattctggaggaaacctctgtagatacaatgagcattgatgacaatgcaccctcacctgagcttataagtgatgaatcgccacaccattattctaacaagcgtaagaagattatgtctgctactgaggaagatagtaacagcagaagtttaaaaaagtttaagaaaactaaatcaagttttatttctgagttgtcacctaggccgaaggaggaccttaatgattcagatccaaaatcagtggctagaactaaaagtgatggcagactttccatcccttgcatgccagtaaagcgtgttattgtgataaagcctgagagattgaaaaagaagggaatatggtctcgagattgtgcttcagactcatggacatctgaggaagatgcagttctttgtggaactgtgcatgagtatggtcctctttgggaactggcaagtgattttcttcactccttgccaggcgggtcctcctataggggaagatatcatcatcctttgcattgctgtgagagatacagagaacttttctgcaaatatgcaatatcagcaacagataattctaacagtgaaaaggctccttctgggactggaaaggctgtacttagagtatctgaggatcaagctcagatgttggtgaatgtgaccagtgaacttcccaacaatgaattgcttctccagaaacacttcatggctgtaatttcatctgtatggagatcaaaatgttgccgtcatccctgctgttttaggaataagcctggtggatcaagtgagaactggcccatggtaaactttagaccaagcgtcaatctagttagggaagcccttgcagctggtcaggctaagtttacgctaactgtgattccaccaccgtcaagaaaccaggaatactcacggaattatttagaattagagttagatttcttgaaagatcaacatgcctatgaggaagacttcccgtctgtactaaatgtatccatactggaaccagaatcatccaaacaggctccagagccagtggaacaatcattgttatctgaactttcatgtagacaggctgagaaccgactcaggatagcgtcagaagcttgttatgatggtgaaagttttcattgggcatcatcatctttccacataaatgatgctgcccgccacaaatctggtttgaagtctatagggaagcacaaagcagcatcggaatctggtagacctcccaaatccaaagtccagaagattactgaattgcatcaggaagggccaattgccatgagtaattttctctgtatgcctgctcaactattgccaagtacagctgacttccacattagtgactccctatctgactttggtatcaacgattatgaattcaactactctgaggatctcttgcaagagtttgacgccctcgagttcttcccagatcagggtgactctggtctccttggtattgaagagttagaacctctttcggatttcacagatatcggatgaacatagatgagcaaattatggttgatgggatgctgtcctataccaagaggagacaagatcgcctctggcaggagcccaaggatataggttgagttgctcaaccatgcacagatgtgctgcaagctttatcatggctggctggagcaaagctgctggcttggtgaggtcacattgatctgacaagcttgaggatgggtttgcactaatggcggcattgggtaatttccatacatgtaccaacagagaaggtaaaagaggaggccctcagcaccacccatttgttgctgtatatcgtgttcattctctgtttaatccaatgttgtttggctattttgccactgaaaacatctcacatgtcaagttggtggatgccatctctatcagaaatttaggatgtggcgccaatgtccaaagaatgatcagtcaagtgcagcttatcggcgcattatatttggtcaggaatcaatgcatgacatcaatatgatcagaactgctgttccagtttcatttgaggaatgcaatttctggtgattcgggatgcaagtttttcataggaggtaaagagcgtgggcatagttgtacatgtaataaaatgaataaggttctgtgaactctcggtctcggttatgccaattaatagccataatttgttgttagaggccagggggctttttgatcagcgggctgctgctgtgagccggtaacaatgtagctgattgtgcgcctccatattgttttcttggtaagtggactttgcatcactgccaagcaacgatgagatagagtaattggtctgtttcgcgcaaaaatactacgagcttgtattcagtcttgacctccagtaacctgaacgctgagaatgtttggccaaccacataatacgtaggctgactagctgagaatatctagctaatcccgtaatctgtaagctgagaatgtatggtgaatcccataatctgtaagctgagattgtttggccaatcaaggtcacaatgctgcctacaagctgagaatgtttggccaattaaggtctagctgatgtccttagcagaaaacaaaattttctaaacgcaaactgttttaataatagtaagaaaacagggctccacttatttgt

SEQ ID NO: 217456 - DNA, 7653 bp, Zea Mays
ctcgatgcgtcatgcctcatgcgactctgtctcccaaggccccgacgcccgtccgcccgtcgcgttgcttcgatgccccccctcgcagtcgcgactcgcctcctccgcgccgttccccattcatcctaaaggcctaaaccctagcctccttgctcctgcgctccggtcgccggtgcgtcccctcctccgctggccgccggcgccggtgcaatcacccgccgccgccagtgcatccgtccagggctgcacggccacctgtgcccactgggttgtgcggtcctaacgcaagttcggcgccgaccaccgccgaactgaagccgtctgcccacacccactcgcggcagcaccgccggacggctcccggcactgcgccagtgcgtgctgcctccggtatagcggctgccggatcccgccgcggcacctgcagatttctgcaggcactaatcactaacagttactgcactgttggtatgcgagtcctagtttgctgctcatgctctaagatatgaggtagttctgtgtgagggatttgaaagatggcgtcaaaaggtccccggtcaaggctagaccatgacacaagagctaggcgtcagaaggctcttgaagctccaagggagcctcgacggccaaaagttcactgggaccatgtccttgctgagatgttgtggctggcaaaggagtttgattctgagagaaaatggaagttgtccatggccaaaaagattgctcaaagagcaaataagagcatagttgatcaagcagcaaagggcgagagaaaacagaaggaggaagaacatagaatgcgaaaagttgccgttaatatttcaaaggatgtgaagaagttctggatcaaaatagaaaagctggttgtctataagcatcaactggagcttgaggagagaaagaagaaggcacttgataagcaacttgatttccttttaggtcagactgaaaggtattcaacaatgttggcggaaaaccttgtagatatgccctattctcaaaacctagaaaccgagacttcgcagataaaccaaccatcccatcaagaggtagtagcagaagagaacttaaacgcaaccattccggatgatcttgataatatggaagtcgatgatgattatgggagctccttggatgaagagccagaagatgatgagcacactatcgatgaggatgaagctcagattaccgaagctgagcgcaatgaagaactagctgctttagaggcagaagctgacctaccactggatgttattctcaagatgtatacaaaaaccaaagttactccgaaccaggctaatgggtgtgatcatgaacttgctcactcttcaagtgacgaaggcaattcttctgaggaagtggatgatggtcattcttatgctgagtttgtgaagaagaatcatggtaaaagtaatggaaatatttcttctatcaatgatcaggaggacgaagattacattgctgctgaagaagtaaaggatgacgaagcaactttgtccgaagaggaacaattggcaaagaaagaagatcctgatcatctggaagagattaagttactgcagaaggagagcgagataccactagaagaacttcttgcgaggtaccgagaggtacagttagattttccatttatttcttcgaacaacttactgtggtccatttgtaatacctttttttatatttaggatggctgtgcagatcatgaaacagctgagttggagaattcaccccattttgttgaagaggtcaataccgacaagtctttgaatgatcaatctgtgaacattttggaagcgaaaagtgatatttttgtggatcaccaatccagggatgtgctggaaactgagcacacgactctacaatcagaaattgcatcagagccttgtgctcaacaaaattttgtggaagagaataatctcactgatgttaagacagtcaatgaagataagagtgatgatgtaattgctgatgctgcagctgctgcaagatcagcacaaccaactggcaacaccttcttgactacaaaagtgcgcacaaaattcccattccttcttaagcattctcttcgtgaataccagcatatagggctggattggttagttgctatgtatgagaagaggcttaatggaattctagcagatgaaatgggtttaggcaagacaatcatgactatctccttgcttgcgcaccttgcgtgtgagaaggggatatggggtcctcatcttattgtcgtgccgactagtgttatgctaaattgggagactgaatttcttaagtggtgtcctgcttttaaaatactgacttatttcggaagtgcaaaggaaagaaagcagaagcgtcagggctggatgaaaccaaattacttccatgtttgcatcacaacatataggcttgtcattcaggattctaaagtgtttaagcgaaaaaagtggaagtatcttattcttgatgaggctcatctgataaagaactggaaatcacagcgttggcagacattgctcaacttcaattcaaagagacgtattcttctgactggaactccactgcaaaatgaccttatggaactttggtccctcatgcattttttgatgcctcatgtatttcagtctcatcaagagttcaaggattggttctgcaatccaatttccgggatggtggaaggtcaagataaagtaaacaaagaagttatagatcgattgcacaatgtccttcggccatttatactgcgtcgactgaaaagagatgttgagaaacagttaccaaagaagcatgagcatgtcatatattgccgactttctagaaggcaaaggaacttgtatgaagaatttgtcgctagctcagagacacaagcaaccctggcgagtgggaattattttggcatgataagcatcatcatgcaacttagaaaggtctgtaaccatccagatctttttgaaggtcggccaataataagctcatttgacatggctggtattaacatgcagctcagctattcagtctgcatgctccttgataagagtccattttctcaggtggacctgtctgatatgaattttgtgtttactcaaaatgaatttagcatgagttcctgggaagctgacgaggtcatctccgcctttccttcaagtatcacctccagggactgtgacctggatattttttgctctaataaggatcatcagggaagtaatttgacaaacatttttgaagatattcagaaagccctacaggaggagagaataaaggaatccagagaaagggcagcttctgttgcatggtggaatagagttagatgccaaaagagacctgtctatggcacaaacatgagacatgttttgactgtaaagcatcctgtatcaaatattcttaataagaggaacaatccattgtgccacatggactattcatcacgccttgcagatcttgttcttccatctgtggaacgctttcagaaaatgctttattttgttgaatcatttacattcgcaattccagctgctcgagctcctccccctgtttgctggtgcagcaaaggaaagtctcctgtttttattgatccagcatatagagaaaaatgcatgtacaagttttctcccattctgtctcctataaggtctgctatcgttcgtcgtcaagtctactttcctgataggcgtttgatccagtttgactgtgggaagttgcaggaacttgctattctgttaaggcgtttgaaatcagaaggccacagggccttgatatttactcagatgactaagatgcttgacgtcttggaagagttcataaatttatatgggtatacatatttgcgattagatggttctactcccccagaagagaggcagactctaatgcagaggttcaacacaaatccaaagtttttccttttcattttgtccacacgtagtggtggtgtgggaatcaaccttgtaggtgcagacactgttatcttctatgacagtgactggaaccctgcaatggaccaacaagcacaggacagatgccacaggattggtcagactcgtgaagttcacatatatagactcatcagtgaaagcactatagaggagaacattctcaagaaagcaaatcagaaacgagctcttgatgatttagtgatacaacgtggtagctacaatacggaattcttcaagaaacttgatcctatggagttcttttccgggcacacatctcttcgtgtggaaggtcaggagaagaattgctctacatccgtgggagcttcaaatgatgtggatctggctctgtcaattgcagatgttgaagcagctattagacaggcagaagatgaagctgactatatggctctcaagaagttggaggaggaagaagctgtggacaatcaagaattcagtgaggaggttgcgggcagaccagaggaggatgaattggttaatgaggaggatggaaaacctgatgagcacattaatgaagatcacaaatactactcttctgatgtagagaaggagaagcacattactttgtctaccaatcgattaaacaatgaaaaggctcttacattggctgttggtgatgaagatactgacatgcttgctgatgtgaaacagatggcagcagcagctgctgcagcagggcaagcatgttcatcttttgagaaccagctccggccaattgatagatatgcaatgcgctttatggaactctgggatccagtaattgacaaagctgctgtcaatcatcaagtaaatgttgaggaggaagaatgggagcttgatcgcattgaaaaactcaaagaggatttagaagcggaaattgatgaagaccaagaaccactatcgtatcaatcatgggatgttgattttgctacgacagcctatcggcaacatgttgaggctttaactcaaaagcagttgttggaagaacaggaaagacaggctcaggaagcagcaaaagagttggaagagaataatgataatatgagtcaccgcagaaagtcaaacaagaataaaaagaagactggcaaattcaagtcccagaaaagaccgcgtttgtcttctgaatcagaagtcattctggaggaaacctctgtagatacaatgagcattgatgacaatgcaccctcacctgagcttataagtgatgaatcgccacaccattattctaacaagcgtaagaagattatgtctgctactgaggaagatagtaacagcagaagtttaaaaaagtttaagaaaactaaatcaagttttatttctgagttgtcacctaggccgaaggaggaccttaatgattcagatccaaaatcagtggctagaactaaaagtgatggcagactttccatcccttgcatgccagtaaagcgtgttattgtgataaagcctgagagattgaaaaagaagggaatatggtctcgagattgtgcttcagactcatggacatctgaggaagatgcagttctttgtggaactgtgcatgagtatggtcctctttgggaactggcaagtgattttcttcactccttgccaggcgggtcctcctataggggaagatatcatcatcctttgcattgctgtgagagatacagagaacttttctgcaaatatgcaatatcagcaacagataattctaacagtgaaaaggctccttctgggactggaaaggctgtacttagagtatctgaggatcaagctcagatgttggtgaatgtgaccagtgaacttcccaacaatgaattgcttctccagaaacacttcatggctgtaatttcatctgtatggagatcaaaatgttgccgtcatccctgctgttttaggaataagcctggtggatcaagtgagaactggcccatggtaaactttagaccaagcgtcaatctagttagggaagcccttgcagctggtcaggctaagtttacgctaactgtgattccaccaccgtcaagaaaccaggaatactcacggaattatttagaattagagttagatttcttgaaagatcaacatgcctatgaggaagacttcccgtctgtactaaatgtatccatactggaaccagaatcatccaaacaggctccagagccagtggaacaatcattgttatctgaactttcatgtagacaggctgagaaccgactcaggatagcgtcagaagcttgttatgatggtgaaagttttcattgggcatcatcatctttccacataaatgatgctgcccgccacaaatctggtttgaagtctatagggaagcacaaagcagcatcggaatctggtagacctcccaaatccaaagtccagaagattactgaattgcatcaggaagggccaattgccatgagtaattttctctgtatgcctgctcaactattgccaagtacagctgacttccacattagtgactccctatctgactttggtatcaacgattatgaattcaactactctgaggatctcttgcaagagtttgacgccctcgagttcttcccagatcagggtgactctggtctccttggtattgaagagttagaacctctttcggatttcacagatatcggatgaacatagatgagcaaattatggttgatgggatgctgtcctataccaagaggagacaagatcgcctctggcaggagcccaaggatataggttgagttgctcaaccatgcacagatgtgctgcaagctttatcatggctggctggagcaaagctgctggcttggtgaggtcacattgatctgacaagcttgaggatgggtttgcactaatggcggcattgggtaatttccatacatgtaccaacagagaaggtaaaagaggaggccctcagcaccacccatttgttgctgtatatcgtgttcattctctgtttaatccaatgttgtttggctattttgccactgaaaacatctcacatgtcaagttggtggatgccatctctatcagaaatttaggatgtggcgccaatgtccaaagaatgatcagtcaagtgcagcttatcggcgcattatatttggtcaggaatcaatgcatgacatcaatatgatcagaactgctgttccagtttcatttgaggaatgcaatttctggtgattcgggatgcaagtttttcataggaggtaaagagcgtgggcatagttgtacatgtaataaaatgaataaggttctgtgaactctcggtctcggttatgccaattaatagccataatttgttgttagaggccagggggctttttgatcagcgggctgctgctgtgagccggtaacaatgtagctgattgtgcgcctccatattgttttcttggtaagtggactttgcatcactgccaagcaacgatgagatagagtaattggtctgtttcgcgcaaaaatactacgagcttgtattcagtcttgacctccagtaacctgaacgctgagaatgtttggccaaccacataatacgtaggctgactagctgagaatatctagctaatcccgtaatctgtaagctgagaatgtatggtgaatcccataatctgtaagctgagattgtttggccaatcaaggtcacaatgctgcctacaagctgagaatgtttggccaattaaggtctagctgatgtccttagcagaaaacaaaattttctaaacgcaaactgttttaataatagtaagaaaacagggctccacttatttgt

SEQ ID NO: 217457 - DNA, 7871 bp, Zea Mays
gtcaatacacggcccatccgccctggtcctcagcccaatctcccatcgtctcgatgactcgatgcgtcatgcctcatgcgactctgtctcccaaggccccgacgcccgtccgcccgtcgcgttgcttcgatgccccccctcgcagtcgcgactcgcctcctccgcgccgttccccattcatcctaaaggcctaaaccctagcctccttgctcctgcgctccggtcgccggtgcgtcccctcctccgctggccgccggcgccggtgcaatcacccgccgccgccagtgcatccgtccagggctgcacggccacctgtgcccactgggttgtgcggtcctaacgcaagttcggcgccgaccaccgccgaactgaagccgtctgcccacacccactcgcggcagcaccgccggacggctcccggcactgcgccagtgcgtgctgcctccggtatagcggctgccggatcccgccgcggcacctgcagcaatctgaaggcatactgcactgtctgctcttcaacacattgggcacatatttctctgggtcattgatttttttgtttaacccaaaactatggggctacaaccttccagcgtgatcaatttttacaactgcaataggattttcatgtacaagcagactacaaagaacttggggggacacagaaactgaaatggctacgtcagttccttttccttgctactcactacatattgctagatttctgcaggcactaatcactaacagttactgcactgttggtatgcgagtcctagtttgctgctcatgctctaagatatgaggtagttctgtgtgagggatttgaaagatggcgtcaaaaggtccccggtcaaggctagaccatgacacaagagctaggcgtcagaaggctcttgaagctccaagggagcctcgacggccaaaagttcactgggaccatgtccttgctgagatgttgtggctggcaaaggagtttgattctgagagaaaatggaagttgtccatggccaaaaagattgctcaaagagcaaataagagcatagttgatcaagcagcaaagggcgagagaaaacagaaggaggaagaacatagaatgcgaaaagttgccgttaatatttcaaaggatgtgaagaagttctggatcaaaatagaaaagctggttgtctataagcatcaactggagcttgaggagagaaagaagaaggcacttgataagcaacttgatttccttttaggtcagactgaaaggtattcaacaatgttggcggaaaaccttgtagatatgccctattctcaaaacctagaaaccgagacttcgcagataaaccaaccatcccatcaagaggtagtagcagaagagaacttaaacgcaaccattccggatgatcttgataatatggaagtcgatgatgattatgggagctccttggatgaagagccagaagatgatgagcacactatcgatgaggatgaagctcagattaccgaagctgagcgcaatgaagaactagctgctttagaggcagaagctgacctaccactggatgttattctcaagatgtatacaaaaaccaaagttactccgaaccaggctaatgggtgtgatcatgaacttgctcactcttcaagtgacgaaggcaattcttctgaggaagtggatgatggtcattcttatgctgagtttgtgaagaagaatcatggtaaaagtaatggaaatatttcttctatcaatgatcaggaggacgaagattacattgctgctgaagaagtaaaggatgacgaagcaactttgtccgaagaggaacaattggcaaagaaagaagatcctgatcatctggaagagattaagttactgcagaaggagagcgagataccactagaagaacttcttgcgaggtaccgagaggatggctgtgcagatcatgaaacagctgagttggagaattcaccccattttgttgaagaggtcaataccgacaagtctttgaatgatcaatctgtgaacattttggaagcgaaaagtgatatttttgtggatcaccaatccagggatgtgctggaaactgagcacacgactctacaatcagaaattgcatcagagccttgtgctcaacaaaattttgtggaagagaataatctcactgatgttaagacagtcaatgaagataagagtgatgatgtaattgctgatgctgcagctgctgcaagatcagcacaaccaactggcaacaccttcttgactacaaaagtgcgcacaaaattcccattccttcttaagcattctcttcgtgaataccagcatatagggctggattggttagttgctatgtatgagaagaggcttaatggaattctagcagatgaaatgggtttaggcaagacaatcatgactatctccttgcttgcgcaccttgcgtgtgagaaggggatatggggtcctcatcttattgtcgtgccgactagtgttatgctaaattgggagactgaatttcttaagtggtgtcctgcttttaaaatactgacttatttcggaagtgcaaaggaaagaaagcagaagcgtcagggctggatgaaaccaaattacttccatgtttgcatcacaacatataggcttgtcattcaggattctaaagtgtttaagcgaaaaaagtggaagtatcttattcttgatgaggctcatctgataaagaactggaaatcacagcgttggcagacattgctcaacttcaattcaaagagacgtattcttctgactggaactccactgcaaaatgaccttatggaactttggtccctcatgcattttttgatgcctcatgtatttcagtctcatcaagagttcaaggattggttctgcaatccaatttccgggatggtggaaggtcaagataaagtaaacaaagaagttatagatcgattgcacaatgtccttcggccatttatactgcgtcgactgaaaagagatgttgagaaacagttaccaaagaagcatgagcatgtcatatattgccgactttctagaaggcaaaggaacttgtatgaagaatttgtcgctagctcagagacacaagcaaccctggcgagtgggaattattttggcatgataagcatcatcatgcaacttagaaaggtctgtaaccatccagatctttttgaaggtcggccaataataagctcatttgacatggctggtattaacatgcagctcagctattcagtctgcatgctccttgataagagtccattttctcaggtggacctgtctgatatgaattttgtgtttactcaaaatgaatttagcatgagttcctgggaagctgacgaggtcatctccgcctttccttcaagtatcacctccagggactgtgacctggatattttttgctctaataaggatcatcagggaagtaatttgacaaacatttttgaagatattcagaaagccctacaggaggagagaataaaggaatccagagaaagggcagcttctgttgcatggtggaatagagttagatgccaaaagagacctgtctatggcacaaacatgagacatgttttgactgtaaagcatcctgtatcaaatattcttaataagaggaacaatccattgtgccacatggactattcatcacgccttgcagatcttgttcttccatctgtggaacgctttcagaaaatgctttattttgttgaatcatttacattcgcaattccagctgctcgagctcctccccctgtttgctggtgcagcaaaggaaagtctcctgtttttattgatccagcatatagagaaaaatgcatgtacaagttttctcccattctgtctcctataaggtctgctatcgttcgtcgtcaagtctactttcctgataggcgtttgatccagtttgactgtgggaagttgcaggaacttgctattctgttaaggcgtttgaaatcagaaggccacagggccttgatatttactcagatgactaagatgcttgacgtcttggaagagttcataaatttatatgggtatacatatttgcgattagatggttctactcccccagaagagaggcagactctaatgcagaggttcaacacaaatccaaagtttttccttttcattttgtccacacgtagtggtggtgtgggaatcaaccttgtaggtgcagacactgttatcttctatgacagtgactggaaccctgcaatggaccaacaagcacaggacagatgccacaggattggtcagactcgtgaagttcacatatatagactcatcagtgaaagcactatagaggagaacattctcaagaaagcaaatcagaaacgagctcttgatgatttagtgatacaacgtggtagctacaatacggaattcttcaagaaacttgatcctatggagttcttttccgggcacacatctcttcgtgtggaaggtcaggagaagaattgctctacatccgtgggagcttcaaatgatgtggatctggctctgtcaattgcagatgttgaagcagctattagacaggcagaagatgaagctgactatatggctctcaagaagttggaggaggaagaagctgtggacaatcaagaattcagtgaggaggttgcgggcagaccagaggaggatgaattggttaatgaggaggatggaaaacctgatgagcacattaatgaagatcacaaatactactcttctgatgtagagaaggagaagcacattactttgtctaccaatcgattaaacaatgaaaaggctcttacattggctgttggtgatgaagatactgacatgcttgctgatgtgaaacagatggcagcagcagctgctgcagcagggcaagcatgttcatcttttgagaaccagctccggccaattgatagatatgcaatgcgctttatggaactctgggatccagtaattgacaaagctgctgtcaatcatcaagtaaatgttgaggaggaagaatgggagcttgatcgcattgaaaaactcaaagaggatttagaagcggaaattgatgaagaccaagaaccactatcgtatcaatcatgggatgttgattttgctacgacagcctatcggcaacatgttgaggctttaactcaaaagcagttgttggaagaacaggaaagacaggctcaggaagcagcaaaagagttggaagagaataatgataatatgagtcaccgcagaaagtcaaacaagaataaaaagaagactggcaaattcaagtcccagaaaagaccgcgtttgtcttctgaatcagaagtcattctggaggaaacctctgtagatacaatgagcattgatgacaatgcaccctcacctgagcttataagtgatgaatcgccacaccattattctaacaagcgtaagaagattatgtctgctactgaggaagatagtaacagcagaagtttaaaaaagtttaagaaaactaaatcaagttttatttctgagttgtcacctaggccgaaggaggaccttaatgattcagatccaaaatcagtggctagaactaaaagtgatggcagactttccatcccttgcatgccagtaaagcgtgttattgtgataaagcctgagagattgaaaaagaagggaatatggtctcgagattgtgcttcagactcatggacatctgaggaagatgcagttctttgtggaactgtgcatgagtatggtcctctttgggaactggcaagtgattttcttcactccttgccaggcgggtcctcctataggggaagatatcatcatcctttgcattgctgtgagagatacagagaacttttctgcaaatatgcaatatcagcaacagataattctaacagtgaaaaggctccttctgggactggaaaggctgtacttagagtatctgaggatcaagctcagatgttggtgaatgtgaccagtgaacttcccaacaatgaattgcttctccagaaacacttcatggctgtaatttcatctgtatggagatcaaaatgttgccgtcatccctgctgttttaggaataagcctggtggatcaagtgagaactggcccatggtaaactttagaccaagcgtcaatctagttagggaagcccttgcagctggtcaggctaagtttacgctaactgtgattccaccaccgtcaagaaaccaggaatactcacggaattatttagaattagagttagatttcttgaaagatcaacatgcctatgaggaagacttcccgtctgtactaaatgtatccatactggaaccagaatcatccaaacaggctccagagccagtggaacaatcattgttatctgaactttcatgtagacaggctgagaaccgactcaggatagcgtcagaagcttgttatgatggtgaaagttttcattgggcatcatcatctttccacataaatgatgctgcccgccacaaatctggtttgaagtctatagggaagcacaaagcagcatcggaatctggtagacctcccaaatccaaagtccagaagattactgaattgcatcaggaagggccaattgccatgagtaattttctctgtatgcctgctcaactattgccaagtacagctgacttccacattagtgactccctatctgactttggtatcaacgattatgaattcaactactctgaggatctcttgcaagagtttgacgccctcgagttcttcccagatcagggtgactctggtctccttggtattgaagagttagaacctctttcggatttcacagatatcggatgaacatagatgagcaaattatggttgatgggatgctgtcctataccaagaggagacaagatcgcctctggcaggagcccaaggatataggttgagttgctcaaccatgcacagatgtgctgcaagctttatcatggctggctggagcaaagctgctggcttggtgaggtcacattgatctgacaagcttgaggatgggtttgcactaatggcggcattgggtaatttccatacatgtaccaacagagaaggtaaaagaggaggccctcagcaccacccatttgttgctgtatatcgtgttcattctctgtttaatccaatgttgtttggctattttgccactgaaaacatctcacatgtcaagttggtggatgccatctctatcagaaatttaggatgtggcgccaatgtccaaagaatgatcagtcaagtgcagcttatcggcgcattatatttggtcaggaatcaatgcatgacatcaatatgatcagaactgctgttccagtttcatttgaggaatgcaatttctggtgattcgggatgcaagtttttcataggaggtaaagagcgtgggcatagttgtacatgtaataaaatgaataaggttctgtgaactctcggtctcggttatgccaattaatagccataatttgttgttagaggccagggggctttttgatcagcgggctgctgctgtgagccggtaacaatgtagctgattgtgcgcctccatattgttttcttggtaagtggactttgcatcactgccaagcaacgatgagatagagtaattggtctgtttcgcgcaaaaatactacgagcttgtattcagtcttgacctccagtaacctgaacgctgagaatgtttggccaaccacataatacgtaggctgactagctgagaatatctagctaatcccgtaatctgtaagctgagaatgtatggtgaatcccataatctgtaagctgagattgtttggccaatcaaggtcacaatgctgcctacaagctgagaatgtttggccaattaaggtctagctgatgtccttagcagaaaacaaaattttctaaacgcaaactgttttaataatagtaagaaaacagggctccacttatttgt

SEQ ID NO: 217458 - DNA, 3289 bp, Zea Mays
gcacaatataatccaataagcggtaataatacaatactcctcctgccctccacaccccgcggctggactggacttggaggtctggactctggagagggcgccagacgcaagtggccaggccagtcgacccacaatcccactccccatttgattagaagctcctgtgcagctgcagcaccctgcataatctattttgttcttgccctagcccccacctagcgctcgcacgccatggcgtggccgtggtcaccgccgccgcggcaaaccgcgcgcttcgtcgtcgtcgtcgtcgtcgccgtcgttcttctcttcgctgctgccccgtggccccgtgcggccgcccaggccgggtaccacgtcgtgtcggtgtcagggacggggggccaactgtcggcgcggctggagctcaccggcgccggccagaaggcagagctcgggcccgacgttcgcaggctcagcctcaccgcgagccttgagacggacagccggttgcacgttcgcatcaccgacgcggatcaccggagatgggaggtccctcagagcgtcatcccccgcgaggcgccgcgggacgacgtgcccctggaagcgagcacgggagcctcgccgccgcacagccgcgtcctctccgcggcgacctccgacctggccttcaccctccacgcctccccgttccgcttcaccgtgtcccgccgctccagcggcgacgccctcttcgacacctccgcggcgctggtcttcaaggacaggtacctggagctgaccacggcgctgccgccggagggcggggcgtcgctgtacgggctaggcgagcacaccaagcgcacgttccggctgcagcgcaacgacacgttcacgatgtggaacgccgacatcccggccgccaacgcggacgtcaacctgtacggctcccacccgttctacctcgacgtgcgccacgccggcgccgcgcacggcgtgctcctgctcaacagcaacggcatggacgtcgagtacggcggctcctacctcacctacaaggtcatcggcggcgtgctcgacctgtacttcttcgccggcccctccccgctcgacgtcgtcgaccagtacacccagctcatcggccgtccggcccccatgccgtactggtctttcgggttccaccagtgcaggtacgggtacaagaacctggctgacctggagggcgtggtggccgggtacgccaaggccaggatcccgctagaggtgatgtggacggacatcgactacatggacgcgttcaaggacttcacgctggatccggtgaacttcccggccggcccgatgcggcagttcgtcgaccgcctccaccggaacggccagaaatacgtcgtcattatagacccagggatcagcgtgaacgagacatacgggacgtacgtgcgagggatgcagcaggacgtgttcctgaagcggaacggcaccaactacctcggcaaggtgtggcccgggtacgtctacttcccggacttcctcaacccgcgcgccgccgagttctgggcgcgcgagatcgccctgttccggcggacgctccccgtcgacggcctctggatcgacatgaacgaggtctccaacttcgtcgacccggcgcccctcaacgcgctggacgacccgccgtaccgcatcaacaactccggcgtgcaccgccccatcaacaacaagaccacgccggcgtccgcggtgcactacggcggcgtgcgcgactacgacgcacacaacctctacggcttcctggaggcgcgagccacgcacggcgcgctgctcgccgacaccggccgccggcccttcgtgctcagccggtccacgttcgtggggtccggccggtacaccgcgcactggaccggagacaacgccgccacgtgggacgacctccgctactccatcaacaccatgctcagcttcggcctcttcggcatccccatggtcggcgctgacatctgcggcttcggcggcaacacaaccgaggagctctgcagccgctggatccaggtacaagctttccatgcactccaagaccagcatgccatgtccactgacatgtatgagctgagctttcgttgtttgctcgtgaagcttggcgcgttctacccgttcgcaagggaccattcggcgatcggcacggtccggcgcgagctgtacctgtgggagctggtggcgcggtcggcgaggaaggcgctcgggctgcgctaccggctgcttccgtacatgtacacgctgatgtacgaggcgcacaccacgggagcgcccatcgcgcggccgctcttcttctcctaccccaaggacgaggccacgtatggcgtggaccggcagttcctgctggggcgcggcgtgctcgtgtcgccggtgctcgagcccggtgccaccaccgtcgaagcctacttcccggccgggcggtggttcagcctctttgaccacgaggtcgtcgtcgcctcggcgacgggcaagcacgtcaccctcccggggcccgcggacacggtcaacgtacacgtggccggcggcaacatcctgccgctacagctgccggagctgacgacgtcgcgcgcgcgccagaccgcgttccacctcctggtcgcgctcgccgaggacggatccgcatccggggagctgttcctcgacggcggcgacttgccggagatggccgggccgcggggcgagtggagtctggtgcggttcagctgcacgcaggggcgcgacggggttaagctcatgtcgcacgtggtgcacgacgcgtacgggccgagccggaagctggtcatcggcaaggtgatgttcctgggactgccctcgctggcgccaccgggagagttcgccgtgtatgtcaacggcgttaagatggccaactcgactggcgcgacgctagggtatcaaaggcgcggagcactcggcgccgctcaagtggaggggttgtcgctggtcgtcgtcgaggagttcgagctcaaggtggtcacgtcgtcataacgtgacactcaagctcgttctgaataaaatctgatcaaaagtctaaatttaaattggaaataaaggaattgtgagtgcaatatagcaaaaaatgtgcaatgagattcgtgtcctctacccggattgagccctaacgcgcataatgaacatccggcccaaatatggaggcctaaatcaatgattgcaaattgggcttgcaaaaggctttatggcttggcacgtcatcggaaggaaacagtttagtccacgatggagactttttaatgtgttaacccttcttctatactaggagtacacttaaagcatcagtttcaac

SEQ ID NO: 217459 - DNA, 3215 bp, Zea Mays
cccgttagtgctcatcatcccaaaagcgcatcgccttttgctcttctgacgttggatcgcgcatggcatcccgtcccgtccccttttgagtgccgtgaggatccaggtgcacgcgccgacgccgtgcatgtgggtggaccgtggacgtcgtcgatgtgccttctccgcttcccgtgcccgcaaaaccacccagccgtggaggacacgctgtctgtggccctgcagactgcagtgcacagacccgatccttccagctcgcgactccactccatttcatttccgatttctgtttaaaagagcccccgcagtgtcctgcactgtcttgttctaggcctagctagctagccctccagctcgcacacatgccatggcgctgtcgtggtcgcccgccgtcgtcgtcttcctcctcctcctgttgctcctccctgccccatggccccgcgcggccgcccaggccggccggtaccacgccgtgtcggtgtccagggcaggaggccagctgtccgcgcggctggagctcgccggcgccggcgccggcggccaaaagccggagctcgggcccgatgtccagaggctcagcctgaccgcgagccttgagacggacagccggttgcacgttcgcatcaccgacgcggatcaccggagatgggaggtccctcagagcgtcatcccccgcgaggcgccgcgggacgacgtgcccctggaagcgagcacgggagcctcgccgccgcacagccgcgtcctctccgcggcgacctccgacctggccttcaccctccacgcctccccgttccgcttcaccgtgtcccgccgctccagcggcgacgccctcttcgacacctccgcggcgctggtcttcaaggacaggtacctggagctgaccacggcgctgccgccggagggcggggcgtcgctgtacgggctaggcgagcacaccaagcgcacgttccggctgcagcgcaacgacacgttcacgatgtggaacgccgacatcccggccgccaacgcggacgtcaacctgtacggctcccacccgttctacctcgacgtgtacttcttcgccggcccctccccgctcgacgtcgtcgaccagtacacccagctcatcggccgtccggcccccatgccgtactggtctttcgggttccaccagtgcaggtacgggtacaagaacctggctgacctggagggcgtggtggccgggtacgccaaggccaggatcccgctagaggtgatgtggacggacatcgactacatggacgcgttcaaggacttcacgctggatccggtgaacttcccggccggcccgatgcggcagttcgtcgaccgcctccaccggaacggccagaaatacgtcgtcattatagacccagggatcagcgtgaacgagacatacgggacgtacgtgcgagggatgcagcaggacgtgttcctgaagcggaacggcaccaactacctcggcaaggtgtggcccgggtacgtctacttcccggacttcctcaacccgcgcgccgccgagttctgggcgcgcgagatcgccctgttccggcggacgctccccgtcgacggcctctggatcgacatgaacgaggtctccaacttcgtcgacccggcgcccctcaacgcgctggacgacccgccgtaccgcatcaacaactccggcgtgcaccgccccatcaacaacaagaccacgccggcgtccgcggtgcactacggcggcgtgcgcgactacgacgcacacaacctctacggcttcctggaggcgcgagccacgcacggcgcgctgctcgccgacaccggccgccggcccttcgtgctcagccggtccacgttcgtggggtccggccggtacaccgcgcactggaccggagacaacgccgccacgtgggacgacctccgctactccatcaacaccatgctcagcttcggcctcttcggcatccccatggtcggcgctgacatctgcggcttcggcggcaacacaaccgaggagctctgcagccgctggatccagcttggcgcgttctacccgttcgcaagggaccattcggcgatcggcacggtccggcgcgagctgtacctgtgggagctggtggcgcggtcggcgaggaaggcgctcgggctgcgctaccggctgcttccgtacatgtacacgctgatgtacgaggcgcacaccacgggagcgcccatcgcgcggccgctcttcttctcctaccccaaggacgaggccacgtatggcgtggaccggcagttcctgctggggcgcggcgtgctcgtgtcgccggtgctcgagcccggtgccaccaccgtcgaagcctacttcccggccgggcggtggttcagcctctttgaccacgaggtcgtcgtcgcctcggcgacgggcaagcacgtcaccctcccggggcccgcggacacggtcaacgtacacgtggccggcggcaacatcctgccgctacagctgccggagctgacgacgtcgcgcgcgcgccagaccgcgttccacctcctggtcgcgctcgccgaggacggatccgcatccggggagctgttcctcgacggcggcgacttgccggagatggccgggccgcggggcgagtggagtctggtgcggttcagctgcacgcaggggcgcgacggggttaagctcatgtcgcacgtggtgcacgacgcgtacgggccgagccggaagctggtcatcggcaaggtgatgttcctgggactgccctcgctggcgccaccgggagagttcgccgtgtatgtcaacggcgttaagatggccaactcgactggcgcgacgctagggtatcaaaggcgcggagcactcggcgccgctcaagtggaggggttgtcgctggtcgtcgtcgaggagttcgagctcaaggtggtcacgtcgtcataacgtgacactcaagctcgttctgaataaaatctgatcaaaagtctaaatttaaattggaaataaaggaattgtgagtgcaatatagcaaaaaatgtgcaatgagattcgtgtcctctacccggattgagccctaacgcgcataatgaacatccggcccaaatatggaggcctaaatcaatgattgcaaattgggcttgcaaaaggctttatggcttggcacgtcatcggaaggaaacagtttagtccacgatggagactttttaatgtgttaacccttcttctatactaggagtacacttaaagcatcagtttcaac

SEQ ID NO: 217460 - DNA, 2542 bp, Zea Mays
caagtctcctgttcggctgtccccacttcccagcaacgcaacccagccatggcgacaccgccgccgcgaccgggaccggccgccgcatccgcggcggtctccctcctcgaccacctcgagcacgcgaatttcgctccaccccctccccctccgccgccgccctcccccaccaccgtcctcaccgcgtggtcgcgcctccgcgaccctaactccacctcccccgctgacgcactcgccgcgctagagacgctccaccaccaccgtcgcgcgctccgcctctcgtccgcgcacgcctcgctcctgctcccactgctcccgctacacccccgcctcgtggccacgctgctcgccgctgccccgcacctcggccccgcctccgtcccggcctccctccccttcgcccctcgcctcctcctcctcggcgcccgcgcctccgccaaggatctcccgggccgtgccagcttcggggaacccgcttccaccgcgaagaatcccgccggcagcggtgagcctgccgatggccaggacgacgaccctgttgtagctgtgggccgcattcttgaagatgtggagcggggcggtcagagcatcgatgatgtcgaccacctcgcccttgcaggggttggttacgcgctggcgtctgctgacgaggtgcagttcagaaggatcattgtgcccttgcttaggatctgtggcaggactgggaatctgtctgtcggtgttcgggtgcttaagctgatggaatggctggtaatgggattcatcgagtccaggaagatgaggaatgctcaggtgctctttgagatgacttcaccggaggagtgtgagggcgagaactattgtgtgctgttaccagcggtgatgttggcctgcggtgggttgcgggcactgagggttgcttcggctaggtaccggttggactttgatccacggctgaagcaggcgcctgagcggacaattcagtttgcagctgagcgggctgttttagaagggaggccggccgatgaccagcatatccttgttcagtgtgtcgcattggggctgtcacggtgtgggcaggtcgcgtttcacgaatcggtgttacggtgtgtctgtatgggattgctaaaggagctcctcccacttcctgattttcttaggaggtcggtccaaaacgcaggagggaactcaaatgaggttatcaaggctcaggtcaataaacaccttgatagtgttcttttcaaagaggcaggcccagtgactggggttctttgcaaccagtattcatatgccaatgacaaggctaaaagctttgtcgaaacttgtgtatgggagtacgcacaggagatttatcgtcatcttcgtgcagcagtgttgctgcaccgggggaagcaggatggcttgattacggcgattgacaagaatgctgaggcctcatttcttatggttgtagtctttgcagccgaggtcgctaaacacaggctaaatgctaagtcctccgaggggttccaacctgaggttgctgctagaatcttggtggcgttctcttgtgtggaacatcttaggcgactgcgtctccctgagtacactgaggcagtccggagtgctgtgcttgccaatcaagagaatgtagcagctactgctttgttcatcgagtcaataccttcatatactgaactgacaagtgaaccagatttactggccttggatagaccaacaacatataactggtacagagatgaggttcagacatcacgcatgctgttttacttgcgggttgtgccaacttgtgttagcctcattccagttcatacgatgcaggataaactggcctcaatcatgttcttatatctacaacatccaaatgagaaagttacaagtgcttcacactctgtgatggtatcgttcctgtcatctggcagtgatgctgatcaggatgatcgagcagctttgaaagagcgacttgccttttactacatcaagagatctttggaggcttatcctgggttaacaccgtttgacggattagcatcaggagttgcagcacttgtacggcatcttcccgcaggcagtgctgccattcttttttgtatccatagccttgctgtcaaggctaaagatctttgtgagactgcaaatgttcagaacaaatccttgtggaggtcatgggaagagagcacagatccatgtaagaaaacattggatctgttgctgagactaatcttccttgtggatattcagtcattcccttacctgttgaaggagctggcacagttggtgaccctgctaccaaaggaaggccaggatgcggtccttgatgacatgcacacccatgtcgcggagtctgacgatgtcactcggaagccggtactcgtgtcgtggctgcagtccctctcctacctaagctcacagtcgagccgtgaatctcacagcaaggccaagagtgctactgcatccgtagcaagcgatgagctgctggacagagccgtggcacgcttgtgataccatcttgtcggtaaattggatggatgcgtgttgcaaaccttgtttggttgcataggaa

SEQ ID NO: 217461 - DNA, 3187 bp, Zea Mays
cgaggaagcggatcagaacacgccacgatctggcggcagcacagagggaggcggtccgcggtcgcatgcacggctcgccggcggaggcaactgttaattattacgccgtgtaccagcagcagcctgcaggacgacggcacgcgcgcgcgcgcgcggcatgccgttgagtggcaggccatggggcggcggcggcggcagcggtggcggcagctcgggtaggctcgcgtcgtccggcgcgctcctcccggcggcgctgggcggcgcgcgcagcgggcggcggccccggctccggcggttcatcgtgtccccccacgacccgcggtacgtggcgtgggagcactcgctggtggcgctggtggcgtactcggcgtgggtggcgcccttcgagttcgggttcgtcccggacccgcggggcgcgctggccgtcgccgacaacgccgtgaacgcggcgttcgccgtggacatcgcgctcaccttcttcgtggcgtacgcggacggcgggacgtacctgctgcaggacgacccccggcggatcgcgtggcggtacgcccgctcctggctcgcgctcgacgtcgcctccaccgtgcccaccgaggtgtaccgccgggtcctgccgcgccaggccaggagctacaacttcttcggcatgctccggctctggcgcctgcaccgcgtcggcacgctcttcgcacaactggagaaggacaggaagttccgctacttctgggttcgatgcacaaggctcatctgcgtgacgctgttcgcggtgcactgcgcggggtgcttctactacctgctggcggacaggtacccggacccggggcacacgtggctgagctcctccatgccggacttcaagcagcagagcgtgtggaagcggtacgccgcgtccatgtactggtccatcaccacgctcaccaccgtcgggtacggcgacatgcacgccgtgaacacgggcgagatggtgttcaccacgttctacatgctcttcaacctcggcctcaccgcctacctcatcggcaacatgaccaacctcgtcgtccacggcaccagccgcaccaggaaatacagggacgcgatcaaggcggcgacgagcttcgcggtgcggcaccagctgccgccgcggctgcaggagcagatggtgtcccacctgagcctcaagttcaggaccgactcggaggggctgcagcagcaggagacgctggacgcgctgcccaaggccatccgctccggcatctcgcactacctcttcttcgccctcgtccagggcgtctacctcttccagggcgtctccaatgacctcatcttccagctggtctctgagatgaacgccgagtacttcgcgcccagggaggacgtcatcctgcagaacgaggcgccgtccgacttctacatcctagtcaccggtagtgtggagctggtagagctccggaacggttcagagcaggtggctggggtggccagggccggcgacgtcgtcggcgagatcggggtgctgtgctacaagccccagctcttcacggcgaggacgcggtccctgtgccacctcctgcgcatggagcgcagcgcgttcctcaggatcgtccaggcgaacgtcggcgacggcaccataatcatcaacaaccttatccagtacctcaaggagaagagggacagcggcgccatcgccggcgtcgcggaggagatcgagtacttgctagctcggggccagctcgagctccccgtcacgctctgctacgccgcgtccagaggagacgacttcctcatgcatcagctcctcaagcgcggggtcgatcccaacgagtcagataactattggcatacagcactgcacgtctcagcttccggtggacatgagcagtgcatcaagcttctgctagagcatggcgctgatcctaatgcttcaggagcatgtgattggggccaccaaccaaaccttgcgctgatcgtaatacaatgtccagacgcgcaaggaagagtgcccctgtgggaggccctgtcgcgggggcaccgcggggccgcgcagctgctggcggacggcggcgcggacctggcgtcgggcgacgcggcgctctacgcgcgcgcggccgtggaggcgggcgacgtcgcgctgctggaggacgtggcgcgccacggcggggacgtgacggtggcgtgctgcgacgacggcggcaccgcgctccaccgcgccgtgctccagggggacgtcgggatggccagggccctgctggagcacggtgccgacgccgacagggaggacggcggcggccggaccccgcgggacttggcgggccagctcggccaccgcgacatgcaccagctgttcgggccgccctcgcagtcgcagcaccgggaagcggtggagagtccgatcaggcggcagggctcgggaacggaggaccatggcagcagctgcaggcccgccgtcgcggtcgcggctcggccggcggtcaccaggttcaagagcgcgcccgcggcgagggtcccggtcgcggtcgcgcagcacgacggcgccggttcgtcgccgtcaccgtcgtcgtccaggcacagcagtccgcggcggatggtcagcttccggaactccctcttcggcgtcctctcctcgtcacaagtgaacaggcacgacggagcagctggcggcggggggcatagccgccacgagaggcacacgcacagcaggtcgcgggtcagggtgaccgtctcctgccccgagcagggcgtcggcgcgaggaagctggtgttcatgcctgagacgatggcgcagctcgtggagctcgccgggagccagtttgggttcgccccgacgagggtggtgaccacagacggtgcccaggttgacgacgccaggctcgtcagggacggcgaccacctcctcgtcgtcacccatcagtggcagagggtgcccgacactaagatcgtgcatacgaatcagtagatgtgaacgtattagagcagcgtgtttgacgtcgtggctgttcactgtattggtaactcagaactgatttattaagcgaaagaatcgtatatatgtccagctgcgacgggcatagatttagttcccgtatatatatcatagattaattaggcttagtaaaattgttttaccgtttagtcttgagttttttatatgggtagctagttttataactagactatatttaatgtaattgttaatcaaacatttgac

SEQ ID NO: 217462 - DNA, 3127 bp, Zea Mays
atttattctgaccaatgctttgaaataggtgttgaaacaagatcttctgacagatgtcctcagagcaaagataacttctgatgagcagatgtgctgtgacttttgcaaagtgccagtgtttgattatcaccgatactgcccaagatgttcatatgatttatgccttgattgctgtcatgacatacgtcattctcgggccaatgttgcacgaggagaatatactgaaggttatgttgaagataaaggtagagattcttttaatagaagagcaaggttggaaccatctgctgagagtgtcaatgacaagtcattatcttggccaatagatataaataatattgacattaaatctttattccctacatggagagtcaacaatgatggcagcatcacttgtggacctcacgaggctggtggttgtggctcctcaaagttggtattaaggcggatattcaaaataaattggattgctaaacttgtaaaaagttctgaagaaatggtcaatggttgcaaagtacatgatttggaggatggatgcttgtcttgcagtgatggcagaagatcggagtttactggtcagcaaaacctcggtctctcaaaatgctcaaacagtgatgagattggtaggaattgtttgtactcacctgtattggaggacttaaaatatgaaggcatcattcattttcgtaagcattggaaaaacgcggagcctattattatcagggaagcatttgagccttctctatcatcaagctgggatcccttgagtatttggagaggtatccaggagatcatggatgaagaaatggatgaagatgtcatagtcaaggctgtggactgctcgaaccaatcagagatatcgagctcaaacagtttatcaaaggctactcagatggcagcaaaggaggagatggcccacttgttgatgctgaaattgaaagagtggccccgacccaatggggtctcctaaaccttgctgccaagttacccccagatgccttacaacctgaattagggatgaaactgctaattgcacatggaagtcaccgagaacttggtaaaggtgattcaatgacaaatctaatgattaacatgagcgatgtggttcacatgttaatgcatgcaactgaagtgcattaccaatgtcccaagagggtaagggtacagtctgatgtatctgaaatgattgctaatggaactagtgtccatgtaaatgctcatactcctgttcaaaatttgaatctggatattgaagagcaatcacacaaacactcgaaatcacacatcgaggagccaaacactaataattcagaaggatccctggctggtgctgtctgggatgtattccgcaggcaggatcttccaaagcttaatgaatatctagctgctcatcgggaagaatgtgcagctagatgtcaagcagtgtcttctgttaagtatcctatttatgatcaaactgtgtaccttaacgattatcataagaagatgttgaaggatcaatatggaattgaacccttcacattccaccaacatattggtgaggctgttttcattccagctgggtgtcctttccaattgaaaaacctccagactaaggtgcgtttggttggagagttaactagaacggagcggctctattttagtttttgagaatgagccgttttattctgcgtgtttggcaaacagaacagtgtcgctccattttttgtttcgttgaagagtagaatagagtggagtcgcttcgttctttgtttggttggagacccatatgagtatagatagaaggagagggaggatagcgctcgcgtccgagagagcgctcacatccaatcgtttttgtggagcaagatcattccaaccatttatggtaaatttccatatgggtcttataggagccgctccgctcatttttgttggaaaccaaacatctaaaaaataagaatggagctactctattcttcactcctcaaccaaacatacactaagtttcatgcgtgctcatctctcactacgtgttgaatttgacttgcttgttcttatttgttatgcttattacttggagaagaattttgttcctctatctttgatatcatcttctttacatgtgattatttgaactagttatgtactatctactgaatgcggctgttatgctttgatttgttgaaaatgataatatcttctatgcttctgttattgtttgaatactttatttggggatgtagtttacatttgttttctgttatattgacatgatcagtccacggttcaattggctctcaattttttgtcacctgagagtttgccagagtcagtccggctgtcccaagagatccgttgcctgccaaatggccatcttgcaaaactgaagatgcttgaggtaaaaaagatctccttatacgcagcaagttctgctgttagagaaattcagagaataacccttgatcccaagttcaatcttgatcctagttttgaggatcaaaatttgactagggcggtttcagagaacttggcaagagtaaacaaacggaaggtatcttgcagttgagattgtgggggcctggtgaaattatgacatgccattcagaggattgaagtagatatagtgcttgtacatgtattatattgtgtcatatgaaaggaacacattctaattcttattgggttacacattgactttacctgtatattgtgggttaggaagagtaacagttaagcttctgaggaacaagataaaaaggcgctggaaagctcatgtagaattgttagcacaataatctctgttggtagcatctgaagaataattaattagaccgaaattgttacattgtgaacacagggttcaagatttaaatactatattttcaccacggttttgcatttgtgtcaacctgcacgtagtaacgtctaaattactatagtgtttcaaaccaagtgccttttttatatatagcatgatttatctagaaaaatcaaaatatcttataatttataatagatttaaaatgaaagcaattacaatttaggatggaagtagttattgtatgtataattagttttaggatccatttggatctttgaaattgaaatatattcttgtgtccctggaccgacgagtaaattgtcg

SEQ ID NO: 217463 - DNA, 2967 bp, Zea Mays
atggcggccgtgccggaggacctccgctgcaagcgctccgacggcaagcagtggcgctgcagcgcgccctccatgcccgacaagaccgtctgcgagaagcactacgtccaggccaagaagcgctccgcctcctccgcgctccgcgcctcgctccgccgctcctcagcctcctccctcgcgcccgtcttcccattctcctcctccccctcctccgccgctcgcctccgcgccgccgacgaggacccgcccatggcggtcgcgaggcccctctacggcagggtcgccggggaggcggtgtacgtggctgaaccggtgccggcgcccgcgcggagggaggtcgcctacgaagggctgcctcggggcaatgcggctggtggcaggactgcggcggggctggtcggcagaggcccactatggtttcctggtggcggctctgaagggataaggagttgccaccagtgccggaaggctgggggtgtcatctggtgtaccagctgtgacaggagaggctactgtgccagatgcatctccagatggtactctgacattccgatggatgaagttcgaaatgtttgtccagcatgccgtggtatttgtaattgcaaagtttgcttacaaggagacaacttaataaaggctagggtgcaagaaatatcagctgttgataagttgagatatcttcattgccttttggtttatgttcttccagtactgaagggaatttattctgaccaatgctttgaaataggtgttgaaacaagatcttctggaccaaagacagatgtcctcagagcaaagataacttctgatgagcagatgtgctgtgacttttgcaaagtgccagtgtttgattatcaccgatactgcccaagatgttcatatgatttatgccttgattgctgtcatgacatacgtcattctcgggccaatgttgcacgaggagaatatactgaaggttatgttgaagataaaggtagagattcttttaatagaagagcaaggttggaaccatctgctgagagtgtcaatgacaagtcattatcttggccaatagatataaataatattgacattaaatctttattccctacatggagagtcaacaatgatggcagcatcacttgtggacctcacgaggctggtggttgtggctcctcaaagttggtattaaggcggatattcaaaataaattggattgctaaacttgtaaaaagttctgaagaaatggtcaatggttgcaaagtacatgatttggaggatggatgcttgtcttgcagtgatggcagaagatcggagtttactggtcagcaaaacctcggtctctcaaaatgctcaaacagtgatgagattggtaggaattgtttgtactcacctgtattggaggacttaaaatatgaaggcatcattcattttcgtaagcattggaaaaacgcggagcctattattatcagggaagcatttgagccttctctatcatcaagctgggatcccttgagtatttggagaggtatccaggagatcatggatgaagaaatggatgaagatgtcatagtcaaggctgtggactgctcgaaccaatcagaggtagatatcgagctcaaacagtttatcaaaggctactcagatggcagcaaaggaggagatggcccacttgttgatgctgaaattgaaagagtggccccgacccaatggggtctcctaaaccttgctgccaagttacccccagatgccttacaacctgaattagggatgaaactgctaattgcacatggaagtcaccgagaacttggtaaaggtgattcaatgacaaatctaatgattaacatgagcgatgtggttcacatgttaatgcatgcaactgaagtgcattaccaatgtcccaagagggtaagggtacagtctgatgtatctgaaatgattgctaatggaactagtgtccatgttaagtatcctatttatgatcaaactgtgtaccttaacgattatcataagaagatgttgaaggatcaatatggaattgaacccttcacattccaccaacatattggtgaggctgttttcattccagctgggtgtcctttccaattgaaaaacctccagtccacggttcaattggctctcaattttttgtcacctgagagtttgccagagtcagtccggctgtcccaagagatccgttgcctgccaaatggccatcttgcaaaactgaagatgcttgaggtaaaaaagatctccttatacgcagcaagttctgctgttagagaaattcagagaataacccttgatcccaagttcaatcttgatcctagttttgaggatcaaaatttgactagggcggtttcagagaacttggcaagagtaaacaaacggaaggtatcttgcagttgagattgtgggggcctggtgaaattatgacatgccattcagaggattgaagtagatatagtgcttgtacatgtattatattgtgtcatatgaaaggaacacattctaattcttattgggttacacattgactttacctgtatattgtgggttaggaagagtaacagttaagcttctgaggaacaagataaaaaggcgctggaaagctcatgtagaattgttagcacaataatctctgttggtagcatctgaagaataattaattagaccgaaattgttacattgtgaacacagggttcaagatttaaatactatattttcaccacggttttgcatttgtgtcaacctgcacgtagtaacgtctaaattactatagtgtttcaaaccaagtgccttttttatatatagcatgatttatctagaaaaatcaaaatatcttataatttataatagatttaaaatgaaagcaattacaatttaggatggaagtagttattgtatgtataattagttttaggatccatttggatctttgaaattgaaatatattcttgtgtccctggaccgacgagtaaattgtcg

SEQ ID NO: 217464 - DNA, 3176 bp, Zea Mays
atggcggccgtgccggaggacctccgctgcaagcgctccgacggcaagcagtggcgctgcagcgcgccctccatgcccgacaagaccgtctgcgagaagcactacgtccaggccaagaagcgctccgcctcctccgcgctccgcgcctcgctccgccgctcctcagcctcctccctcgcgcccgtcttcccattctcctcctccccctcctccgccgctcgcctccgcgccgccgacgaggacccgcccatggcggtcgcgaggcccctctacggcagggtcgccggggaggcggtgtacgtggctgaaccggtgccggcgcccgcgcggagggaggtcgcctacgaagggctgcctcggggcaatgcggctggtggcaggactgcggcggggctggtcggcagaggcccactatggtttcctggtggcggctctgaagggataaggagttgccaccagtgccggaaggctgggggtgtcatctggtgtaccagctgtgacaggagaggctactgtgccagatgcatctccagatggtactctgacattccgatggatgaagttcgaaatgtttgtccagcatgccgtggtatttgtaattgcaaagtttgcttacaaggagacaacttaataaagggtgcaagaaatatcagctgttgataagttgagatatcttcattgccttttggtttatgttcttccagtactgaagggaatttattctgaccaatgctttgaaataggtgttgaaacaagatcttctgacagatgtcctcagagcaaagataacttctgatgagcagatgtgctgtgacttttgcaaagtgccagtgtttgattatcaccgatactgcccaagatgttcatatgatttatgccttgattgctgtcatgacatacgtcattctcgggccaatgttgcacgaggagaatatactgaaggttatgttgaagataaaggtagagattcttttaatagaagagcaaggttggaaccatctgctgagagtgtcaatgacaagtcattatcttggccaatagatataaataatattgacattaaatctttattccctacatggagagtcaacaatgatggcagcatcacttgtggacctcacgaggctggtggttgtggctcctcaaagttggtattaaggcggatattcaaaataaattggattgctaaacttgtaaaaagttctgaagaaatggtcaatggttgcaaagtacatgatttggaggatggatgcttgtcttgcagtgatggcagaagatcggagtttactggtcagcaaaacctcggtctctcaaaatgctcaaacagtgatgagattggtaggaattgtttgtactcacctgtattggaggacttaaaatatgaaggcatcattcattttcgtaagcattggaaaaacgcggagcctattattatcagggaagcatttgagccttctctatcatcaagctgggatcccttgagtatttggagaggtatccaggagatcatggatgaagaaatggatgaagatgtcatagtcaaggctgtggactgctcgaaccaatcagaggtagatatcgagctcaaacagtttatcaaaggctactcagatggcagcaaaggaggagatggcccacttgttgatgctgaaattgaaagagtggccccgacccaatggggtctcctaaaccttgctgccaagttacccccagatgccttacaacctgaattagggatgaaactgctaattgcacatggaagtcaccgagaacttggtaaaggtgattcaatgacaaatctaatgattaacatgagcgatgtggttcacatgttaatgcatgcaactgaagtgcattaccaatgtcccaagagggtaagggtacagtctgatgtatctgaaatgattgctaatggaactagtgtccatgtaaatgctcatactcctgttcaaaatttgaatctggatattgaagagcaatcacacaaacactcgaaatcacacatcgaggagccaaacactaataattcagaaggatccctggctggtgctgtctgggatgtattccgcaggcaggatcttccaaagcttaatgaatatctagctgctcatcgggaagaatgtgcagctagatgtcaagcagtgtcttctgttaagtatcctatttatgatcaaactgtgtaccttaacgattatcataagaagatgttgaaggatcaatatggaattgaacccttcacattccaccaacatattggtgaggctgttttcattccagctgggtgtcctttccaattgaaaaacctccagtccacggttcaattggctctcaattttttgtcacctgagagtttgccagagtcagtccggctgtcccaagagatccgttgcctgccaaatggccatcttgcaaaactgaagatgcttgaggtaaaaaagatctccttatacgcagcaagttctgctgttagagaaattcagagaataacccttgatcccaagttcaatcttgatcctagttttgaggatcaaaatttgactagggcggtttcagagaacttggcaagagtaaacaaacggaaggtatcttgcagttgagattgtgggggcctggtgaaattatgacatgccattcagaggattgaagtagatatagtgcttgtacatgtattatattgtgtcatatgaaaggaacacattctaattcttattgggttacacattgactttacctgtatattgtgggttaggaagagtaacagttaagcttctgaggaacaagataaaaaggcgctggaaagctcatgtagaattgttagcacaataatctctgttggtagcatctgaagaataattaattagaccgaaattgttacattgtgaacacagggttcaagatttaaatactatattttcaccacggttttgcatttgtgtcaacctgcacgtagtaacgtctaaattactatagtgtttcaaaccaagtgccttttttatatatagcatgatttatctagaaaaatcaaaatatcttataatttataatagatttaaaatgaaagcaattacaatttaggatggaagtagttattgtatgtataattagttttaggatccatttggatctttgaaattgaaatatattcttgtgtccctggaccgacgagtaaattgtcg

SEQ ID NO: 217465 - DNA, 2344 bp, Zea Mays
gttctacttctccgtatagatccttagctcgttgcaactttcctttcctatcgtcatgtactcatatcataattgaatccaattatccagtgtttggttgagagatgttgctaacatttggtatcagactactcgcatcctggaagattgcacgcatggaggcggcaatgcagcagattctcgacgcgatggcgtacatggagctccgcttgacagatgcgctggttggccgtggtggcgacagggtggaggacacggtctcagggctgcaatcctccaactccgccacctcctccgtcgccacgccgatgtacgacgacgtgttcgactcttcggtggccccgatgtacccaggcgatctgcacgccaccgccatcctcgacgtgctgtcccgcgtgcacacgctggacaagtgcatgacctcgcaggacaagctcgtcatcgacctcgatccagacgacatggagacaccattatcggagtcggcccttcccgtcgttcccagtgccaatgaaatggagacgcccaccacctgttcgactccggtcctcaccgagcacgcgccggccgaggccgcacacaactgcacactgcgggtgccccgtggagagccgcttccgcgcctgcttcacgcgttcctagcgcacgattggctcgaccactccgccgacacagacgactccgtgctaacatccatgtctgggtgcaccaagctcgtcgagctgcaaccgaggggcgtcaacctcagaggctgcattccggatgctctgttcgatgtcgagcttgagacgctcaacgtgccgtcgcacgcgctctcgggcatacttcccttgggctccaccaagctggcggagatgctacaatcgctcgacctctccgtccaccagctcacctatggcatcctcaccgagatgtcgctcttcttcaagctgcgtgtggatctgtattgcgccatacctgtcgacctctgcgagtctgttacccaaggggttgttccagcaggagaagacgaggatgaccccaagcaactctggcaccacctgcacgctcgctggccaagcgaccaacagaaacagcacctgcgctcacagacacaacacacacagaggcatcacagagcaacgacagccgaagaaagaaccaactatctctctggcctcattccaaagctcgtcaagcccaattcggtagccatggtgactattgcaagcaagcctacatcagattcaattgctgctcaagtggtgttcgatgaaatgcagcaagggtttcgaacatggatccaacgacaaccagatacatggtgccagagttgttgcccttcttcattgattgatgctctgcttggtgggtgttctagcgttggtgctcattgtgtgtgttacctgcttaaggtatatgctcttgctactaaacttcctgattggattgggcgcacacagtcacaaaaactaagaagctacagaggcaatatccctgggttaagaccaattccatggccatccttcattttactaagcagagagaataagcttaccaagtcatcagtcatggtcactgctagtgcgattcaggcttttgtgaatctggtcctcacttcttgtgatgctggttattccattgtcatgtttacaccaaattatttcatcacctacatgtcgttccagatgacaggtgctaccgacatattagttggtggttgcgattccaggacacttcattatgatgttgattggttggagaaggttctgaaagataaggagcatgtccctaaacttgttactgttttgaattcgaggaacccctctagagcttttattcccaggcctatgcttgagagaatttcagatctgtgcaaaagtgtaggacaacataccggtcaactaagcttgcatgggcagtattaccttatcattattacaacagtctgttggttggtgtggagttcctgaaacacatgatacttggattgatgtacaacaaagagctctatggccaccacggatccaccagtcattgtctacactatcagcggcttgggggcaagccgcatttcaagcggtggggaatgtcagtacactgccatgtggtgtcatgtgggcccttggaaggtggcatggggtattctctgctataaaatggagaagctgcgcaggcgataggcatcaatgaaatattcagaagacatccattccatattgtgcttctacctcttcagtctcttcctcctatcttctagagttctacttctccgtatagatccttagctcgttgcaactttcctttcctatcgtcatgtactcagatcataattgaatccaattatccagtgtttggttgagag

SEQ ID NO: 217466 - DNA, 2868 bp, Zea Mays
tgtgcttctacctcttcagtctcttcctcctatcttctagagttctacttctccactactcgcatcctggaagattgcacgcatggaggcggcaatgcagcagattctcgacgcgatggcgtacatggagctccgcttgacagatgcgctggttggccgtggtggcgacagggtggaggacacggtctcagggctgcaatcctccaactccgccacctcctccgtcgccacgccgatgtacgacgacgtgttcgactcttcggtggccccgatgtacccaggcgatgtgttcggctcttcggcggcctcacccccaggcttcgatggcgagcctactttcgacgaggagcacaacaactccatcaccgagtacgtcgacgtctcgtgccacgaccatctcttcctcctcgacaccacctgggactcctcgcagcagcacaacgccagcatcccaggacggcgccaacatcccggttgcagcgcgcggctgcagcgccgaccgctccagcacctgaccgtcgaccccgtcagcgccgtggacaccatgcctctcgatttcaatctcactctcgacgagttcaaccagcggttcgacgcgtccgctagcgtgccgcctagcccggtcgcagtcatcgccgacaattggggcgggtgcttcgacagcgagcagtaccacacgagaccatccgtcgtcgctgatagttggggcggattcttcggtggcgaggacctcgcttcgtcaggcaacgccacgagattcgtcctccccatcgcctccaccgacgagcccagcatcgacatcgcgctagcccgtgccaactccgaagtcacagatgactccgtgttcgtgaccaccgaacctgccggctacgacgactccgagctgcacgccaccgccatcctcgacgtgctgtcccgcgtgcacacgctggacaagtgcatgacctcgcaggacaagctcgtcatcgacctcgatccagacgacatggagacaccattatcggagtcggcccttcccgtcgttcccagtgccaatgaaatggagacgcccaccacctgttcgactccggtcctcaccgagcacgcgccggccgaggccgcacacaactgcacactgcgggtgccccgtggagagccgcttccgcgcctgcttcacgcgttcctagcgcacgattggctcgaccactccgccgacacagacgactccgtgctaacatccatgtctgggtgcaccaagctcgtcgagctgcaaccgaggggcgtcaacctcagaggctgcattccggatgctctgttcgatgtcgagcttgagacgctcaacgtgccgtcgcacgcgctctcgggcatacttcccttgggctccaccaagctggcggagatgctacaatcgctcgacctctccgtccaccagctcacctatggcatcctcaccgagatgtcgctcttcttcaagctgcgtgtggatctgtattgcgccatacctgtcgacctctgcgagtctgttacccaaggggttgttccagcaggagaagacgaggatgaccccaagcaactctggcaccacctgcacgctcgctggccaagcgaccaacagaaacagcacctgcgctcacagacacaacacacacagaggcatcacagagcaacgacagccgaagaaagaaccaactatctctctggcctcattccaaagctcgtcaagcccaattcggtagccatggtgactattgcaagcaagcctacatcagattcaattgctgctcaagtggtgttcgatgaaatgcagcaagggtttcgaacatggatccaacgacaaccagatacatggtgccagagttgttgcccttcttcattgattgatgctctgcttggtgggtgttctagcgttggtgctcattgtgtgtgttacctgcttaaggtatatgctcttgctactaaacttcctgattggattgggcgcacacagtcacaaaaactaagaagctacagaggcaatatccctgggttaagaccaattccatggccatccttcattttactaagcagagagaataagcttaccaagtcatcagtcatggtcactgctagtgcgattcaggcttttgtgaatctggtcctcacttcttgtgatgctggttattccattgtcatgtttacaccaaattatttcatcacctacatgtcgttccagatgacaggtgctaccgacatattagttggtggttgcgattccaggacacttcattatgatgttgattggttggagaaggttctgaaagataaggagcatgtccctaaacttgttactgttttgaattcgaggaacccctctagagcttttattcccaggcctatgcttgagagaatttcagatctgtgcaaaagtgtaggacaacataccggtcaactaagcttgcatgggcagtattaccttatcattattacaacagtctgttggttggtgtggagttcctgaaacacatgatacttggattgatgtacaacaaagagctctatggccaccacggatccaccagtcattgtctacactatcagcggcttgggggcaagccgcatttcaagcggtggggaatgtcagtacactgccatgtggtgtcatgtgggcccttggaaggtggcatggggtattctctgctataaaatggagaagctgcgcaggcgataggcatcaatgaaatattcagaagacatccattccatattgtgcttctacctcttcagtctcttcctcctatcttctagagttctacttctccgtatagatccttagctcgttgcaactttcctttcctatcgtcatgtactcagatcataattgaatccaattatccagtgtttggttgagag

SEQ ID NO: 217467 - DNA, 1803 bp, Zea Mays
gtgcccccgcccccgccagtccgtcaccatcgcgcggcgccaccaactacgcccgagcccccgcctccacaccccgtccccacgcgcggcgcagcggagctatcagcgcccttccccaggccggcttcaacgctgatggagccatcctcgcctcgaatcctcgctgcagttttcgttccaaagttctcgccccgaatcctcgcccttccccaccgcaccttcggtgtctccaccacaatcaccgcggtggcttcaccgtgtccccgcaatcaccgtggcggccagatccactacctcgccttcctgccgggcgacgtcctcttcatcgcgcaccacctcgccacgctcttcgtcttcctgacctgctgccacctcgtccgccacagcgcctacgctctcctcgtcctcgccgaggtcaccagcctgctgcagaacgctggacgctcgccgggatctagcgggaccagtcccccgccgcggcccgcgtctacagcgccctctcgccgtccttctacgcgctctacacgctcgtcaggggcgtcgccggcccgctcttcctcctcaagatggccgccttctacctgtccagccaggccgtcgacgccatcccgtggtgggtgcggatctcctggatcctggttgtcggcaccgccattgcggtcagcaacctgtggatttggaacctctggaaggagctcatcagggaatggaagcagcaggcccctcccaagtcaaagaaagacacataggccgccacctccaagccgagtgccgagaagtagaaggacaagatctacatcctcatgccggtcatggccagttgcccaccccggcgcctacgctcgagaagccacccatcttggccgcttcggtgcgaggaggcgctaccgtcctcttcctccgatccacctctcctgccaacccgccaggttgccgctgccgagagcgagcggaggcctccctccgccgacgggggaggaagatgctcaccaagttcgaaaccaagagcaaccgggtcaagggcctcaccttccactcgctcagcccatggatcctgtctagcctccacagcggcgtatccagatgtgggactaccgcgtgggcaccctcctcatccgcttcgaggagcacaacgggcccgtcaggggcatccagttctaggtcacgtagctgctcttcgtgtccagaggttggggacctcagggattctcccacgcgattccgacggcctccttcctctcgcgcggctgcaggcctcctccccccacctccacctgaatccacaacacgtgagaaaaagcgacgatgacgaagaacaacgtggttgacatcgggcggcctctcgattggtggtcgtgctcggatccgcacctcgatggggccaccctatccctcaccgccccatcgcgtcggattgagttcccttggacgggcgacagtgttatggcctgtaaataaactacattgtcatgttagttagagggaagtgggtctacatactgcttagctagattaattgtgatagtaaggtgtattttgctgctttgtcaacaatttcaatttagacacttgttttttgggatgagctgctaaaaacgagctgaaggctgctactgcagaaagtgttgtggtcatgcttgtacaaagaatatttgtaaacaatgcttccgataccgtttccttagatggagcgcataaacctgctcctgtatggctgagtacattggttgttgtctaaactgtaattcttactgaagtactgtataatcttcttttgaatgtattaagtgtactgggagccag

SEQ ID NO: 217468 - DNA, 1342 bp, Zea Mays
ctactagctagctataggatccaacgtcgatcgatcgatcaatcgacatggacaggccaggccaccaccagcaccattttttcatgccgccgccgccgcagcagcagcagcagcagctttgcgtgccgatgatggacgacccgtcgtcgttcttggcggagctgatgggcgtcggcggcggaggcggaggtgggccgtcgtcgtccgcgaggggggagaggaagcggcggttcacggaggagcagatacggtcgctggagtccacgttccgcgcgcgccacggccacgccaagctggagccccgggagaaggcggaactggcgcgggagctgggcctgcagccgcggcaggtggccatctggttccagaacaagcgcgcccgctggcgctccaagcagctcgagcacgactacgccgtgctccgcgccaagttcgacgacctccacgcccgcgtcgagtccctcaggcgcgacaagctcgccctctccacgcagtttgtttcatgcggcgacatttcactgatatcttcatacgagaaggttgagaattgtgtatacacatctactattttgagaaaatgtgctagatggggttccatgacactaaatccttggaatcgatgttccaagtggaaattagcacatgccgaggtaggagggccttggtgaaagctgggcaccactcaaaggtcgtgccgctgatcgacgagaacctcctggtgacaacaagcaggggcaccgagttatcttccactctagagcactggctcgaagaaaggaacctttcttccgaagaagcccagattatccgtctagaggaagggtatatcagagaagggatgcggttgagcgtggttggagtgctgagcaagaagaacggggatgccgtgatacttcctccgctggagcctcaatcgacgggctttgtgttgctgtcgtgtctcctcccgtcatatttcgacgggatagtgctgagactggccgccgtgccgaactcgggcgtctcatgaagagccgctatgggtaggggagctcggtgagatgtaacagctaacaacaactcttgtgcggtgcccttgcccccttgggatctttttcctgtacgggtccacctttttcttttttgtttgcttctgggactcgatcgtgtatgtggttttcttttcaggtaatcctaatgtacattctcactatatcatagttgtagtgcgaggcatttcagcgctcttgcctggctcccttctatctgaaatgctgtacggtacagtatggttttcggtctggacggctgtacggggcccatttcgtatgcaacctggtttcgatcaccttttgatgggcac

SEQ ID NO: 217469 - DNA, 1023 bp, Zea Mays
gaacagggagctcatattgttatcactgctactgaacttcaattattactaaaattgctttacagaccaaaagatggataaaatggaaactgtagtggtataaatgataattgtcaactaagatgcgcgccttcgtttgtttcatgcggcgacatttcactgatatcttcatacgagaaggttgagaattgtgtatacacatctactattttgagaaaatgtgctagatggggttccatgacactaaatccttggaatcgatgttccaagtggaaattagcacatgccgagaggttcgctgctgatttctacgtagcggatgcaaaatcaggtaggagggccttggtgaaagctgggcaccactcaaaggtcgtgccgctgatcgacgagaacctcctggtgacaacaagcaggggcaccgagttatcttccactctagagcactggctcgaagaaaggaacctttcttccgaagaagcccagattatccgtctagaggaagggtatatcagagaagggatgcggttgagcgtggttggagtgctgagcaagaagaacggggatgccgtgatacttcctccgctggagcctcaatcgacgggctttgtgttgctgtcgtgtctcctcccgtcatatttcgacgggatagtgctgagactggccgccgtgccgaactcgggcgtctcatgaagagccgctatgggtaggggagctcggtgagatgtaacagctaacaacaactcttgtgcggtgcccttgcccccttgggatctttttcctgtacgggtccacctttttcttttttgtttgcttctgggactcgatcgtgtatgtggttttcttttcaggtaatcctaatgtacattctcactatatcatagttgtagtgcgaggcatttcagcgctcttgcctggctcccttctatctgaaatgctgtacggtacagtatggttttcggtctggacggctgtacggggcccatttcgtatgcaacctggtttcgatcaccttttgatgggcac

SEQ ID NO: 217470 - DNA, 5128 bp, Zea Mays
ccgcctccgcgcctgactgtcccctccccaccatttcattccaattgagagccgtggggaccaatcaaccctagatccacctcgtccctccacgcgacaggagaggtatctccctgatccaactccgcatggcctcctcctccttcgcccccgacgaccagaccgacgccgacttcttcgacaagctcgtcgacgacgacgacccggccaccgacttgcctcgggccgtctccgccaccagcgtcgccgacgacccaccacccgtcctggagccgcaggttccggcgccggcgccttcggaggggtcaggcaagggcggcgccggcgtccacaccgcggtcaagcaggtgcagtgggcctccttcggaggtggcgtggacgacggccctgatccgttcgctgatctctcgggaggcgccggtgacgacgacggcttcctcgggaacacggcggggacccaggcggccttggatcacgccgccgaggtgacggatcaggacttcttcgctgggagcagctcctccgatcagcagaatgtccatggtcagcacgaccagggcagaggcagcgccgcggtggattccgcagatcccaaatctctggaggccatgtaccctgggtggaagtacgacgaggcctcacagcaatggtaccagcttgatggcagtgtaaattcaactgggaatgcagctcaggcgctggacgatagcgctcagaatgcacatcatcatcagcagcagctcgacgcggcttacctgcacaattcagcgcacgcggggcttgggacaattgccgaggagagcactaccgcagctggtgctgccaatagttggggccaaggggctgccccggagtacccacccagcatgctcttctatgcagagtatcctggttggtactttgacaccaacactcagcagtggcactcccttgagtcgtaccagcaggccgccgtgcaggctggaacatctagcacgggtcagactgttgttgcaagcgatgatgttgttgcgacttcctctctgacaggccataatgccgggcaaactgaggaccttgttgcccacaatcaggtgacacaacgcaactcatcctcgaatagtttcacccatcagaaccaatggcagaccaccgatgcacttggtaacaatgtacaatctgaaagcctggctagtagcttctatggttttgaacaacacatgaatgctgagactaccagttcctctacgagccaacagactggttttcacacagctgaaacaattacagatcactatggtggacgcaaagccttcgaatcatcaagtcttcagagtggttatagctcctctgacagtcaacaatccagtcacaaggcattcgaaccttccacgggttatcaggctggttacaacgggtttgaacctgcttcaggtcaccacacggcgtttgaacctgccatgcataaccagagtggatacaaggcatttgacccttctacgggtcaccatagtgcttcgtggggattcatgccttccacgggtcagcagactgatttcaagggttccagagcttccacagttcaccaggccggttatgaagagtttgaaatttctagaggttacaatacaaatttcaaggcatttgaatcatcttcatctcaaaatgctggttacaatggttcccagccttcttcaggtcaccaacctaactacatgggatttgacacctctgcaaaccaccatggttatactgatgtcaatggtgttgcgagtactcaaggctttgtcccaatgcaaaccacgtaccagggccagaaacaagcaaatgcaacctcacaagggcacctgtcaaatagctatttgggtactgacaactccatgaactttaatcagcaacaatttctgggtgcaaatgcctcaaatttgcaattcggtcactccccgcatgaaggtaggtcatcggctggacgaccaccacatgccctcgttgcttttgggtttggagggaagctcatagttatgaaagaaactacctccatgcctgcaagttttaacagtggaaatcagggtaactctagtagcacagtgtcggttcttaatctgttggaggtagtctttgataaagttgatccttcaagtgtcactaatggtagtgcacttagttatttccatgctctatgccgtcaacctgttcctggccctctggttggtggaagtgctgcatcaaaggatgtaaataagtggcttgatgaaatgattgcacggtacgagtcttcctctagtgaattccatagaggtgatactcgcaagttgcttatttcattgctgaagatactgtctcagcactatggaaaactgcgttcaccttttgcgtctgacccatcgcaagagatggtccagaaatggcagtaactaagctattttcatcgtgtaagagaagcactgttcatatgggagattatggatccctagttccctgcatgaaaagtattccttcagaaagtcagatgcaggctgttgcacaagaggtccaaagtcttctagtttctgggagaagaaaagaggcccttcactgtgcacaggcaggtcaactttggggacctgcaatcatactggcattgcagcttggtgataagttttatgtggatacagtgaagaaaatggcccacttccattttgtatctgggtcccctctgcgaacgctatgccttctcatcgctggacaacctgcagatgtttttaatgtagagaacaatgtcaacagtgactatggtgcatcccatcaacctgtggagcctggtcctaatatgttggatgattgggaggagaatttggctattattactgcaaacagaacagaaggtgacgttctagtaatcacccatcttggtgattgcctctggaaagaaaaaaatgaggttgcagctgcccattcatgctatttagttgctgaactaaacattgattcatactcggaaagtgcaaggttatgcctcattggtgcagaccatttgaagtgtcctcgaacatttgccagccctgaagccattcagaggacagaggtttatgaatatgcgaaggtgcttggtaattctcaatatatcctactatcctttcagccatataagctgatatatgcatacatgcttgtggaagtggggaaagtttctgattctttgaggtattgccaagcgtctataaaggtactgaaagcctctggtcgtgcccctgaattggaggtgtggaaacaattattttcttcgctggaggagaggatacgcactcaccagcagggtggatatggcacaaatcttgccccaggaaaaatagttgggaagatttttacctcgcttgataaatctatatcccgcatgatgggtacaccatctgcaccacttccaccgttgccacatggatcttttagtgataaagagagccactctatacctgcggcagcaaaatttgttaatagccaatcggtaatggtcatgccatcgttaataccatctgcttcaatgcagtcaatgactgagatagcagaggatagtggtggcactggcaggaaaattgcacacaacagaagtgtttctgagccggactttggtagatcatccaaacagggtgctggtggatcagatggtacacagagcagtgcatcaggatccagcagttctcgatttggttggctagtgcagaagactatgggattagtgtcaaaatcccaccgccaggcaaaattaggggatcagaacaaattttactatgatgaaaaattgaagcggtgggtggaggaaggtgctgctgttcctgccgaagagcctcctcttcctccacctccaacaaaaccatctttccagaatggtatgctagacaataagttgaatggccccatgagcgtaagccatgctcccaatggagtcacagaatggaaatcctcaaattcttcagagcaaggtctgggtatgccgccaattccacctagccaaaaccagttttctgctcgtggacggatgggtgtccggtccagatatgttgacacattcaatagatcaggtgcatctggtgcaatgccatcatataacaaaccagctgctccatctatgacaccaccagctggtgccaagttcttcatgccaactgcagcacctgttgccgcggatcagatgataccacaccaagcagcagagatacacagtgaaaccatccatcaggatgagcggtcagcctcaccgccagcagaaacatcattttcttcaaccccaccacccacgcaatttccatcaccagtgcaatcaacaatttatcggcaatctagtatggagaacatctccaccccttaccagggttccggggtatcgtcattaagcaacgacagctcattctcaaaatctcgagccgcgtcctggagtgggacatactctgagcagtttaatgcttttgcgggcactatatcgcctgacagacagacgacgcattcaccactgatgcctggcaaaccaccacacagccgttccaacagcaactcatcagggcatctcaatggattggcagaggatcttcatgaggtcgagctgtaactggcgactggtcagcatgaccgtcgcaactcgtgtcttaaaggcagcgatgacaacccctccccaagcaggtgacagaaaagaaggtgcccttaaaatgctgaccacggggatgccgcagctggaatgggcttggtgtgactttgcacgagattctggggcgcgctctaaaccaccgaggtgcgtcaggcctgtactaatagagatgcagggtttttttttgtagccatatatacatatatgttggttttgtgttttagagagaagggaaagggttgggtgggcctttgtttacaggtgggaagggaagagaagcagcatgcagatgcccttgtacagataatctgcccctacccagtttgtttaaaacgcaaacaacgccattttggttttagttccctggagaaggatagaggagaaggtgtgtgtctttgtagtgtgagaagcatggctctgtagtgttgttgttatagtgtactactactgtgctagccagccgcatacacagactgtttattctttggagacgaatcaattctttcatcttgactagggcattattatttgtta

SEQ ID NO: 217471 - DNA, 5049 bp, Zea Mays
cgtccctccacgcgacaggagaggtatctccctgatccaactccgcatggcctcctcctccttcgcccccgacgaccagaccgacgccgacttcttcgacaagctcgtcgacgacgacgacccggccaccgacttgcctcgggccgtctccgccaccagcgtcgccgacgacccaccacccgtcctggagccgcaggttccggcgccggcgccttcggaggggtcaggcaagggcggcgccggcgtccacaccgcggtcaagcaggtgcagtgggcctccttcggaggtggcgtggacgacggccctgatccgttcgctgatctctcgggaggcgccggtgacgacgacggcttcctcgggaacacggcggggacccaggcggccttggatcacgccgccgaggtgacggatcaggacttcttcgctgggagcagctcctccgatcagcagaatgtccatggtcagcacgaccagggcagaggcagcgccgcggtggattccgcagatcccaaatctctggaggccatgtaccctgggtggaagtacgacgaggcctcacagcaatggtaccagcttgatggcagtgtaaattcaactgggaatgcagctcaggcgctggacgatagcgctcagaatgcacatcatcatcagcagcagctcgacgcggcttacctgcacaattcagcgcacgcggggcttgggacaattgccgaggagagcactaccgcagctggtgctgccaatagttggggccaaggggctgccccggagtacccacccagcatgctcttctatgcagagtatcctggttggtactttgacaccaacactcagcagtggcactcccttgagtcgtaccagcaggccgccgtgcaggctggaacatctagcacgggtcagactgttgttgcaagcgatgatgttgttgcgacttcctctctgacaggccataatgccgggcaaactgaggaccttgttgcccacaatcaggtgacacaacgcaactcatcctcgaatagtttcacccatcagaaccaatggcagaccaccgatgcacttggtaacaatgtacaatctgaaagcctggctagtagcttctatggttttgaacaacacatgaatgctgagactaccagttcctctacgagccaacagactggttttcacacagctgaaacaattacagatcactatggtggacgcaaagccttcgaatcatcaagtcttcagagtggttatagctcctctgacagtcaacaatccagtcacaaggcattcgaaccttccacgggttatcaggctggttacaacgggtttgaacctgcttcaggtcaccacacggcgtttgaacctgccatgcataaccagagtggatacaaggcatttgacccttctacgggtcaccatagtgcttcgtggggattcatgccttccacgggtcagcagactgatttcaagggttccagagcttccacagttcaccaggccggttatgaagagtttgaaatttctagaggttacaatacaaatttcaaggcatttgaatcatcttcatctcaaaatgctggttacaatggttcccagccttcttcaggtcaccaacctaactacatgggatttgacacctctgcaaaccaccatggttatactgatgtcaatggtgttgcgagtactcaaggctttgtcccaatgcaaaccacgtaccagggccagaaacaagcaaatgcaacctcacaagggcacctgtcaaatagctatttgggtactgacaactccatgaactttaatcagcaacaatttctgggtgcaaatgcctcaaatttgcaattcggtcactccccgcatgaaggtaggtcatcggctggacgaccaccacatgccctcgttgcttttgggtttggagggaagctcatagttatgaaagaaactacctccatgcctgcaagttttaacagtggaaatcagggtaactctagtagcacagtgtcggttcttaatctgttggaggtagtctttgataaagttgatccttcaagtgtcactaatggtagtgcacttagttatttccatgctctatgccgtcaacctgttcctggccctctggttggtggaagtgctgcatcaaaggatgtaaataagtggcttgatgaaatgattgcacggtacgagtcttcctctagtgaattccatagaggtgatactcgcaagttgcttatttcattgctgaagatactgtctcagcactatggaaaactgcgttcaccttttgcgtctgacccatcgcaagaggagacagatggtccagaaatggcagtaactaagctattttcatcgtgtaagagaagcactgttcatatgggagattatggatccctagttccctgcatgaaaagtattccttcagaaagtcagatgcaggctgttgcacaagaggtccaaagtcttctagtttctgggagaagaaaagaggcccttcactgtgcacaggcaggtcaactttggggacctgcaatcatactggcattgcagcttggtgataagttttatgtggatacagtgaagaaaatggcccacttccattttgtatctgggtcccctctgcgaacgctatgccttctcatcgctggacaacctgcagatgtttttaatgtagagaacaatgtcaacagtgactatggtgcatcccatcaacctgtggagcctggtcctaatatgttggatgattgggaggagaatttggctattattactgcaaacagaacagaaggtgacgttctagtaatcacccatcttggtgattgcctctggaaagaaaaaaatgagcagctgcccattcatgctatttagttgctgaactaaacattgattcatactcggaaagtgcaaggttatgcctcattggtgcagaccatttgaagtgtcctcgaacatttgccagccctgaagccattcagaggacagaggtttatgaatatgcgaaggtgcttggtaattctcaatatatcctactatcctttcagccatataagctgatatatgcatacatgcttgtggaagtggggaaagtttctgattctttgaggtattgccaagcgtctataaaggtactgaaagcctctggtcgtgcccctgaattggaggtgtggaaacaattattttcttcgctggaggagaggatacgcactcaccagcagggtggatatggcacaaatcttgccccaggaaaaatagttgggaagatttttacctcgcttgataaatctatatcccgcatgatgggtacaccatctgcaccacttccaccgttgccacatggatcttttagtgataaagagagccactctatacctgcggcagcaaaatttgttaatagccaatcggtaatggtcatgccatcgttaataccatctgcttcaatgcagtcaatgactgagatagcagaggatagtggtggcactggcaggaaaattgcacacaacagaagtgtttctgagccggactttggtagatcatccaaacagggtgctggtggatcagatggtacacagagcagtgcatcaggatccagcagttctcgatttggttggctagtgcagaagactatgggattagtgtcaaaatcccaccgccaggcaaaattaggggatcagaacaaattttactatgatgaaaaattgaagcggtgggtggaggaaggtgctgctgttcctgccgaagagcctcctcttcctccacctccaacaaaaccatctttccagaatggtatgctagacaataagttgaatggccccatgagcgtaagccatgctcccaatggagtcacagaatggaaatcctcaaattcttcagagcaaggtctgggtatgccgccaattccacctagccaaaaccagttttctgctcgtggacggatgggtgtccggtccagatatgttgacacattcaatagatcaggtgcatctggtgcaatgccatcatataacaaaccagctgctccatctatgacaccaccagctggtgccaagttcttcatgccaactgcagcacctgttgccgcggatcagatgataccacaccaagcagcagagatacacagtgaaaccatccatcaggatgagcggtcagcctcaccgccagcagaaacatcattttcttcaaccccaccacccacgcaatttccatcaccagtgcaatcaacaatttatcggcaatctagtatggagaacatctccaccccttaccagggttccggggtatcgtcattaagcaacgacagctcattctcaaaatctcgagccgcgtcctggagtgggacatactctgagcagtttaatgcttttgcgggcactatatcgcctgacagacagacgacgcattcaccactgatgcctggcaaaccaccacacagccgttccaacagcaactcatcagggcatctcaatggattggcagaggatcttcatgaggtcgagctgtaactggcgactggtcagcatgaccgtcgcaactcgtgtcttaaaggcagcgatgacaacccctccccaagcaggtgacagaaaagaaggtgcccttaaaatgctgaccacggggatgccgcagctggaatgggcttggtgtgactttgcacgagattctggggcgcgctctaaaccaccgaggtgcgtcaggcctgtactaatagagatgcagggtttttttttgtagccatatatacatatatgttggttttgtgttttagagagaagggaaagggttgggtgggcctttgtttacaggtgggaagggaagagaagcagcatgcagatgcccttgtacagataatctgcccctacccagtttgtttaaaacgcaaacaacgccattttggttttagttccctggagaaggatagaggagaaggtgtgtgtctttgtagtgtgagaagcatggctctgtagtgttgttgttatagtgtactactactgtgctagccagccgcatacacagactgtttattctttggagacgaatcaattctttcatcttgactagggcattattatttgtta

SEQ ID NO: 217472 - DNA, 1013 bp, Zea Mays
atagagtgccctcaaccatataacttttcccgaccaccgccgttcctctcttctccaaatccaaattggtaaatttcccaaatccggtgcccccacaccggcatcctcacctcgtcagcgccgccggccttccttccattctccatccccgctcagtcggataggcgccggttggggaaaattctgttcggactgttcatcttgtcgagatggaggatgagtacgacatgaacgagccagtcgatgacatggagggggaggatgagtaccaagagctcgtgattagggactctgatgcggaggatgaagacgatgcggaccaattgcataagctctccgacacttcagcagcagatgcaagaagtgggaaagatattcaaggaataccctgggagacgatagaagtcacaagagaaacgtacaggcaggcccgactagagcagtacaagaactacgagaacatacctaattctggagtagcagcaatgatggcatgcaaatcaaccgagaaaggaagaacatattatgaattcagacgaaatactagatctgtgaaatccactatctctcactttcagctgagaaatttagtatgggcaacatcgaagcatgatgtctacctgttattgcattactctgtacttcactggtcggccttaaatggtgtggatacagaaattatggatgtacatggacatgttgcaccgagtgagaagcacccaggaagcttattagaaggttttttgcatactcaaattagtaccatggcagtgaaggataatttgttagtagctggtggttttcaaggagagctaatatgcaaacacctagatcgagaaggaataagcttttgctgcaggacaacatatgatgataatgcaattaccaatgcattggagatattcaatacatctaggcaagtgaatagtctagccatttaaccttgtgaaacgtacatcaggtcaaggataaaagcccatttggcccttgttttggttccttttttattattt

SEQ ID NO: 217473 - DNA, 1061 bp, Zea Mays
ggaacatatggctaaaaaaatagagtgccctcaaccatataacttttcccgaccaccgccgttcctctcttctccaaatccaaattggtaaatttcccaaatccggtgcccccacaccggcatcctcacctcgtcagcgccgccggccttccttccattctccatccccgctcagtcggataggcgccggttggggaaaattctgttcggactgttcatcttgcatgtctcattatcacagcgccgattttgaagagatggaggatgagtacgacatgaacgagccagtcgatgacatggagggggaggatgagtaccaagagctcgtgattagggactctgatgcggaggatgaagacgatgcggaccaattgcataagctctccgacacttcagcagcagatgcaagaagtgggaaagatattcaaggaataccctgggagacgatagaagtcacaagagaaacgtacaggcaggcccgactagagcagtacaagaactacgagaacatacctaattctggagtagcagcaatgatggcatgcaaatcaaccgagaaaggaagaacatattatgaattcagacgaaatactagatctgtgaaatccactatctctcactttcagctgagaaatttagtatgggcaacatcgaagcatgatgtctacctgttattgcattactctgtacttcactggtcggccttaaatggtgtggatacagaaattatggatgtacatggacatgttgcaccgagtgagaagcacccaggaagcttattagaaggttttttgcatactcaaattagtaccatggcagtgaaggataatttgttagtagctggtggttttcaaggagagctaatatgcaaacacctagatcgagaaggaataagcttttgctgcaggacaacatatgatgataatgcaattaccaatgcattggagatattcaatacatctaggcaagtgaatagtctagccatttaaccttgtgaaacgtacatcaggtcaaggataaaagcccatttggcccttgttttggttccttttttattattt

SEQ ID NO: 217474 - DNA, 3635 bp, Zea Mays
cgcaaattgggcttgctggctgcggttgttttcctagctagcgcccctcccccctttgaccggcggctatctgaagcggcgcgacatgcttggggttctgaacgcatgggctcgcgcgcgcgcccgcccatttgcttgcgttgacctcttcccaccaccacccagcactccggccgcggaagccgcgctggggaggcggttggtgtggtgccccgccggcttagattgatgaatcacagcgcggctcggtcgcgtggactcgacctcgtcgcctttagtacaagttgcgtcctgcgggacatagctctcgtcctccgtttcctagccttgccagtttccacgacagagagagagagagcgagaggaggaaagaagagtcatcgcagacagaagagggtgctccagcgtgcatctcgtcgcccgccgtcggcgtgattgcttggcagcaggatggaggaggccacgcggcgccgtatcacgccgacgacgacgctgctgctggccctggcggtgctggcggcgagcgttcccgccggcttctgcgccatcaaccctcaggacgcttctgctctcaacgccatccagagccaatggacgaacgcccccttgagctggtcctcggcgagcgacccctgcgacgggggctgggacggaatcatgtgcagcaacggcagggtcacgtcgctgcggctgtcaagtgtcaacatccagggcacgctcagcgacagcgtcggacagctcacccagctcatgtacctggacgtttccttcaacctcggtctcaacggccgaatgcccgctacaatcgggaacctggcgcagctcaccacgctgatcctggcaggctgtagcttcaccggagccatcccacagcaactcggcaacctgcagcagctctcgttcctggcgttgaattcgaacaagtttaccggcacaataccccctacgctgggtctactctcgaacctcttctggctggatctggctgacaatcagctcactggatctatcccggtctccacagcaacaacgccggggctcgaccaacttacccacacgaagcacttccacttcaacaagaaccagctgtctggaacactcacaggcctcttcaactccaacatgagcctgatccacatactgttcgacagcaatcaactgactggcccgataccagaggagctagggggcatttcatcgctccaagttctccgactagataggaacagccttaagggaacgattcctcctaacatcagcaacttggtcaatctgaacgagctgaacttggccagcaaccagctcactggaccgttgccagatctaagcagcatgaccaaattgaatgtcgtggatttaagcaacaactccttcgccgtttcagcagccccaaactggttcacaactttaacatctctaacctccgtatcaatatcttctggaaagctttctggcgctgtccctaagggtctcttcaggttgccccagctgcagcaagttgtgctgagcaacaacgagttcaacgggacacttgaggtcacaggcaacatcagcagtcagcttcaggctatcaatctcatgaataacggcattgctgctgccaatgtcaccccaagctacaacaagactctagtgctactagggaacccgggctgcgtggacccagagttgaaagtcttctgcagcctcaagcaggagagaatgatagcgtacaacaccagcctggccaagtgctcctctacggcctcgtgttccagtgaccagcgcctgaaccctgcaaactgcggctgcgcatacccctacgccgggaagatggtattcagagcgccgctcttcacggacctgacgaacagcgccacctttcagcagctggaggcgagcttcacgacgcagttgtctctccgcgatggctccgtgttcctctccgacatccacttcaatagcgacaactacctccagattcaggtggcgcttttcccgtcgtctggggtgtccttcagcgtggcggatctgatacggataggcttcgatctgagcaaccagacttacaaaccaccgtcgaattttggaccctattacttcattgcagatccatacgctcttttggcaggtgcttcttctcgtggcagtaaaaaatcacatatcagcactggcgctatcgctggaattgcggtagccggtggaattcttgtgattgccctcattggcatggtattatttgcgttgcgacagaaaagaagggtcaaggaagtgacaggacgaaccgaccctttcgtttcatggggagtttcccagaaagacagtggaggggctccacagcttaaaggagcaaggttgttctctctgaatgagctgaagaactgcaccaacaatttttcggacacccatgagataggctcaggaggctatggaaaggtgtacaagggaacactcgttgatggaacgcgggttgccataaagagagcagagcgcggatcaatgcaaggtgtggtggagttcaagaacgagatcgagctgctgtccagggttcatcacaggaacctggtgagcctgattggcttctgctacgaacaaggggagcagatgctggtgtacgagtacgtctccagcggaacgctgagagagaacttactagtgagaggaacgtacctggactggaagaagaggctcaggatcgcgctcgggtcagcgaggggacttgcgtaccttcacgagctcgccgatccgcctatcatccaccgggacgtcaagtccaccaatatcctcctcgacgaccacctcaaagccaaggtcgccgacttcggcctctccaagctcgtcgcggacacccagaagggccacgtctccacgcaagtgaaaggaacgctgggttacttggatccggagtactacatgacgcagcagctgtcggagaagagcgacgtgtacagcttcggggtggtgatgctggagctggtgagcgggcggcagccgatcgagagcggcaagtacatcgtgcgcgaggtcaagctggccatcgaccccaacgaccgcgaccactacgggctgcggggcctcctggacccggcgatccgggacaacgcgcgcaccgccgggttcaggcggttcgtgcagctggcgatgctgtgcgtggacgagtcggcggcggcgcggccggccatgggcgaggtggtgaaggacatcgaggccatgctgcagaacgaggtctccgggcccgacggggccaccagctccgccggctcctccgccaacgacttcgacggcgccggcggcggagcgaggtcgcacccgtacagcgacgtcgagatcacgagaggctcgtacggggacaacgcgtcggactacatgccgtacttcgaggtcaagcctaagtagaccttccagtttcagacttgtatagcttgtgagatacattgtatagatttgtattatatttcacgtttatattttttggtttctcgagcttaatttttaccatgctacttccgatctatcatgacgcaaactgtacattcctcgaaattttccaagataagttgttctgttcttatttagaagtcagattttctctcaccgtttcaaacttatggactagtttggaaactccattttccttatatgaccagtgatttccc

SEQ ID NO: 217475 - DNA, 1393 bp, Zea Mays
agaaaaatggttctttcttagtgtgacacggacacacttgctcgtccacatcccttcctccagccaccgacctcccaaggatgcgctcttgccgccggcctcccaaggatgcgctcttgccgcccctcttctcgcgccgccgctgccatcgccatgtcgaagcgcgctacgtacgctccgtcctccattcgctcccgacgatccgactcgttcgtttgttgctcctttcgcttactgccagacctagccggcttctgcgttgaaatggatgaactgccgcggtctcatacattttctgggatccagaaatttcggacattgtgatcttctcggccccccaggacttcaggatactgaacacctgctccagccttgattttcgagccctggtgcttgagtacatgtccaatggaagcttggagatgctcttgcactctgaagacagaagtcacatggggttccaattccatacaaggatggacaccatgctagacgtgtctatggcaatggaatatctgcaccatgagcatcacgaggtggttctgcactgtgacttgaagccaagcaatgtgctgttcgatgatgatatgacagcacacgtagcagactttggcatcgcaaagttgctactgggtgatgacaactccatggtcgtttccaccatgcctggaacacttggatacatggcaccagagtatggatctcttggaaaggcatcgcgcaagagtgatgtgttcagctttggaatcatgctttttgaagtcttcactgggaagaggcccacagatacgatgtttgagggagaactgagcattaggcagtgggttcaacaagcatttccatctcagcttgacactgtcgtggacagccagctgctgcaggatgccatttcttcttcagccaacctgaacgaggttttgcccctaatatttgagctcggtttgctctgcacgactgattcacctaaccaaaggatgtcaatgagtgatgtagtagtgaccctgaagaagatcaaaatgaactacaccaaatttggcatcagcaaggacacaatgtccttccctgcaattgatcacgcttaattctacatgtctagtttcttcggttctgcagtggaacaactgcatcagctaccttttactgtatttttttttttacaaaagttgtttcttggataactcttagtaatatatgggcatattactattgtcaggtgtgaaataagtttctgtaatttaaattaaaagaaaaggttgcgtgacattcatgtgcctgaacagagatgtcataattttatagtttgatcttttgtggtccattacgacccttaaacgttaagggattgttttgttcttacatgttcctattttgtaaaattatttgtggcacactg

SEQ ID NO: 217476 - DNA, 388 bp, Zea Mays
cagtcgaccacggcaccaccatcatgcggcgaagaccgaagaccgaagaccgttagcgccagcgggaagcttcgttgcatttctcccccaactccacccgcctaccccgccccgcctcgaaggggaaagggcactcccgcgcccccaagtcgaaacgcaaggacagtttgcttaccggttttgtgttcttacttggttgtgattataatcacccgagaccttgtcgtatgtggatatcatgcttgaagatttgatatactcgtgttagcagctaaattcgaagaaaatggtgatgggaagagaggacaaatatgtgaggttagccatcccctgttgcttgacaagttgagtacattattttgttgaaaaaaaaaaaaaaaaaaaaaaa

SEQ ID NO: 217477 - DNA, 269 bp, Zea Mays
ttcacttccgctttgcgctaagccgttgcggtcggatcaacgcgggcgagcttggttttcgcgcaatttggtgtcgcgtgactggacagtttgcttaccggttttgtgttcttacttggttgtgattataatcacccgagaccttgtcgtatgtggatatcatgcttgaagatttgatatactcgtgttagcagctaaattcgaagaaaatggtgatgggaagagaggacaaatatgtgaggttagccatcccctgttgcttgacaagt

SEQ ID NO: 217478 - DNA, 2353 bp, Zea Mays
tgtctgctttatgatggcatctccacccagttcatctccaccagtatgccctctcatactctatataaacacatcaacagcatcgcaattagccacaagatcacttcgggaggcaagtgcgatttcgatctcgcagccaccttttttttgttctgttgtgtatctagtagttggaggagatatgcagtttgcacttgcattggacacgaactcaggtcctcaccagataagatcttgtgagggtgatgggattgacaggttggaaaaattaagtattgggggcagaaagcaggagaaagctttgagaaataggtgctttggtggtagagttgctgcaactacacaatgtattcttacctcagatgcttgtcctgaaactcttcattctcaaacacagtcctctaggaaaaattatgctgatgcaaaccgtgtatctgctatcattttgggcggaggcactggatctcagctctttcctctgacaagcacaagagctacgcctgctgtaagggataacactgaacatccaacgttgattactctattatagtattatacagactgtacttttcgaatttatcttagttttctacaatatttagtggattcttctcattttcaagatacacaattgatccataatcgaagtggtatgtaagacagtgagttaaaagattatattttttgggagacttccagtcaaattttcttagaagtttttttggtccagatgttcataaagtcgccgctttcatactttttttaattttttaattggtgcactattaggtacctgttggaggatgttacaggcttattgatatccctatgagtaactgcttcaacagtggtataaataagatatttgtgatgagtcagttcaattctacttcgcttaaccgccatattcatcgtacataccttgaaggcgggatcaactttgctgatggatctgtacaggtattagcggctacacaaatgcctgaagagccagctggatggttccagggtacagcagactctatcagaaaatttatctgggtactcgaggattattacagtcacaaatccattgacaacattgtaatcttgagtggcgatcagctttatcggatgaattacatggaacttgtgcagaaacatgtcgaggacgatgctgatatcactatatcatgtgctcctgttgatgagagccgagcttctaaaaatgggctagtgaagattgatcatactggacgtgtacttcaattctttgaaaaaccaaagggtgctgatttgaattctatgagagttgagaccaacttcctgagctatgctatagatgatgcacagaaatatccataccttgcatcaatgggcatttatgtcttcaagaaagatgcacttttagaccttctcaagtcaaaatatattcaattacatgactttggatctgaaatcctcccaagagctgtactagatcatagtgtgcaggcatgcatttttacgggctattgggaggatgttggaacaatcaaatcattctttgatgcaaacttggccctcactgagcagccttccaagtttgatttttatgatccaaaaacacctttcttcactgcaccccgatgcttgcctccgacgcaattggacaagtgcaagatgaaagatgcatttatctcagatggttgcttactgagagaatgcaacatcgagcattctgtgattggagtctgctcacgtgtcagctctggatgtgaactcaaggactccgtgatgatgggagcggacacctatgaaactgaagaagaagcttcaaagctactgttagctgggaaggtcccagttggaataggaaggaacacaaagataaggaactgtatcattgacatgaatgctaggattgggaagaacgtggtgatcacaaacagtaagggcatccaagaggctgatcacccggaagaagggtactacataaggtctggaatcgtggtgatcttgaagaatgcaaccatcaacgatgggtctgtcatatagatcggctgcgtttgcgtctacaaaacaagaacctacaatggtattgcatcgatggatcgtgtaaccttggtatggtaagagccgcttgacaggaagtcgagcgttcgggcgcaagatgcgttgtctggcatgctgttccttgaccatttgtgctgctagtatgtactgttataagctgccctagaagttgcagcaaacctttttatgaacctttgtatttccattacctgctttggatcaactatatctgtcatcctatatattactaaatttttacgtgtttttctaattcggtgctgcttttgggatctggcttcgatgaccgctcgacccttgg

SEQ ID NO: 217479 - DNA, 2170 bp, Zea Mays
atgggcgggcagtgctgtgagttagagcagtgtggcaatgttggtggtagtggtgacacccttcgggagcggaaggaggctggaacttcagattatttggcattctgtaaaagacccaacacccaaatgcttgaaaaaatatatcatgttgtaaaaattcgatctgcatttccttctgcaaactcttctggaagaaaggtgtctaaaactatgaacgggttacagaaagcatcgcaattagccacaagatcacttcgggaggcaagtgcgatttcgatctcgcagccaccttttttttgttctgttgtgtatctagtagttggaggagatatgcagtttgcacttgcattggacacgaactcaggtcctcaccagataagatcttgtgagggtgatgggattgacaggttggaaaaattaagtattgggggcagaaagcaggagaaagctttgagaaataggtgctttggtggtagagttgctgcaactacacaatgtattcttacctcagatgcttgtcctgaaactcttcattctcaaacacagtcctctaggaaaaattatgctgatgcaaaccgtgtatctgctatcattttgggcggaggcactggatctcagctctttcctctgacaagcacaagagctacgcctgctgtacctgttggaggatgttacaggcttattgatatccctatgagtaactgcttcaacagtggtataaataagatatttgtgatgagtcagttcaattctacttcgcttaaccgccatattcatcgtacataccttgaaggcgggatcaactttgctgatggatctgtacaggtattagcggctacacaaatgcctgaagagccagctggatggttccagggtacagcagactctatcagaaaatttatctgggtactcgaggattattacagtcacaaatccattgacaacattgtaatcttgagtggcgatcagctttatcggatgaattacatggaacttgtgcagaaacatgtcgaggacgatgctgatatcactatatcatgtgctcctgttgatgagagccgagcttctaaaaatgggctagtgaagattgatcatactggacgtgtacttcaattctttgaaaaaccaaagggtgctgatttgaattctatgagagttgagaccaacttcctgagctatgctatagatgatgcacagaaatatccataccttgcatcaatgggcatttatgtcttcaagaaagatgcacttttagaccttctcaaagctgtactagatcatagtgtgcaggcatgcatttttacgggctattgggaggatgttggaacaatcaaatcattctttgatgcaaacttggccctcactgagcagccttccaagtttgatttttatgatccaaaaacacctttcttcactgcaccccgatgcttgcctccgacgcaattggacaagtgcaagatgaaagatgcatttatctcagatggttgcttactgagagaatgcaacatcgagcattctgtgattggagtctgctcacgtgtcagctctggatgtgaactcaaggactccgtgatgatgggagcggacacctatgaaactgaagaagaagcttcaaagctactgttagctgggaaggtcccagttggaataggaaggaacacaaagataaggaactgtatcattgacatgaatgctaggattgggaagaacgtggtgatcacaaacagtaagggcatccaagaggctgatcacccggaagaagggtactacataaggtctggaatcgtggtgatcttgaagaatgcaaccatcaacgatgggtctgtcatatagatcggctgcgtttgcgtctacaaaacaagaacctacaatggtattgcatcgatggatcgtgtaaccttggtatggtaagagccgcttgacaggaagtcgagcgttcgggcgcaagatgcgttgtctggcatgctgttccttgaccatttgtgctgctagtatgtactgttataagctgccctagaagttgcagcaaacctttttatgaacctttgtatttccattacctgctttggatcaactatatctgtcatcctatatattactaaatttttacgtgtttttctaattcggtgctgcttttgggatctggcttcgatgaccgctcgacccttgg

SEQ ID NO: 217480 - DNA, 3595 bp, Zea Mays
aacctcgctccctctctggccctctctctaggagttcatcactctctctctctctctctctccctgtctcctaccgatgtctccagctccactactcaggctcgcctcactcctcttcctcttcctcgtccactcggccgccgccggcgacaccaggcgtgcgctgcacgagccgctcttccctatcgaatggaccccgccgccatccaccacggcgcctccagcaccgggattcgcctccgatccctccacacccgtcccacccgtctacaacggggggccggcgctactccccgctccgccgccaccgaacactgtcgccgcggacgcctcttcgtcccgcactggcccggccccgcggcgccacggcggcggcggcggcggaacgcccaaggcggccatcgtcgtcgcctctgcggccgcggcggccgtcctcgcgctgctcgccttcgccgccgcgtttctcctgacgggccgtctcgcgcggcaccccgcgtggacgcacaaacccaccggcctcgccgccgccgcgcaccccgggccagcctccgcggtcgtgctgcacgccgacgcggtgggcacctctgcggcggcggcggcggcctcgtcgtcgggtgcgactgccacttccacaccgcaccggaaagcccgctcggagcgcgccaggtggggcatgtgccgcgacgtcgacaccgtcccgagcccggaactcaggccgctcccgccgctccggcgcgcggggtcgtccgacgaggacgccgcgtactacacgccgggccagcgctcggcggggtccgcgggcggcgagggcgccgggaccgggacgtggagcgaggcgagcgcgtccagcccgcggaccaccaccccctcccgccgcagcctccccagcctcaccagcgatttcttcccaccgacgccggccgccgccgttccagctgcaagcgtggcgcctcctccgcccgcccctcctgtgccacgctcccgtcgcactctgccgcggactcgcttctccgcaggctccgcctcggatatgatcaaacaagtggtctcgccaccctccaacccaccaccacctcctccaccaccaccgccaagatgcaccaacgcagtcccaaaaccttctccaccaccaccggaaccatcctatacaccattgtcaacgcgccggcttcacaaactaaagcaaacagaggggccaggtgtcgctgttccgagcgcacccgtcatggcggtgaacaaggacaacgacggcatgccgattcggacgaacgatgatcctgccgctgccggcgacgaagcccgtcccaagctgaagccgctgcactgggacacggtccgggcgtcctccgaccgcgacatggtctgggaccggctcgagtccaactcattccagttggatgaggacatgatcgaggtgcttttcacgaacaatgctgcaaatgcgcctcctagggatacacttagaaagcctggagtgccgctatgcggtgcccaagagaaggtccttgatcctaagaaggcgcagaacatcgccatcctgctgcgcgcactgaacgtcactctggaagaggtcacggatgcgctgctagacggcaacgctgaatgcctgggggcggatctgttggaaaccttggcaaagatggctcctacaaaagaggaagagctcaaactccgcaacttcactggggatatatcgaagctcggttccgcggagcggtttctcagggcgctgcttgacatccctttctgcttcaaaagagtggacgccatgctctaccgggcgaatttcgacggcgaaattaactacctcaggaaatctttccagacactagagggagcctgcgacgatctaaaaggcagtagactgttcctgaagctactcgaagctgtcctgcaagccgggaaccgaatgaacgtcggcacgaaccgtgggcaggcaagagccttcaagctggacactctgctcaagctcgcggacgtcaaaggcgccgacggcaagaccaccctgctgcacttcgtcgtccaggagatggtccggtcggaggaggacgcgaggacgacgtccgagagagccgcagaggatgaggccagaaagatcgcgagagacgagacgttccgtagtaagcaagggctgaaggtagtgtccgggctgagcggcgagctcgggaacgtcaggaaggcagccgccatggacttcgacgtgcttcacggctacgtgtccaagctccaggccgggctcggcggggtcaggtcggtcctcgcgctcgagaagcagtgcgcccaattgcaagcccaaggccaccaccacaggtttttcgccaggatgcgtgggtttctcgaggaggctggggcggagatcggacgagtcaggcgcgacgaggagagggccctggggagagtgaaggagatcaccgtgtatttccacggtgacgctgccagggaggaggcgcaccctctgaggatcttcgtggtggtcagggacttcctgtccacgctggaccgtgtctgcagggagggatccgccacgaatcgcccatggcagacgcgctccatccgccccctttcatccatggcagctgctccatccgcgccctctttcttcccatcctccccctcaaagatctcgtccacctggtccccccgtaataggatctgggagcagggccaccaatgcagacgtccctcgtcgcggcgcagctgcggcctacgctcgacgtgcccgacctgctccgccacgctgacctggttatccgaggtcaaccgcatcgaggaggtcgagcagcccctcaagccggcgctcaccttcgcctcgccgtccgagagaaggttagagggggaaaaggagcaggccaaattcatcggtggcggtgtccgaacccacctcatgccgtccctcacaagtcacgagccttctctactgtggctacacgtccctcgcctagatcgagtggccagcagacgagaaaatggtggcgtcgagttggtggcgcgtgaggggtgctaccacttccggatccgaatctcaccatcccctccgctttcttgcctccagacgaattttggtgacattgagtttggcttctttcctcatgttgcacctaagactgtcgaacacattttcaaacttgtgcggcttggatgctacaacacaaatcacttcttccggtatgctgtatttgggagggtcactaaaggtgacgatacattgactaaactagagaggcttccaacccggagagaaggcatttttgtaatgccgatcgagcgtatcaacatcctatcaacttactattatgggcagcaacttgctatatgcattacaaaagtaaggctgaaaacttctgaggtgattagtcacactagggaaaacagttgtgtcaaattcgaaagaattctagactctagagtacgaactgaacccacttcaactacagtctccaagaggagaggagcttctttacttgattggagcttggtttctcttattaatatgatcatcttctttgctattcgatttgctgttccaagaagaggtatggtgagagtgatggttatccttctcagaaagggagagatcaagaaagatgagatataa

SEQ ID NO: 217481 - DNA, 2195 bp, Zea Mays
gatgggaaagatgtaaaaaatggttattttttctccaacaacctttcagaagttgcacggctcgtcaatagcaatcttcatggcccattaacaatgcgctaacaaatagacagagtccaattcatcgaggcccacgcaacgcgggcacacaaagattctacaatccgtggcggagccggtggggggatcccaatgtcgtaaatagctgcggagccggtggcggagcccgtagcgggcgctcgaaaatatctcggcacggctgggagctctggaaccttcgctggcggctccaacccccgacgaggcgacgaccacagcactcccctcctatttatttcagagaaagaagacgagagatatttttctcacgccctccccgcggaattatacctttttttttctctctctctcgcctcgcttccttcgaatccatccatctctcgcctccctttccaattcgatgcctttgtagcgctgctgcctcgcccccgccgcgtcgtcgcgggtccccggcttcgcttgctgctgcgcttccagcgtcatggacgggggatccggcaatgcctccagcggcggagcggcggtgtgctgctactacgcgctcctcggcgtccgcaagagcgcctccgccaccgacatacgcaccgcgtaccggaggctcgcgatgaagtggcacccggaccggtgggccagcgatcccggcgcggccggcgaggccaagcggcggttccagcggatccaggaggcctactcagttttatcggacaaggggaagaaggccatgtacgacgccgggctcttcgatcccctcgacgacgacgaccagggtccacggagacgagctgcgtcggcgactgcagcgcggcggcgtgcagcaggcagacgagcgactcccactggttgcgccccagcgagtcgcccacgaacatcaccgtcttccccttcatccgtgtcaggaagaccgtggcacaacgcctgatgtcacgttgtcccagcggcgccgcggccggcgtcacgccacgcggatggtcacccacgccacgtccctagaccggtgtggtacgccggcgcccacagcgtcgatgaggaggaggtcggagcagcagtagctgtcatgggcagtgccgcagatgtggagcagtcgaatgagaggctagacgggctggagcaccacagcaggctggtgtcgctgttggccggtagccgctcctcccccaccggcaccgagagggacttgtgacccaaggatctgttcccgggggatgtggtgtttgcgctcgtcgatgatctcaggctcaaccactccaaggacccataggccatggggttatgcaatccaaagaaggaaattcctgcttgagccaattacagaaggccctgatatttgtcaaattgatggttgtagtgttaaattggaatacaagaggaggcaagtcaaatatggtaccaaacggcgcagcagcagttgatgtgcaacccgagtgtactgccgctcgaggaggccagtaagtgccaacaacatgaatagccaaagcagggaaatagggctggcgggggcacatgggtaacttggtcctggagcattggagaaggagcataccacaaggaaaccaacacgattactgggttaacgaacaactcatactttgatggagcacatgaggttcgacattatgtcaggaagcattcgaatcttggtcgtattgtgcttgaagttgctaaggactcgcaaatcccccgccaagcaaactgctagaaatcttttcagaggtggagatgatgaagatgatagtgctgatgccgacacaaatgatcctgttgtaccttggtcattaggtagagtaggagttgggcatatggtgtacatctccggtttgacttgtgccttgagttcaacaaatatgaaagtgctgagagaggtggcatctagaggacgtcatgtcgaacgtgtgaagaatttttttagaaatatgtatatttgtgcgaaactttttagaaacttgactccattttattttctatgttactctcggctttgtttcctatcctttccaatgacttgctatgcatttgcactgtatttggcatgtttaaaactgctacacaaaacttgctatatattttgtccaaaaatactatatccttgttatgattgattgatctttattttgtctgctcttctattcttgcgtggg

SEQ ID NO: 217482 - DNA, 2832 bp, Zea Mays
cacagcatcgccatgcccccgtcgccccacccccgcgcgcgtcttcctccggcatgcgccagcccccccgagctcgcccgcgcaccaatctcgccgtcgggtatcccgcccgcgagcccgcgcaccaagctccttccccgcgacaagctccctcccccgcgacgcgtcttcctcctcgccctagatcgccgccccagctctctcctcaccccgcaatccccgccgcccatgctccgctctctactcgccccagatcgtcgcccctgttcgcgtggattgggtaccggtcccaactatctccatggattgcgcgtccgcgacaacccaatctcctcccggtctccatggaaggcgcgtcctccccccgtgattctcgattccccgcgtccgcgccccagatccactctcctctctcccacaatccccacggactctgccccgtatcaccaccccggctccttagaacgtgatccactctcctctctcctgcaatccccgctacctcaacccagatcgccgccctcgctctcgatcctcgcccacgctctccatggaaggcgaggccgcgatgctcgcgtggatctatgtagaggctgcgacgctctcccaggaagactactgccagtgctccgtgctccatgcgccgcgctggaacgccaccgtgcggtccatgtcctcgtagtatcgcccagactcgcccatgtagtcccacctgcatccaccgaccaccaagcacactctcactgcagaccagagaggattgccacgaataggtgtgtgcagttctactctacccctgcatcgagccggtgtgcgtccaccagaggccggagttgaaggagagcacgtcggcgtcgcgccatgactcggcgttctcgtagatgtcgtccagcatcagcacctgcttcccctggaccacgtcgatgtccaccagggtccacggagacgagctgcgtcggcgactgcagcgcggcggcgtgcagcaggcagacgagcgactcccactggttgcgccccagcgagtcgcccacgaacatcaccgtcttccccttcatccgtgtcaggaagaccgtggcacaacgcctgatgtcacgttgtcccagcggcgccgcggccggcgtcacgccacgcggatggtcacccacgccacgtccctagaccggtgtggtacgccggcgcccacagcgtcgatgaggaggaggtcggagcagcagtagctgtcatgggcagtgccgcagatgtggagcagtcgaatgagaggctagacgggctggagcaccacagcaggctggtgtcgctgttggccggtagccgctcctcccccaccggcaccgagagggacttgtgacccaaggatctgttcccgggggatgtggtgtttgcgctcgtcgatgatctcaggctcaaccactccaaggacccataggccatggggttatgcaatccaaaggtctccatcgccaatttcattttgtagacaaataagttagctcttctgatggcataccatttatagattgccaacgatctgaaggcatatatgaaggcttgttatctcttctgtgtttaattgatcagtgactttgatttggacctggttatcagcttgttatttctatctgaattttctcgctttatttgtactacactcgtgctaattatgtgagaatgatttgtgtcactatggtgttcatctgttattttatactattatatgtattcatctgtcatgttgttgaactcctgttatcaattgcagaaggaaattcctgcttgagccaattacagaaggccctgatatttgtcaaattgatggttgtagtgttaaattggaatacaagaggaggcaagtcaaatatggtttgtgtgacagcacgttactaacttactctactatatctgcatgagaaaggatgaaccctgtttgcatgtatactaattaatctacggattcattaatgtgtgaataagattttatttaattatgacagcaaacgtgacatgccattacaatttcgtttatgcaaaaaagtaccaaacggcgcagcagcagttgatgtgcaacccgagtgtactgccgctcgaggaggccagtaagtgccaacaacatgaatagccaaagcagggaaatagggctggcgggggcacatgggtaacttggtcctggagcattggagaaggagcataccacaaggaaaccaacacgcttcttactctagcagagttccttgcttcctgaaggcctcatagctcagattactgggttaacgaacaactcatactttgatggagcacatgaggttcgacattatgtcaggaagcattcgaatcttggtcgtattgtgcttgaagttgctaaggactcgcaaatcccccgccaagcaaactgctagaaatcttttcagaggtggagatgatgaagatgatagtgctgatgccgacacaaatgatcctgttgtaccttggtcattaggtagagtaggagttgggcatatggtgtacatctccggtttgacttgtgccttgagttcaacaaatatgaaagtgctgagagaggtggcatctagaggacgtcatgtcgaacgtgtgaagaatttttttagaaatatgtatatttgtgcgaaactttttagaaacttgactccattttattttctatgttactctcggctttgtttcctatcctttccaatgacttgctatgcatttgcactgtatttggcatgtttaaaactgctacacaaaacttgctatatattttgtccaaaaatactatatccttgttatgattgattgatctttattttgtctgctcttctattcttgcgtggg

SEQ ID NO: 217483 - DNA, 2783 bp, Zea Mays
cacagcatcgccatgcccccgtcgccccacccccgcgcgcgtcttcctccggcatgcgccagcccccccgagctcgcccgcgcaccaatctcgccgtcgggtatcccgcccgcgagcccgcgcaccaagctccttccccgcgacaagctccctcccccgcgacgcgtcttcctcctcgccctagatcgccgccccagctctctcctcaccccgcaatccccgccgcccatgctccgctctctactcgccccagatcgtcgcccctgttcgcgtggattgggtaccggtcccaactatctccatggattgcgcgtccgcgacaacccaatctcctcccggtctccatggaaggcgcgtcctccccccgtgattctcgattccccgcgtccgcgccccagatccactctcctctctcccacaatccccacggactctgccccgtatcaccaccccggctccttagaacgtgatccactctcctctctcctgcaatccccgctacctcaacccagatcgccgccctcgctctcgatcctcgcccacgctctccatggaaggcgaggccgcgatgctcgcgtggatctatgtagaggctgcgacgctctcccaggaagactactgccagtgctccgtgctccatgcgccgcgctggaacgccaccgtgcggtccatgtcctcgtagtatcgcccagactcgcccatgtagtcccacctgcatccaccgaccaccaagcacactctcactgcagaccagagaggattgccacgaataggtgtgtgcagttctactctacccctgcatcgagccggtgtgcgtccaccagaggccggagttgaaggagagcacgtcggcgtcgcgccatgactcggcgttctcgtagatgtcgtccagcatcagcacctgcttcccctggaccacgtcgatgtccaccaggaagaccgtggcacaacgcctgatgtcacgttgtcccagcggcgccgcggccggcgtcacgccacgcggatggtcacccacgccacgtccctagaccggtgtggtacgccggcgcccacagcgtcgatgaggaggaggtcggagcagcagtagctgtcatgggcagtgccgcagatgtggagcagtcgaatgagaggctagacgggctggagcaccacagcaggctggtgtcgctgttggccggtagccgctcctcccccaccggcaccgagagggacttgtgacccaaggatctgttcccgggggatgtggtgtttgcgctcgtcgatgatctcaggctcaaccactccaaggacccataggccatggggttatgcaatccaaaggtctccatcgccaatttcattttgtagacaaataagttagctcttctgatggcataccatttatagattgccaacgatctgaaggcatatatgaaggcttgttatctcttctgtgtttaattgatcagtgactttgatttggacctggttatcagcttgttatttctatctgaattttctcgctttatttgtactacactcgtgctaattatgtgagaatgatttgtgtcactatggtgttcatctgttattttatactattatatgtattcatctgtcatgttgttgaactcctgttatcaattgcagaaggaaattcctgcttgagccaattacagaaggccctgatatttgtcaaattgatggttgtagtgttaaattggaatacaagaggaggcaagtcaaatatggtttgtgtgacagcacgttactaacttactctactatatctgcatgagaaaggatgaaccctgtttgcatgtatactaattaatctacggattcattaatgtgtgaataagattttatttaattatgacagcaaacgtgacatgccattacaatttcgtttatgcaaaaaagtaagttgcttatagtttagcctttggtttcaatttgcactttatagaattatactggcagagctcctgacggagcacctgacggagctcgccacaggtaccaaacggcgcagcagcagttgatgtgcaacccgagtgtactgccgctcgaggaggccagtaagtgccaacaacatgaatagccaaagcagggaaatagggctggcgggggcacatgggtaacttggtcctggagcattggagaaggagcataccacaaggaaaccaacacgagttccttgcttcctgaaggcctcatagctcagattactgggttaacgaacaactcatactttgatggagcacatgaggttcgacattatgtcaggaagcattcgaatcttggtcgtattgtgcttgaagttgctaaggactcgcaaatcccccgccaagcaaactgctagaaatcttttcagaggtggagatgatgaagatgatagtgctgatgccgacacaaatgatcctgttgtaccttggtcattaggtagagtaggagttgggcatatggtgtacatctccggtttgacttgtgccttgagttcaacaaatatgaaagtgctgagagaggtggcatctagaggacgtcatgtcgaacgtgtgaagaatttttttagaaatatgtatatttgtgcgaaactttttagaaacttgactccattttattttctatgttactctcggctttgtttcctatcctttccaatgacttgctatgcatttgcactgtatttggcatgtttaaaactgctacacaaaacttgctatatattttgtccaaaaatactatatccttgttatgattgattgatctttattttgtctgctcttctattcttgcgtggg

SEQ ID NO: 217484 - DNA, 1836 bp, Zea Mays
cacagcatcgccatgcccccgtcgccccacccccgcgcgcgtcttcctccggcatgcgccagcccccccgagctcgcccgcgcaccaatctcgccgtcgggtatcccgcccgcgagcccgcgcaccaagctccttccccgcgacaagctccctcccccgcgacgcgtcttcctcctcgccctagatcgccgccccagctctctcctcaccccgcaatccccgccgcccatgctccgctctctactcgccccagatcgtcgcccctgttcgcgtggattgggtaccggtcccaactatctccatggattgcgcgtccgcgacaacccaatctcctcccggtctccatggaaggcgcgtcctccccccgtgattctcgattccccgcgtccgcgccccagatccactctcctctctcccacaatccccacggactctgccccgtatcaccaccccggctccttagaacgtgatccactctcctctctcctgcaatccccgctacctcaacccagatcgccgccctcgctctcgatcctcgcccacgctctccatggaaggcgaggccgcgatgctcgcgtggatctatgtagaggctgcgacgctctcccaggaagactactgccagtgctccgtgctccatgcgccgcgctggaacgccaccgtgcggtccatgtcctcgtagtatcgcccagactcgcccatgtagtcccacctgcatccaccgaccaccaagcacactctcactgcagaccagagaggattgccacgaataggtgtgtgcagttctactctacccctgcatcgagccggtgtgcgtccaccagaggccggagttgaaggagagcacgtcggcgtcgcgccatgactcggcgttctcgtagatgtcgtccagcatcagcacctgcttcccctggaccacgtcgatgtccaccagaaggaaattcctgcttgagccaattacagaaggccctgatatttgtcaaattgatggttgtagtgttaaattggaatacaagaggaggcaagtcaaatatggtaccaaacggcgcagcagcagttgatgtgcaacccgagtgtactgccgctcgaggaggccagtaagtgccaacaacatgaatagccaaagcagggaaatagggctggcgggggcacatgggtaacttggtcctggagcattggagaaggagcataccacaaggaaaccaacacgcttcttactctagcagagttccttgcttcctgaaggcctcatagctcagattactgggttaacgaacaactcatactttgatggagcacatgaggttcgacattatgtcaggaagcattcgaatcttggtcgtattgtgcttgaagttgctaaggactcgcaaatcccccgccaagcaaactgctagaaatcttttcagaggtggagatgatgaagatgatagtgctgatgccgacacaaatgatcctgttgtaccttggtcattaggtagagtaggagttgggcatatggtgtacatctccggtttgacttgtgccttgagttcaacaaatatgaaagtgctgagagaggtggcatctagaggacgtcatgtcgaacgtgtgaagaatttttttagaaatatgtatatttgtgcgaaactttttagaaacttgactccattttattttctatgttactctcggctttgtttcctatcctttccaatgacttgctatgcatttgcactgtatttggcatgtttaaaactgctacacaaaacttgctatatattttgtccaaaaatactatatccttgttatgattgattgatctttattttgtctgctcttctattcttgcgtggg

SEQ ID NO: 217485 - DNA, 2054 bp, Zea Mays
acagcatcgccatgcccccgtcgccccacccccgcgcgcgtcttcctccggcatgcgccagcccccccgagctcgcccgcgcaccaatctcgccgtcgggtatcccgcccgcgagcccgcgcaccaagctccttccccgcgacaagctccctcccccgcgacgcgtcttcctcctcgccctagatcgccgccccagctctctcctcaccccgcaatccccgccgcccatgctccgctctctactcgccccagatcgtcgcccctgttcgcgtggattgggtaccggtcccaactatctccatggattgcgcgtccgcgacaacccaatctcctcccggtctccatggaaggcgcgtcctccccccgtgattctcgattccccgcgtccgcgccccagatccactctcctctctcccacaatccccacggactctgccccgtatcaccaccccggctccttagaacgtgatccactctcctctctcctgcaatccccgctacctcaacccagatcgccgccctcgctctcgatcctcgcccacgctctccatggaaggcgaggccgcgatgctcgcgtggatctatgtagaggctgcgacgctctcccaggaagactactgccagtgctccgtgctccatgcgccgcgctggaacgccaccgtgcggtccatgtcctcgtagtatcgcccagactcgcccatgtagtcccacctgcatccaccgaccaccaagcacactctcactgcagaccagagaggattgccacgaataggtgtgtgcagttctactctacccctgcatcgagccggtgtgcgtccaccagaggccggagttgaaggagagcacgtcggcgtcgcgccatgactcggcgttctcgtagatgtcgtccagcatcagcacctgcttcccctggaccacgtcgatgtccaccagaaggaaattcctgcttgagccaattacagaaggccctgatatttgtcaaattgatggttgtagtgttaaattggaatacaagaggaggcaagtcaaatatggtttgtgtgacagcacgttactaacttactctactatatctgcatgagaaaggatgaaccctgtttgcatgtatactaattaatctacggattcattaatgtgtgaataagattttatttaattatgacagcaaacgtgacatgccattacaatttcgtttatgcaaaaaagtaagttgcttatagtttagcctttggtttcaatttgcactttatagaattatactggcagagctcctgacggagcacctgacggagctcgccacaggtaccaaacggcgcagcagcagttgatgtgcaacccgagtgtactgccgctcgaggaggccagtaagtgccaacaacatgaatagccaaagcagggaaatagggctggcgggggcacatgggtaacttggtcctggagcattggagaaggagcataccacaaggaaaccaacacgattactgggttaacgaacaactcatactttgatggagcacatgaggttcgacattatgtcaggaagcattcgaatcttggtcgtattgtgcttgaagttgctaaggactcgcaaatcccccgccaagcaaactgctagaaatcttttcagaggtggagatgatgaagatgatagtgctgatgccgacacaaatgatcctgttgtaccttggtcattaggtagagtaggagttgggcatatggtgtacatctccggtttgacttgtgccttgagttcaacaaatatgaaagtgctgagagaggtggcatctagaggacgtcatgtcgaacgtgtgaagaatttttttagaaatatgtatatttgtgcgaaactttttagaaacttgactccattttattttctatgttactctcggctttgtttcctatcctttccaatgacttgctatgcatttgcactgtatttggcatgtttaaaactgctacacaaaacttgctatatattttgtccaaaaatactatatccttgttatgattgattgatctttattttgtctgctcttctattcttgcgtggg

SEQ ID NO: 217486 - DNA, 2912 bp, Zea Mays
acagcatcgccatgcccccgtcgccccacccccgcgcgcgtcttcctccggcatgcgccagcccccccgagctcgcccgcgcaccaatctcgccgtcgggtatcccgcccgcgagcccgcgcaccaagctccttccccgcgacaagctccctcccccgcgacgcgtcttcctcctcgccctagatcgccgccccagctctctcctcaccccgcaatccccgccgcccatgctccgctctctactcgccccagatcgtcgcccctgttcgcgtggattgggtaccggtcccaactatctccatggattgcgcgtccgcgacaacccaatctcctcccggtctccatggaaggcgcgtcctccccccgtgattctcgattccccgcgtccgcgccccagatccactctcctctctcccacaatccccacggactctgccccgtatcaccaccccggctccttagaacgtgatccactctcctctctcctgcaatccccgctacctcaacccagatcgccgccctcgctctcgatcctcgcccacgctctccatggaaggcgaggccgcgatgctcgcgtggatctatgtagaggctgcgacgctctcccaggaagactactgccagtgctccgtgctccatgcgccgcgctggaacgccaccgtgcggtccatgtcctcgtagtatcgcccagactcgcccatgtagtcccacctgcatccaccgaccaccaagcacactctcactgcagaccagagaggattgccacgaataggtgtgtgcagttctactctacccctgcatcgagccggtgtgcgtccaccagaggccggagttgaaggagagcacgtcggcgtcgcgccatgactcggcgttctcgtagatgtcgtccagcatcagcacctgcttcccctggaccacgtcgatgtccaccagggtccacggagacgagctgcgtcggcgactgcagcgcggcggcgtgcagcaggcagacgagcgactcccactggttgcgccccagcgagtcgcccacgaacatcaccgtcttccccttcatccgtgtcaggaagaccgtggcacaacgcctgatgtcacgttgtcccagcggcgccgcggccggcgtcacgccacgcggatggtcacccacgccacgtccctagaccggtgtggtacgccggcgcccacagcgtcgatgaggaggaggtcggagcagcagtagctgtcatgggcagtgccgcagatgtggagcagtcgaatgagaggctagacgggctggagcaccacagcaggctggtgtcgctgttggccggtagccgctcctcccccaccggcaccgagagggacttgtgacccaaggatctgttcccgggggatgtggtgtttgcgctcgtcgatgatctcaggctcaaccactccaaggacccataggccatggggttatgcaatccaaaggtctccatcgccaatttcattttgtagacaaataagttagctcttctgatggcataccatttatagattgccaacgatctgaaggcatatatgaaggcttgttatctcttctgtgtttaattgatcagtgactttgatttggacctggttatcagcttgttatttctatctgaattttctcgctttatttgtactacactcgtgctaattatgtgagaatgatttgtgtcactatggtgttcatctgttattttatactattatatgtattcatctgtcatgttgttgaactcctgttatcaattgcagaaggaaattcctgcttgagccaattacagaaggccctgatatttgtcaaattgatggttgtagtgttaaattggaatacaagaggaggcaagtcaaatatggtttgtgtgacagcacgttactaacttactctactatatctgcatgagaaaggatgaaccctgtttgcatgtatactaattaatctacggattcattaatgtgtgaataagattttatttaattatgacagcaaacgtgacatgccattacaatttcgtttatgcaaaaaagtaagttgcttatagtttagcctttggtttcaatttgcactttatagaattatactggcagagctcctgacggagcacctgacggagctcgccacaggtaccaaacggcgcagcagcagttgatgtgcaacccgagtgtactgccgctcgaggaggccagtaagtgccaacaacatgaatagccaaagcagggaaatagggctggcgggggcacatgggtaacttggtcctggagcattggagaaggagcataccacaaggaaaccaacacgagttccttgcttcctgaaggcctcatagctcagattactgggttaacgaacaactcatactttgatggagcacatgaggttcgacattatgtcaggaagcattcgaatcttggtcgtattgtgcttgaagttgctaaggactcgcaaatcccccgccaagcaaactgctagaaatcttttcagaggtggagatgatgaagatgatagtgctgatgccgacacaaatgatcctgttgtaccttggtcattaggtagagtaggagttgggcatatggtgtacatctccggtttgacttgtgccttgagttcaacaaatatgaaagtgctgagagaggtggcatctagaggacgtcatgtcgaacgtgtgaagaatttttttagaaatatgtatatttgtgcgaaactttttagaaacttgactccattttattttctatgttactctcggctttgtttcctatcctttccaatgacttgctatgcatttgcactgtatttggcatgtttaaaactgctacacaaaacttgctatatattttgtccaaaaatactatatccttgttatgattgattgatctttattttgtctgctcttctattcttgcgtggg

SEQ ID NO: 217487 - DNA, 1814 bp, Zea Mays
cgccatgcccccgtcgccccacccccgcgcgcgtcttcctccggcatgcgccagcccccccgagctcgcccgcgcaccaatctcgccgtcgggtatcccgcccgcgagcccgcgcaccaagctccttccccgcgacaagctccctcccccgcgacgcgtcttcctcctcgccctagatcgccgccccagctctctcctcaccccgcaatccccgccgcccatgctccgctctctactcgccccagatcgtcgcccctgttcgcgtggattgggtaccggtcccaactatctccatggattgcgcgtccgcgacaacccaatctcctcccggtctccatggaaggcgcgtcctccccccgtgattctcgattccccgcgtccgcgccccagatccactctcctctctcccacaatccccacggactctgccccgtatcaccaccccggctccttagaacgtgatccactctcctctctcctgcaatccccgctacctcaacccagatcgccgccctcgctctcgatcctcgcccacgctctccatggaaggcgaggccgcgatgctcgcgtggatctatgtagaggctgcgacgctctcccaggaagactactgccagtgctccgtgctccatgcgccgcgctggaacgccaccgtgcggtccatgtcctcgtagtatcgcccagactcgcccatgtagtcccacctgcatccaccgaccaccaagcacactctcactgcagaccagagaggattgccacgaataggtgtgtgcagttctactctacccctgcatcgagccggtgtgcgtccaccagaggccggagttgaaggagagcacgtcggcgtcgcgccatgactcggcgttctcgtagatgtcgtccagcatcagcacctgcttcccctggaccacgtcgatgtccaccagaaggaaattcctgcttgagccaattacagaaggccctgatatttgtcaaattgatggttgtagtgttaaattggaatacaagaggaggtaccaaacggcgcagcagcagttgatgtgcaacccgagtgtactgccgctcgaggaggccagtaagtgccaacaacatgaatagccaaagcagggaaatagggctggcgggggcacatgggtaacttggtcctggagcattggagaaggagcataccacaaggaaaccaacacgcttcttactctagcagagttccttgcttcctgaaggcctcatagctcagattactgggttaacgaacaactcatactttgatggagcacatgaggttcgacattatgtcaggaagcattcgaatcttggtcgtattgtgcttgaagttgctaaggactcgcaaatcccccgccaagcaaactgctagaaatcttttcagaggtggagatgatgaagatgatagtgctgatgccgacacaaatgatcctgttgtaccttggtcattaggtagagtaggagttgggcatatggtgtacatctccggtttgacttgtgccttgagttcaacaaatatgaaagtgctgagagaggtggcatctagaggacgtcatgtcgaacgtgtgaagaatttttttagaaatatgtatatttgtgcgaaactttttagaaacttgactccattttattttctatgttactctcggctttgtttcctatcctttccaatgacttgctatgcatttgcactgtatttggcatgtttaaaactgctacacaaaacttgctatatattttgtccaaaaatactatatccttgttatgattgattgatctttattttgtctgctcttctattcttgcgtggg

SEQ ID NO: 217488 - DNA, 1942 bp, Zea Mays
cccgtcgccccacccccgcgcgcgtcttcctccggcatgcgccagcccccccgagctcgcccgcgcaccaatctcgccgtcgggtatcccgcccgcgagcccgcgcaccaagctccttccccgcgacaagctccctcccccgcgacgcgtcttcctcctcgccctagatcgccgccccagctctctcctcaccccgcaatccccgccgcccatgctccgctctctactcgccccagatcgtcgcccctgttcgcgtggattgggtaccggtcccaactatctccatggattgcgcgtccgcgacaacccaatctcctcccggtctccatggaaggcgcgtcctccccccgtgattctcgattccccgcgtccgcgccccagatccactctcctctctcccacaatccccacggactctgccccgtatcaccaccccggctccttagaacgtgatccactctcctctctcctgcaatccccgctacctcaacccagatcgccgccctcgctctcgatcctcgcccacgctctccatggaaggcgaggccgcgatgctcgcgtggatctatgtagaggctgcgacgctctcccaggaagactactgccagtgctccgtgctccatgcgccgcgctggaacgccaccgtgcggtccatgtcctcgtagtatcgcccagactcgcccatgtagtcccacctgcatccaccgaccaccaagcacactctcactgcagaccagagaggattgccacgaataggtgtgtgcagttctactctacccctgcatcgagccggtgtgcgtccaccagaggccggagttgaaggagagcacgtcggcgtcgcgccatgactcggcgttctcgtagatgtcgtccagcatcagcacctgcttcccctggaccacgtcgatgtccaccagaaggaaattcctgcttgagccaattacagaaggccctgatatttgtcaaattgatggttgtagtgttaaattggaatacaagaggagcaaacgtgacatgccattacaatttcgtttatgcaaaaaagtaagttgcttatagtttagcctttggtttcaatttgcactttatagaattatactggcagagctcctgacggagcacctgacggagctcgccacaggtaccaaacggcgcagcagcagttgatgtgcaacccgagtgtactgccgctcgaggaggccagtaagtgccaacaacatgaatagccaaagcagggaaatagggctggcgggggcacatgggtaacttggtcctggagcattggagaaggagcataccacaaggaaaccaacacgcttcttactctagcagagttccttgcttcctgaaggcctcatagctcagattactgggttaacgaacaactcatactttgatggagcacatgaggttcgacattatgtcaggaagcattcgaatcttggtcgtattgtgcttgaagttgctaaggactcgcaaatcccccgccaagcaaactgctagaaatcttttcagaggtggagatgatgaagatgatagtgctgatgccgacacaaatgatcctgttgtaccttggtcattaggtagagtaggagttgggcatatggtgtacatctccggtttgacttgtgccttgagttcaacaaatatgaaagtgctgagagaggtggcatctagaggacgtcatgtcgaacgtgtgaagaatttttttagaaatatgtatatttgtgcgaaactttttagaaacttgactccattttattttctatgttactctcggctttgtttcctatcctttccaatgacttgctatgcatttgcactgtatttggcatgtttaaaactgctacacaaaacttgctatatattttgtccaaaaatactatatccttgttatgattgattgatctttattttgtctgctcttctattcttgcgtggg

SEQ ID NO: 217489 - DNA, 1770 bp, Zea Mays
cccgtcgccccacccccgcgcgcgtcttcctccggcatgcgccagcccccccgagctcgcccgcgcaccaatctcgccgtcgggtatcccgcccgcgagcccgcgcaccaagctccttccccgcgacaagctccctcccccgcgacgcgtcttcctcctcgccctagatcgccgccccagctctctcctcaccccgcaatccccgccgcccatgctccgctctctactcgccccagatcgtcgcccctgttcgcgtggattgggtaccggtcccaactatctccatggattgcgcgtccgcgacaacccaatctcctcccggtctccatggaaggcgcgtcctccccccgtgattctcgattccccgcgtccgcgccccagatccactctcctctctcccacaatccccacggactctgccccgtatcaccaccccggctccttagaacgtgatccactctcctctctcctgcaatccccgctacctcaacccagatcgccgccctcgctctcgatcctcgcccacgctctccatggaaggcgaggccgcgatgctcgcgtggatctatgtagaggctgcgacgctctcccaggaagactactgccagtgctccgtgctccatgcgccgcgctggaacgccaccgtgcggtccatgtcctcgtagtatcgcccagactcgcccatgtagtcccacctgcatccaccgaccaccaagcacactctcactgcagaccagagaggattgccacgaataggtgtgtgcagttctactctacccctgcatcgagccggtgtgcgtccaccagaggccggagttgaaggagagcacgtcggcgtcgcgccatgactcggcgttctcgtagatgtcgtccagcatcagcacctgcttcccctggaccacgtcgatgtccaccagaaggaaattcctgcttgagccaattacagaaggccctgatatttgtcaaattgatggttgtagtgttaaattggaatacaagaggaggcaagtcaaatatggtaccaaacggcgcagcagcagttgatgtgcaacccgagtgtactgccgctcgaggaggccagtaagtgccaacaacatgaatagccaaagcagggaaatagggctggcgggggcacatgggtaacttggtcctggagcattggagaaggagcataccacaaggaaaccaacacgattactgggttaacgaacaactcatactttgatggagcacatgaggttcgacattatgtcaggaagcattcgaatcttggtcgtattgtgcttgaagttgctaaggactcgcaaatcccccgccaagcaaactgctagaaatcttttcagaggtggagatgatgaagatgatagtgctgatgccgacacaaatgatcctgttgtaccttggtcattaggtagagtaggagttgggcatatggtgtacatctccggtttgacttgtgccttgagttcaacaaatatgaaagtgctgagagaggtggcatctagaggacgtcatgtcgaacgtgtgaagaatttttttagaaatatgtatatttgtgcgaaactttttagaaacttgactccattttattttctatgttactctcggctttgtttcctatcctttccaatgacttgctatgcatttgcactgtatttggcatgtttaaaactgctacacaaaacttgctatatattttgtccaaaaatactatatccttgttatgattgattgatctttattttgtctgctcttctattcttgcgtggg

SEQ ID NO: 217490 - DNA, 2612 bp, Zea Mays
cgtcgccccacccccgcgcgcgtcttcctccggcatgcgccagcccccccgagctcgcccgcgcaccaatctcgccgtcgggtatcccgcccgcgagcccgcgcaccaagctccttccccgcgacaagctccctcccccgcgacgcgtcttcctcctcgccctagatcgccgccccagctctctcctcaccccgcaatccccgccgcccatgctccgctctctactcgccccagatcgtcgcccctgttcgcgtggattgggtaccggtcccaactatctccatggattgcgcgtccgcgacaacccaatctcctcccggtctccatggaaggcgcgtcctccccccgtgattctcgattccccgcgtccgcgccccagatccactctcctctctcccacaatccccacggactctgccccgtatcaccaccccggctccttagaacgtgatccactctcctctctcctgcaatccccgctacctcaacccagatcgccgccctcgctctcgatcctcgcccacgctctccatggaaggcgaggccgcgatgctcgcgtggatctatgtagaggctgcgacgctctcccaggaagactactgccagtgctccgtgctccatgcgccgcgctggaacgccaccgtgcggtccatgtcctcgtagtatcgcccagactcgcccatgtagtcccacctgcatccaccgaccaccaagcacactctcactgcagaccagagaggattgccacgaataggtgtgtgcagttctactctacccctgcatcgagccggtgtgcgtccaccagaggccggagttgaaggagagcacgtcggcgtcgcgccatgactcggcgttctcgtagatgtcgtccagcatcagcacctgcttcccctggaccacgtcgatgtccaccagggtccacggagacgagctgcgtcggcgactgcagcgcggcggcgtgcagcaggcagacgagcgactcccactggttgcgccccagcgagtcgcccacgaacatcaccgtcttccccttcatccgtgtcaggaagaccgtggcacaacgcctgatgtcacgttgtcccagcggcgccgcggccggcgtcacgccacgcggatggtcacccacgccacgtccctagaccggtgtggtacgccggcgcccacagcgtcgatgaggaggaggtcggagcagcagtagctgtcatgggcagtgccgcagatgtggagcagtcgaatgagaggctagacgggctggagcaccacagcaggctggtgtcgctgttggccggtagccgctcctcccccaccggcaccgagagggacttgtgacccaaggatctgttcccgggggatgtggtgtttgcgctcgtcgatgatctcaggctcaaccactccaaggacccataggccatggggttatgcaatccaaaggtctccatcgccaatttcattttgtagacaaataagttagctcttctgatggcataccatttatagattgccaacgatctgaaggcatatatgaaggcttgttatctcttctgtgtttaattgatcagtgactttgatttggacctggttatcagcttgttatttctatctgaattttctcgctttatttgtactacactcgtgctaattatgtgagaatgatttgtgtcactatggtgttcatctgttattttatactattatatgtattcatctgtcatgttgttgaactcctgttatcaattgcagaaggaaattcctgcttgagccaattacagaaggccctgatatttgtcaaattgatggttgtagtgttaaattggaatacaagaggaggtaccaaacggcgcagcagcagttgatgtgcaacccgagtgtactgccgctcgaggaggccagtaagtgccaacaacatgaatagccaaagcagggaaatagggctggcgggggcacatgggtaacttggtcctggagcattggagaaggagcataccacaaggaaaccaacacgagttccttgcttcctgaaggcctcatagctcagattactgggttaacgaacaactcatactttgatggagcacatgaggttcgacattatgtcaggaagcattcgaatcttggtcgtattgtgcttgaagttgctaaggactcgcaaatcccccgccaagcaaactgctagaaatcttttcagaggtggagatgatgaagatgatagtgctgatgccgacacaaatgatcctgttgtaccttggtcattaggtagagtaggagttgggcatatggtgtacatctccggtttgacttgtgccttgagttcaacaaatatgaaagtgctgagagaggtggcatctagaggacgtcatgtcgaacgtgtgaagaatttttttagaaatatgtatatttgtgcgaaactttttagaaacttgactccattttattttctatgttactctcggctttgtttcctatcctttccaatgacttgctatgcatttgcactgtatttggcatgtttaaaactgctacacaaaacttgctatatattttgtccaaaaatactatatccttgttatgattgattgatctttattttgtctgctcttctattcttgcgtggg

SEQ ID NO: 217491 - DNA, 1867 bp, Zea Mays
cgtcgccccacccccgcgcgcgtcttcctccggcatgcgccagcccccccgagctcgcccgcgcaccaatctcgccgtcgggtatcccgcccgcgagcccgcgcaccaagctccttccccgcgacaagctccctcccccgcgacgcgtcttcctcctcgccctagatcgccgccccagctctctcctcaccccgcaatccccgccgcccatgctccgctctctactcgccccagatcgtcgcccctgttcgcgtggattgggtaccggtcccaactatctccatggattgcgcgtccgcgacaacccaatctcctcccggtctccatggaaggcgcgtcctccccccgtgattctcgattccccgcgtccgcgccccagatccactctcctctctcccacaatccccacggactctgccccgtatcaccaccccggctccttagaacgtgatccactctcctctctcctgcaatccccgctacctcaacccagatcgccgccctcgctctcgatcctcgcccacgctctccatggaaggcgaggccgcgatgctcgcgtggatctatgtagaggctgcgacgctctcccaggaagactactgccagtgctccgtgctccatgcgccgcgctggaacgccaccgtgcggtccatgtcctcgtagtatcgcccagactcgcccatgtagtcccacctgcatccaccgaccaccaagcacactctcactgcagaccagagaggattgccacgaataggtgtgtgcagttctactctacccctgcatcgagccggtgtgcgtccaccagaggccggagttgaaggagagcacgtcggcgtcgcgccatgactcggcgttctcgtagatgtcgtccagcatcagcacctgcttcccctggaccacgtcgatgtccaccagaaggaaattcctgcttgagccaattacagaaggccctgatatttgtcaaattgatggttgtagtgttaaattggaatacaagaggaggcaagtcaaatatgaattatactggcagagctcctgacggagcacctgacggagctcgccacaggtaccaaacggcgcagcagcagttgatgtgcaacccgagtgtactgccgctcgaggaggccagtaagtgccaacaacatgaatagccaaagcagggaaatagggctggcgggggcacatgggtaacttggtcctggagcattggagaaggagcataccacaaggaaaccaacacgcttcttactctagcagagttccttgcttcctgaaggcctcatagctcagattactgggttaacgaacaactcatactttgatggagcacatgaggttcgacattatgtcaggaagcattcgaatcttggtcgtattgtgcttgaagttgctaaggactcgcaaatcccccgccaagcaaactgctagaaatcttttcagaggtggagatgatgaagatgatagtgctgatgccgacacaaatgatcctgttgtaccttggtcattaggtagagtaggagttgggcatatggtgtacatctccggtttgacttgtgccttgagttcaacaaatatgaaagtgctgagagaggtggcatctagaggacgtcatgtcgaacgtgtgaagaatttttttagaaatatgtatatttgtgcgaaactttttagaaacttgactccattttattttctatgttactctcggctttgtttcctatcctttccaatgacttgctatgcatttgcactgtatttggcatgtttaaaactgctacacaaaacttgctatatattttgtccaaaaatactatatccttgttatgattgattgatctttattttgtctgctcttctattcttgcgtggg

SEQ ID NO: 217492 - DNA, 2521 bp, Zea Mays
cgccccacccccgcgcgcgtcttcctccggcatgcgccagcccccccgagctcgcccgcgcaccaatctcgccgtcgggtatcccgcccgcgagcccgcgcaccaagctccttccccgcgacaagctccctcccccgcgacgcgtcttcctcctcgccctagatcgccgccccagctctctcctcaccccgcaatccccgccgcccatgctccgctctctactcgccccagatcgtcgcccctgttcgcgtggattgggtaccggtcccaactatctccatggattgcgcgtccgcgacaacccaatctcctcccggtctccatggaaggcgcgtcctccccccgtgattctcgattccccgcgtccgcgccccagatccactctcctctctcccacaatccccacggactctgccccgtatcaccaccccggctccttagaacgtgatccactctcctctctcctgcaatccccgctacctcaacccagatcgccgccctcgctctcgatcctcgcccacgctctccatggaaggcgaggccgcgatgctcgcgtggatctatgtagaggctgcgacgctctcccaggaagactactgccagtgctccgtgctccatgcgccgcgctggaacgccaccgtgcggtccatgtcctcgtagtatcgcccagactcgcccatgtagtcccacctgcatccaccgaccaccaagcacactctcactgcagaccagagaggattgccacgaataggtgtgtgcagttctactctacccctgcatcgagccggtgtgcgtccaccagaggccggagttgaaggagagcacgtcggcgtcgcgccatgactcggcgttctcgtagatgtcgtccagcatcagcacctgcttcccctggaccacgtcgatgtccaccaggaacttgtacgtgtacaaagggtccacggagacgagctgcgtcggcgactgcagcgcggcggcgtgcagcaggcagacgagcgactcccactggttgcgccccagcgagtcgcccacgaacatcaccgtcttccccttcatccgtgtcaggaagaccgtggcacaacgcctgatgtcacgttgtcccagcggcgccgcggccggcgtcacgccacgcggatggtcacccacgccacgtccctagaccggtgtggtacgccggcgcccacagcgtcgatgaggaggaggtcggagcagcagtagctgtcatgggcagtgccgcagatgtggagcagtcgaatgagaggctagacgggctggagcaccacagcaggctggtgtcgctgttggccggtagccgctcctcccccaccggcaccgagagggacttgtgacccaaggatctgttcccgggggatgtggtgtttgcgctcgtcgatgatctcaggctcaaccactccaaggacccataggccatggggttatgcaatccaaagaaggaaattcctgcttgagccaattacagaaggccctgatatttgtcaaattgatggttgtagtgttaaattggaatacaagaggaggcaagtcaaatatggtttgtgtgacagcacgttactaacttactctactatatctgcatgagaaaggatgaaccctgtttgcatgtatactaattaatctacggattcattaatgtgtgaataagattttatttaattatgacagcaaacgtgacatgccattacaatttcgtttatgcaaaaaagtaccaaacggcgcagcagcagttgatgtgcaacccgagtgtactgccgctcgaggaggccagtaagtgccaacaacatgaatagccaaagcagggaaatagggctggcgggggcacatgggtaacttggtcctggagcattggagaaggagcataccacaaggaaaccaacacgcttcttactctagcagagttccttgcttcctgaaggcctcatagctcagattactgggttaacgaacaactcatactttgatggagcacatgaggttcgacattatgtcaggaagcattcgaatcttggtcgtattgtgcttgaagttgctaaggactcgcaaatcccccgccaagcaaactgctagaaatcttttcagaggtggagatgatgaagatgatagtgctgatgccgacacaaatgatcctgttgtaccttggtcattaggtagagtaggagttgggcatatggtgtacatctccggtttgacttgtgccttgagttcaacaaatatgaaagtgctgagagaggtggcatctagaggacgtcatgtcgaacgtgtgaagaatttttttagaaatatgtatatttgtgcgaaactttttagaaacttgactccattttattttctatgttactctcggctttgtttcctatcctttccaatgacttgctatgcatttgcactgtatttggcatgtttaaaactgctacacaaaacttgctatatattttgtccaaaaatactatatccttgttatgattgattgatctttattttgtctgctcttctattcttgcgtggg

SEQ ID NO: 217493 - DNA, 2812 bp, Zea Mays
ccccacccccgcgcgcgtcttcctccggcatgcgccagcccccccgagctcgcccgcgcaccaatctcgccgtcgggtatcccgcccgcgagcccgcgcaccaagctccttccccgcgacaagctccctcccccgcgacgcgtcttcctcctcgccctagatcgccgccccagctctctcctcaccccgcaatccccgccgcccatgctccgctctctactcgccccagatcgtcgcccctgttcgcgtggattgggtaccggtcccaactatctccatggattgcgcgtccgcgacaacccaatctcctcccggtctccatggaaggcgcgtcctccccccgtgattctcgattccccgcgtccgcgccccagatccactctcctctctcccacaatccccacggactctgccccgtatcaccaccccggctccttagaacgtgatccactctcctctctcctgcaatccccgctacctcaacccagatcgccgccctcgctctcgatcctcgcccacgctctccatggaaggcgaggccgcgatgctcgcgtggatctatgtagaggctgcgacgctctcccaggaagactactgccagtgctccgtgctccatgcgccgcgctggaacgccaccgtgcggtccatgtcctcgtagtatcgcccagactcgcccatgtagtcccacctgcatccaccgaccaccaagcacactctcactgcagaccagagaggattgccacgaataggtgtgtgcagttctactctacccctgcatcgagccggtgtgcgtccaccagaggccggagttgaaggagagcacgtcggcgtcgcgccatgactcggcgttctcgtagatgtcgtccagcatcagcacctgcttcccctggaccacgtcgatgtccaccaggaacttgtacgtgtacaaagggtccacggagacgagctgcgtcggcgactgcagcgcggcggcgtgcagcaggcagacgagcgactcccactggttgcgccccagcgagtcgcccacgaacatcaccgtcttccccttcatccgtgtcaggaagaccgtggcacaacgcctgatgtcacgttgtcccagcggcgccgcggccggcgtcacgccacgcggatggtcacccacgccacgtccctagaccggtgtggtacgccggcgcccacagcgtcgatgaggaggaggtcggagcagcagtagctgtcatgggcagtgccgcagatgtggagcagtcgaatgagaggctagacgggctggagcaccacagcaggctggtgtcgctgttggccggtagccgctcctcccccaccggcaccgagagggacttgtgacccaaggatctgttcccgggggatgtggtgtttgcgctcgtcgatgatctcaggctcaaccactccaaggacccataggccatggggttatgcaatccaaaggtctccatcgccaatttcattttgtagacaaataagttagctcttctgatggcataccatttatagattgccaacgatctgaaggcatatatgaaggcttgttatctcttctgtgtttaattgatcagtgactttgatttggacctggttatcagcttgttatttctatctgaattttctcgctttatttgtactacactcgtgctaattatgtgagaatgatttgtgtcactatggtgttcatctgttattttatactattatatgtattcatctgtcatgttgttgaactcctgttatcaattgcagaaggaaattcctgcttgagccaattacagaaggccctgatatttgtcaaattgatggttgtagtgttaaattggaatacaagaggaggcaagtcaaatatggtttgtgtgacagcacgttactaacttactctactatatctgcatgagaaaggatgaaccctgtttgcatgtatactaattaatctacggattcattaatgtgtgaataagattttatttaattatgacagcaaacgtgacatgccattacaatttcgtttatgcaaaaaagtaccaaacggcgcagcagcagttgatgtgcaacccgagtgtactgccgctcgaggaggccagtaagtgccaacaacatgaatagccaaagcagggaaatagggctggcgggggcacatgggtaacttggtcctggagcattggagaaggagcataccacaaggaaaccaacacgagttccttgcttcctgaaggcctcatagctcagattactgggttaacgaacaactcatactttgatggagcacatgaggttcgacattatgtcaggaagcattcgaatcttggtcgtattgtgcttgaagttgctaaggactcgcaaatcccccgccaagcaaactgctagaaatcttttcagaggtggagatgatgaagatgatagtgctgatgccgacacaaatgatcctgttgtaccttggtcattaggtagagtaggagttgggcatatggtgtacatctccggtttgacttgtgccttgagttcaacaaatatgaaagtgctgagagaggtggcatctagaggacgtcatgtcgaacgtgtgaagaatttttttagaaatatgtatatttgtgcgaaactttttagaaacttgactccattttattttctatgttactctcggctttgtttcctatcctttccaatgacttgctatgcatttgcactgtatttggcatgtttaaaactgctacacaaaacttgctatatattttgtccaaaaatactatatccttgttatgattgattgatctttattttgtctgctcttctattcttgcgtggg

SEQ ID NO: 217494 - DNA, 2297 bp, Zea Mays
cccacccccgcgcgcgtcttcctccggcatgcgccagcccccccgagctcgcccgcgcaccaatctcgccgtcgggtatcccgcccgcgagcccgcgcaccaagctccttccccgcgacaagctccctcccccgcgacgcgtcttcctcctcgccctagatcgccgccccagctctctcctcaccccgcaatccccgccgcccatgctccgctctctactcgccccagatcgtcgcccctgttcgcgtggattgggtaccggtcccaactatctccatggattgcgcgtccgcgacaacccaatctcctcccggtctccatggaaggcgcgtcctccccccgtgattctcgattccccgcgtccgcgccccagatccactctcctctctcccacaatccccacggactctgccccgtatcaccaccccggctccttagaacgtgatccactctcctctctcctgcaatccccgctacctcaacccagatcgccgccctcgctctcgatcctcgcccacgctctccatggaaggcgaggccgcgatgctcgcgtggatctatgtagaggctgcgacgctctcccaggaagactactgccagtgctccgtgctccatgcgccgcgctggaacgccaccgtgcggtccatgtcctcgtagtatcgcccagactcgcccatgtagtcccacctgcatccaccgaccaccaagcacactctcactgcagaccagagaggattgccacgaataggtgtgtgcagttctactctacccctgcatcgagccggtgtgcgtccaccagaggccggagttgaaggagagcacgtcggcgtcgcgccatgactcggcgttctcgtagatgtcgtccagcatcagcacctgcttcccctggaccacgtcgatgtccaccagggtccacggagacgagctgcgtcggcgactgcagcgcggcggcgtgcagcaggcagacgagcgactcccactggttgcgccccagcgagtcgcccacgaacatcaccgtcttccccttcatccgtgtcaggaagaccgtggcacaacgcctgatgtcacgttgtcccagcggcgccgcggccggcgtcacgccacgcggatggtcacccacgccacgtccctagaccggtgtggtacgccggcgcccacagcgtcgatgaggaggaggtcggagcagcagtagctgtcatgggcagtgccgcagatgtggagcagtcgaatgagaggctagacgggctggagcaccacagcaggctggtgtcgctgttggccggtagccgctcctcccccaccggcaccgagagggacttgtgacccaaggatctgttcccgggggatgtggtgtttgcgctcgtcgatgatctcaggctcaaccactccaaggacccataggccatggggttatgcaatccaaagaaggaaattcctgcttgagccaattacagaaggccctgatatttgtcaaattgatggttgtagtgttaaattggaatacaagaggaggtaccaaacggcgcagcagcagttgatgtgcaacccgagtgtactgccgctcgaggaggccagtaagtgccaacaacatgaatagccaaagcagggaaatagggctggcgggggcacatgggtaacttggtcctggagcattggagaaggagcataccacaaggaaaccaacacgagttccttgcttcctgaaggcctcatagctcagattactgggttaacgaacaactcatactttgatggagcacatgaggttcgacattatgtcaggaagcattcgaatcttggtcgtattgtgcttgaagttgctaaggactcgcaaatcccccgccaagcaaactgctagaaatcttttcagaggtggagatgatgaagatgatagtgctgatgccgacacaaatgatcctgttgtaccttggtcattaggtagagtaggagttgggcatatggtgtacatctccggtttgacttgtgccttgagttcaacaaatatgaaagtgctgagagaggtggcatctagaggacgtcatgtcgaacgtgtgaagaatttttttagaaatatgtatatttgtgcgaaactttttagaaacttgactccattttattttctatgttactctcggctttgtttcctatcctttccaatgacttgctatgcatttgcactgtatttggcatgtttaaaactgctacacaaaacttgctatatattttgtccaaaaatactatatccttgttatgattgattgatctttattttgtctgctcttctattcttgcgtggg

SEQ ID NO: 217495 - DNA, 2641 bp, Zea Mays
ccacccccgcgcgcgtcttcctccggcatgcgccagcccccccgagctcgcccgcgcaccaatctcgccgtcgggtatcccgcccgcgagcccgcgcaccaagctccttccccgcgacaagctccctcccccgcgacgcgtcttcctcctcgccctagatcgccgccccagctctctcctcaccccgcaatccccgccgcccatgctccgctctctactcgccccagatcgtcgcccctgttcgcgtggattgggtaccggtcccaactatctccatggattgcgcgtccgcgacaacccaatctcctcccggtctccatggaaggcgcgtcctccccccgtgattctcgattccccgcgtccgcgccccagatccactctcctctctcccacaatccccacggactctgccccgtatcaccaccccggctccttagaacgtgatccactctcctctctcctgcaatccccgctacctcaacccagatcgccgccctcgctctcgatcctcgcccacgctctccatggaaggcgaggccgcgatgctcgcgtggatctatgtagaggctgcgacgctctcccaggaagactactgccagtgctccgtgctccatgcgccgcgctggaacgccaccgtgcggtccatgtcctcgtagtatcgcccagactcgcccatgtagtcccacctgcatccaccgaccaccaagcacactctcactgcagaccagagaggattgccacgaataggtgtgtgcagttctactctacccctgcatcgagccggtgtgcgtccaccagaggccggagttgaaggagagcacgtcggcgtcgcgccatgactcggcgttctcgtagatgtcgtccagcatcagcacctgcttcccctggaccacgtcgatgtccaccaggaacttgtacgtgtacaaagggtccacggagacgagctgcgtcggcgactgcagcgcggcggcgtgcagcaggcagacgagcgactcccactggttgcgccccagcgagtcgcccacgaacatcaccgtcttccccttcatccgtgtcaggaagaccgtggcacaacgcctgatgtcacgttgtcccagcggcgccgcggccggcgtcacgccacgcggatggtcacccacgccacgtccctagaccggtgtggtacgccggcgcccacagcgtcgatgaggaggaggtcggagcagcagtagctgtcatgggcagtgccgcagatgtggagcagtcgaatgagaggctagacgggctggagcaccacagcaggctggtgtcgctgttggccggtagccgctcctcccccaccggcaccgagagggacttgtgacccaaggatctgttcccgggggatgtggtgtttgcgctcgtcgatgatctcaggctcaaccactccaaggacccataggccatggggttatgcaatccaaaggtctccatcgccaatttcattttgtagacaaataagttagctcttctgatggcataccatttatagattgccaacgatctgaaggcatatatgaaggcttgttatctcttctgtgtttaattgatcagtgactttgatttggacctggttatcagcttgttatttctatctgaattttctcgctttatttgtactacactcgtgctaattatgtgagaatgatttgtgtcactatggtgttcatctgttattttatactattatatgtattcatctgtcatgttgttgaactcctgttatcaattgcagaaggaaattcctgcttgagccaattacagaaggccctgatatttgtcaaattgatggttgtagtgttaaattggaatacaagaggaggtaccaaacggcgcagcagcagttgatgtgcaacccgagtgtactgccgctcgaggaggccagtaagtgccaacaacatgaatagccaaagcagggaaatagggctggcgggggcacatgggtaacttggtcctggagcattggagaaggagcataccacaaggaaaccaacacgcttcttactctagcagagttccttgcttcctgaaggcctcatagctcagattactgggttaacgaacaactcatactttgatggagcacatgaggttcgacattatgtcaggaagcattcgaatcttggtcgtattgtgcttgaagttgctaaggactcgcaaatcccccgccaagcaaactgctagaaatcttttcagaggtggagatgatgaagatgatagtgctgatgccgacacaaatgatcctgttgtaccttggtcattaggtagagtaggagttgggcatatggtgtacatctccggtttgacttgtgccttgagttcaacaaatatgaaagtgctgagagaggtggcatctagaggacgtcatgtcgaacgtgtgaagaatttttttagaaatatgtatatttgtgcgaaactttttagaaacttgactccattttattttctatgttactctcggctttgtttcctatcctttccaatgacttgctatgcatttgcactgtatttggcatgtttaaaactgctacacaaaacttgctatatattttgtccaaaaatactatatccttgttatgattgattgatctttattttgtctgctcttctattcttgcgtggg

SEQ ID NO: 217496 - DNA, 1793 bp, Zea Mays
cacccccgcgcgcgtcttcctccggcatgcgccagcccccccgagctcgcccgcgcaccaatctcgccgtcgggtatcccgcccgcgagcccgcgcaccaagctccttccccgcgacaagctccctcccccgcgacgcgtcttcctcctcgccctagatcgccgccccagctctctcctcaccccgcaatccccgccgcccatgctccgctctctactcgccccagatcgtcgcccctgttcgcgtggattgggtaccggtcccaactatctccatggattgcgcgtccgcgacaacccaatctcctcccggtctccatggaaggcgcgtcctccccccgtgattctcgattccccgcgtccgcgccccagatccactctcctctctcccacaatccccacggactctgccccgtatcaccaccccggctccttagaacgtgatccactctcctctctcctgcaatccccgctacctcaacccagatcgccgccctcgctctcgatcctcgcccacgctctccatggaaggcgaggccgcgatgctcgcgtggatctatgtagaggctgcgacgctctcccaggaagactactgccagtgctccgtgctccatgcgccgcgctggaacgccaccgtgcggtccatgtcctcgtagtatcgcccagactcgcccatgtagtcccacctgcatccaccgaccaccaagcacactctcactgcagaccagagaggattgccacgaataggtgtgtgcagttctactctacccctgcatcgagccggtgtgcgtccaccagaggccggagttgaaggagagcacgtcggcgtcgcgccatgactcggcgttctcgtagatgtcgtccagcatcagcacctgcttcccctggaccacgtcgatgtccaccagaaggaaattcctgcttgagccaattacagaaggccctgatatttgtcaaattgatggttgtagtgttaaattggaatacaagaggaggcaagtcaaatatggtaccaaacggcgcagcagcagttgatgtgcaacccgagtgtactgccgctcgaggaggccagtaagtgccaacaacatgaatagccaaagcagggaaatagggctggcgggggcacatgggtaacttggtcctggagcattggagaaggagcataccacaaggaaaccaacacgagttccttgcttcctgaaggcctcatagctcagattactgggttaacgaacaactcatactttgatggagcacatgaggttcgacattatgtcaggaagcattcgaatcttggtcgtattgtgcttgaagttgctaaggactcgcaaatcccccgccaagcaaactgctagaaatcttttcagaggtggagatgatgaagatgatagtgctgatgccgacacaaatgatcctgttgtaccttggtcattaggtagagtaggagttgggcatatggtgtacatctccggtttgacttgtgccttgagttcaacaaatatgaaagtgctgagagaggtggcatctagaggacgtcatgtcgaacgtgtgaagaatttttttagaaatatgtatatttgtgcgaaactttttagaaacttgactccattttattttctatgttactctcggctttgtttcctatcctttccaatgacttgctatgcatttgcactgtatttggcatgtttaaaactgctacacaaaacttgctatatattttgtccaaaaatactatatccttgttatgattgattgatctttattttgtctgctcttctattcttgcgtggg

SEQ ID NO: 217497 - DNA, 1209 bp, Zea Mays
ccccgcgcgcgtcttcctccggcatgcgccagcccccccgagctcgcccgcgcaccaatctcgccgtcgggtatcccgcccgcgagcccgcgcaccaagctccttccccgcgacaagctccctcccccgcgacgcgtcttcctcctcgccctagatcgccgccccagctctctcctcaccccgcaatccccgccgcccatgctccgctctctactcgccccagatcgtcgcccctgttcgcgtggattgggtaccggtcccaactatctccatggattgcgcgtccgcgacaacccaatctcctcccggtctccatggaagaaggaaattcctgcttgagccaattacagaaggccctgatatttgtcaaattgatggttgtagtgttaaattggaatacaagaggaggtaccaaacggcgcagcagcagttgatgtgcaacccgagtgtactgccgctcgaggaggccagtaagtgccaacaacatgaatagccaaagcagggaaatagggctggcgggggcacatgggtaacttggtcctggagcattggagaaggagcataccacaaggaaaccaacacgcttcttactctagcagagttccttgcttcctgaaggcctcatagctcagattactgggttaacgaacaactcatactttgatggagcacatgaggttcgacattatgtcaggaagcattcgaatcttggtcgtattgtgcttgaagttgctaaggactcgcaaatcccccgccaagcaaactgctagaaatcttttcagaggtggagatgatgaagatgatagtgctgatgccgacacaaatgatcctgttgtaccttggtcattaggtagagtaggagttgggcatatggtgtacatctccggtttgacttgtgccttgagttcaacaaatatgaaagtgctgagagaggtggcatctagaggacgtcatgtcgaacgtgtgaagaatttttttagaaatatgtatatttgtgcgaaactttttagaaacttgactccattttattttctatgttactctcggctttgtttcctatcctttccaatgacttgctatgcatttgcactgtatttggcatgtttaaaactgctacacaaaacttgctatatattttgtccaaaaatactatatccttgttatgattgattgatctttattttgtctgctcttctattcttgcgtggg

SEQ ID NO: 217498 - DNA, 2308 bp, Zea Mays
ccccgcgcgcgtcttcctccggcatgcgccagcccccccgagctcgcccgcgcaccaatctcgccgtcgggtatcccgcccgcgagcccgcgcaccaagctccttccccgcgacaagctccctcccccgcgacgcgtcttcctcctcgccctagatcgccgccccagctctctcctcaccccgcaatccccgccgcccatgctccgctctctactcgccccagatcgtcgcccctgttcgcgtggattgggtaccggtcccaactatctccatggattgcgcgtccgcgacaacccaatctcctcccggtctccatggaaggcgcgtcctccccccgtgattctcgattccccgcgtccgcgccccagatccactctcctctctcccacaatccccacggactctgccccgtatcaccaccccggctccttagaacgtgatccactctcctctctcctgcaatccccgctacctcaacccagatcgccgccctcgctctcgatcctcgcccacgctctccatggaaggcgaggccgcgatgctcgcgtggatctatgtagaggctgcgacgctctcccaggaagactactgccagtgctccgtgctccatgcgccgcgctggaacgccaccgtgcggtccatgtcctcgtagtatcgcccagactcgcccatgtagtcccacctgcatccaccgaccaccaagcacactctcactgcagaccagagaggattgccacgaataggtgtgtgcagttctactctacccctgcatcgagccggtgtgcgtccaccagaggccggagttgaaggagagcacgtcggcgtcgcgccatgactcggcgttctcgtagatgtcgtccagcatcagcacctgcttcccctggaccacgtcgatgtccaccagggtccacggagacgagctgcgtcggcgactgcagcgcggcggcgtgcagcaggcagacgagcgactcccactggttgcgccccagcgagtcgcccacgaacatcaccgtcttccccttcatccgtgtcaggaagaccgtggcacaacgcctgatgtcacgttgtcccagcggcgccgcggccggcgtcacgccacgcggatggtcacccacgccacgtccctagaccggtgtggtacgccggcgcccacagcgtcgatgaggaggaggtcggagcagcagtagctgtcatgggcagtgccgcagatgtggagcagtcgaatgagaggctagacgggctggagcaccacagcaggctggtgtcgctgttggccggtagccgctcctcccccaccggcaccgagagggacttgtgacccaaggatctgttcccgggggatgtggtgtttgcgctcgtcgatgatctcaggctcaaccactccaaggacccataggccatggggttatgcaatccaaagaaggaaattcctgcttgagccaattacagaaggccctgatatttgtcaaattgatggttgtagtgttaaattggaatacaagaggaggtaccaaacggcgcagcagcagttgatgtgcaacccgagtgtactgccgctcgaggaggccagtaagtgccaacaacatgaatagccaaagcagggaaatagggctggcgggggcacatgggtaacttggtcctggagcattggagaaggagcataccacaaggaaaccaacacgcttcttactctagcagagttccttgcttcctgaaggcctcatagctcagattactgggttaacgaacaactcatactttgatggagcacatgaggttcgacattatgtcaggaagcattcgaatcttggtcgtattgtgcttgaagttgctaaggactcgcaaatcccccgccaagcaaactgctagaaatcttttcagaggtggagatgatgaagatgatagtgctgatgccgacacaaatgatcctgttgtaccttggtcattaggtagagtaggagttgggcatatggtgtacatctccggtttgacttgtgccttgagttcaacaaatatgaaagtgctgagagaggtggcatctagaggacgtcatgtcgaacgtgtgaagaatttttttagaaatatgtatatttgtgcgaaactttttagaaacttgactccattttattttctatgttactctcggctttgtttcctatcctttccaatgacttgctatgcatttgcactgtatttggcatgtttaaaactgctacacaaaacttgctatatattttgtccaaaaatactatatccttgttatgattgattgatctttattttgtctgctcttctattcttgcgtggg

SEQ ID NO: 217499 - DNA, 1743 bp, Zea Mays
ccccgcgcgcgtcttcctccggcatgcgccagcccccccgagctcgcccgcgcaccaatctcgccgtcgggtatcccgcccgcgagcccgcgcaccaagctccttccccgcgacaagctccctcccccgcgacgcgtcttcctcctcgccctagatcgccgccccagctctctcctcaccccgcaatccccgccgcccatgctccgctctctactcgccccagatcgtcgcccctgttcgcgtggattgggtaccggtcccaactatctccatggattgcgcgtccgcgacaacccaatctcctcccggtctccatggaaggcgcgtcctccccccgtgattctcgattccccgcgtccgcgccccagatccactctcctctctcccacaatccccacggactctgccccgtatcaccaccccggctccttagaacgtgatccactctcctctctcctgcaatccccgctacctcaacccagatcgccgccctcgctctcgatcctcgcccacgctctccatggaaggcgaggccgcgatgctcgcgtggatctatgtagaggctgcgacgctctcccaggaagactactgccagtgctccgtgctccatgcgccgcgctggaacgccaccgtgcggtccatgtcctcgtagtatcgcccagactcgcccatgtagtcccacctgcatccaccgaccaccaagcacactctcactgcagaccagagaggattgccacgaataggtgtgtgcagttctactctacccctgcatcgagccggtgtgcgtccaccagaggccggagttgaaggagagcacgtcggcgtcgcgccatgactcggcgttctcgtagatgtcgtccagcatcagcacctgcttcccctggaccacgtcgatgtccaccagaaggaaattcctgcttgagccaattacagaaggccctgatatttgtcaaattgatggttgtagtgttaaattggaatacaagaggaggtaccaaacggcgcagcagcagttgatgtgcaacccgagtgtactgccgctcgaggaggccagtaagtgccaacaacatgaatagccaaagcagggaaatagggctggcgggggcacatgggtaacttggtcctggagcattggagaaggagcataccacaaggaaaccaacacgattactgggttaacgaacaactcatactttgatggagcacatgaggttcgacattatgtcaggaagcattcgaatcttggtcgtattgtgcttgaagttgctaaggactcgcaaatcccccgccaagcaaactgctagaaatcttttcagaggtggagatgatgaagatgatagtgctgatgccgacacaaatgatcctgttgtaccttggtcattaggtagagtaggagttgggcatatggtgtacatctccggtttgacttgtgccttgagttcaacaaatatgaaagtgctgagagaggtggcatctagaggacgtcatgtcgaacgtgtgaagaatttttttagaaatatgtatatttgtgcgaaactttttagaaacttgactccattttattttctatgttactctcggctttgtttcctatcctttccaatgacttgctatgcatttgcactgtatttggcatgtttaaaactgctacacaaaacttgctatatattttgtccaaaaatactatatccttgttatgattgattgatctttattttgtctgctcttctattcttgcgtggg

SEQ ID NO: 217500 - DNA, 1223 bp, Zea Mays
ccccgcgcgcgtcttcctccggcatgcgccagcccccccgagctcgcccgcgcaccaatctcgccgtcgggtatcccgcccgcgagcccgcgcaccaagctccttccccgcgacaagctccctcccccgcgacgcgtcttcctcctcgccctagatcgccgccccagctctctcctcaccccgcaatccccgccgcccatgctccgctctctactcgccccagatcgtcgcccctgttcgcgtggattgggtaccggtcccaactatctccatggattgcgcgtccgcgacaacccaatctcctcccggtctccatggaagaaggaaattcctgcttgagccaattacagaaggccctgatatttgtcaaattgatggttgtagtgttaaattggaatacaagaggaggcaagtcaaatatggtaccaaacggcgcagcagcagttgatgtgcaacccgagtgtactgccgctcgaggaggccagtaagtgccaacaacatgaatagccaaagcagggaaatagggctggcgggggcacatgggtaacttggtcctggagcattggagaaggagcataccacaaggaaaccaacacgcttcttactctagcagagttccttgcttcctgaaggcctcatagctcagattactgggttaacgaacaactcatactttgatggagcacatgaggttcgacattatgtcaggaagcattcgaatcttggtcgtattgtgcttgaagttgctaaggactcgcaaatcccccgccaagcaaactgctagaaatcttttcagaggtggagatgatgaagatgatagtgctgatgccgacacaaatgatcctgttgtaccttggtcattaggtagagtaggagttgggcatatggtgtacatctccggtttgacttgtgccttgagttcaacaaatatgaaagtgctgagagaggtggcatctagaggacgtcatgtcgaacgtgtgaagaatttttttagaaatatgtatatttgtgcgaaactttttagaaacttgactccattttattttctatgttactctcggctttgtttcctatcctttccaatgacttgctatgcatttgcactgtatttggcatgtttaaaactgctacacaaaacttgctatatattttgtccaaaaatactatatccttgttatgattgattgatctttattttgtctgctcttctattcttgcgtggg

SEQ ID NO: 217501 - DNA, 1840 bp, Zea Mays
ccccgcgcgcgtcttcctccggcatgcgccagcccccccgagctcgcccgcgcaccaatctcgccgtcgggtatcccgcccgcgagcccgcgcaccaagctccttccccgcgacaagctccctcccccgcgacgcgtcttcctcctcgccctagatcgccgccccagctctctcctcaccccgcaatccccgccgcccatgctccgctctctactcgccccagatcgtcgcccctgttcgcgtggattgggtaccggtcccaactatctccatggattgcgcgtccgcgacaacccaatctcctcccggtctccatggaaggcgcgtcctccccccgtgattctcgattccccgcgtccgcgccccagatccactctcctctctcccacaatccccacggactctgccccgtatcaccaccccggctccttagaacgtgatccactctcctctctcctgcaatccccgctacctcaacccagatcgccgccctcgctctcgatcctcgcccacgctctccatggaaggcgaggccgcgatgctcgcgtggatctatgtagaggctgcgacgctctcccaggaagactactgccagtgctccgtgctccatgcgccgcgctggaacgccaccgtgcggtccatgtcctcgtagtatcgcccagactcgcccatgtagtcccacctgcatccaccgaccaccaagcacactctcactgcagaccagagaggattgccacgaataggtgtgtgcagttctactctacccctgcatcgagccggtgtgcgtccaccagaggccggagttgaaggagagcacgtcggcgtcgcgccatgactcggcgttctcgtagatgtcgtccagcatcagcacctgcttcccctggaccacgtcgatgtccaccagaaggaaattcctgcttgagccaattacagaaggccctgatatttgtcaaattgatggttgtagtgttaaattggaatacaagaggaggcaagtcaaatatgaattatactggcagagctcctgacggagcacctgacggagctcgccacaggtaccaaacggcgcagcagcagttgatgtgcaacccgagtgtactgccgctcgaggaggccagtaagtgccaacaacatgaatagccaaagcagggaaatagggctggcgggggcacatgggtaacttggtcctggagcattggagaaggagcataccacaaggaaaccaacacgagttccttgcttcctgaaggcctcatagctcagattactgggttaacgaacaactcatactttgatggagcacatgaggttcgacattatgtcaggaagcattcgaatcttggtcgtattgtgcttgaagttgctaaggactcgcaaatcccccgccaagcaaactgctagaaatcttttcagaggtggagatgatgaagatgatagtgctgatgccgacacaaatgatcctgttgtaccttggtcattaggtagagtaggagttgggcatatggtgtacatctccggtttgacttgtgccttgagttcaacaaatatgaaagtgctgagagaggtggcatctagaggacgtcatgtcgaacgtgtgaagaatttttttagaaatatgtatatttgtgcgaaactttttagaaacttgactccattttattttctatgttactctcggctttgtttcctatcctttccaatgacttgctatgcatttgcactgtatttggcatgtttaaaactgctacacaaaacttgctatatattttgtccaaaaatactatatccttgttatgattgattgatctttattttgtctgctcttctattcttgcgtggg

SEQ ID NO: 217502 - DNA, 1830 bp, Zea Mays
ccccgcgcgcgtcttcctccggcatgcgccagcccccccgagctcgcccgcgcaccaatctcgccgtcgggtatcccgcccgcgagcccgcgcaccaagctccttccccgcgacaagctccctcccccgcgacgcgtcttcctcctcgccctagatcgccgccccagctctctcctcaccccgcaatccccgccgcccatgctccgctctctactcgccccagatcgtcgcccctgttcgcgtggattgggtaccggtcccaactatctccatggattgcgcgtccgcgacaacccaatctcctcccggtctccatggaaggcgcgtcctccccccgtgattctcgattccccgcgtccgcgccccagatccactctcctctctcccacaatccccacggactctgccccgtatcaccaccccggctccttagaacgtgatccactctcctctctcctgcaatccccgctacctcaacccagatcgccgccctcgctctcgatcctcgcccacgctctccatggaaggcgaggccgcgatgctcgcgtggatctatgtagaggctgcgacgctctcccaggaagactactgccagtgctccgtgctccatgcgccgcgctggaacgccaccgtgcggtccatgtcctcgtagtatcgcccagactcgcccatgtagtcccacctgcatccaccgaccaccaagcacactctcactgcagaccagagaggattgccacgaataggtgtgtgcagttctactctacccctgcatcgagccggtgtgcgtccaccagaggccggagttgaaggagagcacgtcggcgtcgcgccatgactcggcgttctcgtagatgtcgtccagcatcagcacctgcttcccctggaccacgtcgatgtccaccagaaggaaattcctgcttgagccaattacagaaggccctgatatttgtcaaattgatggttgtagtgttaaattggaatacaagaggaggcaagtcaaatatgcaaacgtgacatgccattacaatttcgtttatgcaaaaaagtaccaaacggcgcagcagcagttgatgtgcaacccgagtgtactgccgctcgaggaggccagtaagtgccaacaacatgaatagccaaagcagggaaatagggctggcgggggcacatgggtaacttggtcctggagcattggagaaggagcataccacaaggaaaccaacacgagttccttgcttcctgaaggcctcatagctcagattactgggttaacgaacaactcatactttgatggagcacatgaggttcgacattatgtcaggaagcattcgaatcttggtcgtattgtgcttgaagttgctaaggactcgcaaatcccccgccaagcaaactgctagaaatcttttcagaggtggagatgatgaagatgatagtgctgatgccgacacaaatgatcctgttgtaccttggtcattaggtagagtaggagttgggcatatggtgtacatctccggtttgacttgtgccttgagttcaacaaatatgaaagtgctgagagaggtggcatctagaggacgtcatgtcgaacgtgtgaagaatttttttagaaatatgtatatttgtgcgaaactttttagaaacttgactccattttattttctatgttactctcggctttgtttcctatcctttccaatgacttgctatgcatttgcactgtatttggcatgtttaaaactgctacacaaaacttgctatatattttgtccaaaaatactatatccttgttatgattgattgatctttattttgtctgctcttctattcttgcgtggg

SEQ ID NO: 217503 - DNA, 2306 bp, Zea Mays
ccccgcgcgcgtcttcctccggcatgcgccagcccccccgagctcgcccgcgcaccaatctcgccgtcgggtatcccgcccgcgagcccgcgcaccaagctccttccccgcgacaagctccctcccccgcgacgcgtcttcctcctcgccctagatcgccgccccagctctctcctcaccccgcaatccccgccgcccatgctccgctctctactcgccccagatcgtcgcccctgttcgcgtggattgggtaccggtcccaactatctccatggattgcgcgtccgcgacaacccaatctcctcccggtctccatggaaggcgcgtcctccccccgtgattctcgattccccgcgtccgcgccccagatccactctcctctctcccacaatccccacggactctgccccgtatcaccaccccggctccttagaacgtgatccactctcctctctcctgcaatccccgctacctcaacccagatcgccgccctcgctctcgatcctcgcccacgctctccatggaaggcgaggccgcgatgctcgcgtggatctatgtagaggctgcgacgctctcccaggaagactactgccagtgctccgtgctccatgcgccgcgctggaacgccaccgtgcggtccatgtcctcgtagtatcgcccagactcgcccatgtagtcccacctgcatccaccgaccaccaagcacactctcactgcagaccagagaggattgccacgaataggtgtgtgcagttctactctacccctgcatcgagccggtgtgcgtccaccagaggccggagttgaaggagagcacgtcggcgtcgcgccatgactcggcgttctcgtagatgtcgtccagcatcagcacctgcttcccctggaccacgtcgatgtccaccagggtccacggagacgagctgcgtcggcgactgcagcgcggcggcgtgcagcaggcagacgagcgactcccactggttgcgccccagcgagtcgcccacgaacatcaccgtcttccccttcatccgtgtcaggaagaccgtggcacaacgcctgatgtcacgttgtcccagcggcgccgcggccggcgtcacgccacgcggatggtcacccacgccacgtccctagaccggtgtggtacgccggcgcccacagcgtcgatgaggaggaggtcggagcagcagtagctgtcatgggcagtgccgcagatgtggagcagtcgaatgagaggctagacgggctggagcaccacagcaggctggtgtcgctgttggccggtagccgctcctcccccaccggcaccgagagggacttgtgacccaaggatctgttcccgggggatgtggtgtttgcgctcgtcgatgatctcaggctcaaccactccaaggacccataggccatggggttatgcaatccaaagaaggaaattcctgcttgagccaattacagaaggccctgatatttgtcaaattgatggttgtagtgttaaattggaatacaagaggaggcaagtcaaatatggtaccaaacggcgcagcagcagttgatgtgcaacccgagtgtactgccgctcgaggaggccagtaagtgccaacaacatgaatagccaaagcagggaaatagggctggcgggggcacatgggtaacttggtcctggagcattggagaaggagcataccacaaggaaaccaacacgagttccttgcttcctgaaggcctcatagctcagattactgggttaacgaacaactcatactttgatggagcacatgaggttcgacattatgtcaggaagcattcgaatcttggtcgtattgtgcttgaagttgctaaggactcgcaaatcccccgccaagcaaactgctagaaatcttttcagaggtggagatgatgaagatgatagtgctgatgccgacacaaatgatcctgttgtaccttggtcattaggtagagtaggagttgggcatatggtgtacatctccggtttgacttgtgccttgagttcaacaaatatgaaagtgctgagagaggtggcatctagaggacgtcatgtcgaacgtgtgaagaatttttttagaaatatgtatatttgtgcgaaactttttagaaacttgactccattttattttctatgttactctcggctttgtttcctatcctttccaatgacttgctatgcatttgcactgtatttggcatgtttaaaactgctacacaaaacttgctatatattttgtccaaaaatactatatccttgttatgattgattgatctttattttgtctgctcttctattcttgcgtggg

SEQ ID NO: 217504 - DNA, 1475 bp, Zea Mays
ccccgcgcgcgtcttcctccggcatgcgccagcccccccgagctcgcccgcgcaccaatctcgccgtcgggtatcccgcccgcgagcccgcgcaccaagctccttccccgcgacaagctccctcccccgcgacgcgtcttcctcctcgccctagatcgccgccccagctctctcctcaccccgcaatccccgccgcccatgctccgctctctactcgccccagatcgtcgcccctgttcgcgtggattgggtaccggtcccaactatctccatggattgcgcgtccgcgacaacccaatctcctcccggtctccatggaagaaggaaattcctgcttgagccaattacagaaggccctgatatttgtcaaattgatggttgtagtgttaaattggaatacaagaggaggcaagtcaaatatggtttgtgtgacagcacgttactaacttactctactatatctgcatgagaaaggatgaaccctgtttgcatgtatactaattaatctacggattcattaatgtgtgaataagattttatttaattatgacagcaaacgtgacatgccattacaatttcgtttatgcaaaaaagtaagttgcttatagtttagcctttggtttcaatttgcactttatagaattatactggcagagctcctgacggagcacctgacggagctcgccacaggtaccaaacggcgcagcagcagttgatgtgcaacccgagtgtactgccgctcgaggaggccagtaagtgccaacaacatgaatagccaaagcagggaaatagggctggcgggggcacatgggtaacttggtcctggagcattggagaaggagcataccacaaggaaaccaacacgagttccttgcttcctgaaggcctcatagctcagattactgggttaacgaacaactcatactttgatggagcacatgaggttcgacattatgtcaggaagcattcgaatcttggtcgtattgtgcttgaagttgctaaggactcgcaaatcccccgccaagcaaactgctagaaatcttttcagaggtggagatgatgaagatgatagtgctgatgccgacacaaatgatcctgttgtaccttggtcattaggtagagtaggagttgggcatatggtgtacatctccggtttgacttgtgccttgagttcaacaaatatgaaagtgctgagagaggtggcatctagaggacgtcatgtcgaacgtgtgaagaatttttttagaaatatgtatatttgtgcgaaactttttagaaacttgactccattttattttctatgttactctcggctttgtttcctatcctttccaatgacttgctatgcatttgcactgtatttggcatgtttaaaactgctacacaaaacttgctatatattttgtccaaaaatactatatccttgttatgattgattgatctttattttgtctgctcttctattcttgcgtggg

SEQ ID NO: 217505 - DNA, 2631 bp, Zea Mays
ccccgcgcgcgtcttcctccggcatgcgccagcccccccgagctcgcccgcgcaccaatctcgccgtcgggtatcccgcccgcgagcccgcgcaccaagctccttccccgcgacaagctccctcccccgcgacgcgtcttcctcctcgccctagatcgccgccccagctctctcctcaccccgcaatccccgccgcccatgctccgctctctactcgccccagatcgtcgcccctgttcgcgtggattgggtaccggtcccaactatctccatggattgcgcgtccgcgacaacccaatctcctcccggtctccatggaaggcgcgtcctccccccgtgattctcgattccccgcgtccgcgccccagatccactctcctctctcccacaatccccacggactctgccccgtatcaccaccccggctccttagaacgtgatccactctcctctctcctgcaatccccgctacctcaacccagatcgccgccctcgctctcgatcctcgcccacgctctccatggaaggcgaggccgcgatgctcgcgtggatctatgtagaggctgcgacgctctcccaggaagactactgccagtgctccgtgctccatgcgccgcgctggaacgccaccgtgcggtccatgtcctcgtagtatcgcccagactcgcccatgtagtcccacctgcatccaccgaccaccaagcacactctcactgcagaccagagaggattgccacgaataggtgtgtgcagttctactctacccctgcatcgagccggtgtgcgtccaccagaggccggagttgaaggagagcacgtcggcgtcgcgccatgactcggcgttctcgtagatgtcgtccagcatcagcacctgcttcccctggaccacgtcgatgtccaccagggtccacggagacgagctgcgtcggcgactgcagcgcggcggcgtgcagcaggcagacgagcgactcccactggttgcgccccagcgagtcgcccacgaacatcaccgtcttccccttcatccgtgtcaggaagaccgtggcacaacgcctgatgtcacgttgtcccagcggcgccgcggccggcgtcacgccacgcggatggtcacccacgccacgtccctagaccggtgtggtacgccggcgcccacagcgtcgatgaggaggaggtcggagcagcagtagctgtcatgggcagtgccgcagatgtggagcagtcgaatgagaggctagacgggctggagcaccacagcaggctggtgtcgctgttggccggtagccgctcctcccccaccggcaccgagagggacttgtgacccaaggatctgttcccgggggatgtggtgtttgcgctcgtcgatgatctcaggctcaaccactccaaggacccataggccatggggttatgcaatccaaaggtctccatcgccaatttcattttgtagacaaataagttagctcttctgatggcataccatttatagattgccaacgatctgaaggcatatatgaaggcttgttatctcttctgtgtttaattgatcagtgactttgatttggacctggttatcagcttgttatttctatctgaattttctcgctttatttgtactacactcgtgctaattatgtgagaatgatttgtgtcactatggtgttcatctgttattttatactattatatgtattcatctgtcatgttgttgaactcctgttatcaattgcagaaggaaattcctgcttgagccaattacagaaggccctgatatttgtcaaattgatggttgtagtgttaaattggaatacaagaggaggcaagtcaaatatggtaccaaacggcgcagcagcagttgatgtgcaacccgagtgtactgccgctcgaggaggccagtaagtgccaacaacatgaatagccaaagcagggaaatagggctggcgggggcacatgggtaacttggtcctggagcattggagaaggagcataccacaaggaaaccaacacgcttcttactctagcagagttccttgcttcctgaaggcctcatagctcagattactgggttaacgaacaactcatactttgatggagcacatgaggttcgacattatgtcaggaagcattcgaatcttggtcgtattgtgcttgaagttgctaaggactcgcaaatcccccgccaagcaaactgctagaaatcttttcagaggtggagatgatgaagatgatagtgctgatgccgacacaaatgatcctgttgtaccttggtcattaggtagagtaggagttgggcatatggtgtacatctccggtttgacttgtgccttgagttcaacaaatatgaaagtgctgagagaggtggcatctagaggacgtcatgtcgaacgtgtgaagaatttttttagaaatatgtatatttgtgcgaaactttttagaaacttgactccattttattttctatgttactctcggctttgtttcctatcctttccaatgacttgctatgcatttgcactgtatttggcatgtttaaaactgctacacaaaacttgctatatattttgtccaaaaatactatatccttgttatgattgattgatctttattttgtctgctcttctattcttgcgtggg

SEQ ID NO: 217506 - DNA, 2322 bp, Zea Mays
ccccgcgcgcgtcttcctccggcatgcgccagcccccccgagctcgcccgcgcaccaatctcgccgtcgggtatcccgcccgcgagcccgcgcaccaagctccttccccgcgacaagctccctcccccgcgacgcgtcttcctcctcgccctagatcgccgccccagctctctcctcaccccgcaatccccgccgcccatgctccgctctctactcgccccagatcgtcgcccctgttcgcgtggattgggtaccggtcccaactatctccatggattgcgcgtccgcgacaacccaatctcctcccggtctccatggaaggcgcgtcctccccccgtgattctcgattccccgcgtccgcgccccagatccactctcctctctcccacaatccccacggactctgccccgtatcaccaccccggctccttagaacgtgatccactctcctctctcctgcaatccccgctacctcaacccagatcgccgccctcgctctcgatcctcgcccacgctctccatggaaggcgaggccgcgatgctcgcgtggatctatgtagaggctgcgacgctctcccaggaagactactgccagtgctccgtgctccatgcgccgcgctggaacgccaccgtgcggtccatgtcctcgtagtatcgcccagactcgcccatgtagtcccacctgcatccaccgaccaccaagcacactctcactgcagaccagagaggattgccacgaataggtgtgtgcagttctactctacccctgcatcgagccggtgtgcgtccaccagaggccggagttgaaggagagcacgtcggcgtcgcgccatgactcggcgttctcgtagatgtcgtccagcatcagcacctgcttcccctggaccacgtcgatgtccaccagggtccacggagacgagctgcgtcggcgactgcagcgcggcggcgtgcagcaggcagacgagcgactcccactggttgcgccccagcgagtcgcccacgaacatcaccgtcttccccttcatccgtgtcaggaagaccgtggcacaacgcctgatgtcacgttgtcccagcggcgccgcggccggcgtcacgccacgcggatggtcacccacgccacgtccctagaccggtgtggtacgccggcgcccacagcgtcgatgaggaggaggtcggagcagcagtagctgtcatgggcagtgccgcagatgtggagcagtcgaatgagaggctagacgggctggagcaccacagcaggctggtgtcgctgttggccggtagccgctcctcccccaccggcaccgagagggacttgtgacccaaggatctgttcccgggggatgtggtgtttgcgctcgtcgatgatctcaggctcaaccactccaaggacccataggccatggggttatgcaatccaaagaaggaaattcctgcttgagccaattacagaaggccctgatatttgtcaaattgatggttgtagtgttaaattggaatacaagaggaggcaagtcaaatatggtaccaaacggcgcagcagcagttgatgtgcaacccgagtgtactgccgctcgaggaggccagtaagtgccaacaacatgaatagccaaagcagggaaatagggctggcgggggcacatgggtaacttggtcctggagcattggagaaggagcataccacaaggaaaccaacacgcttcttactctagcagagttccttgcttcctgaaggcctcatagctcagattactgggttaacgaacaactcatactttgatggagcacatgaggttcgacattatgtcaggaagcattcgaatcttggtcgtattgtgcttgaagttgctaaggactcgcaaatcccccgccaagcaaactgctagaaatcttttcagaggtggagatgatgaagatgatagtgctgatgccgacacaaatgatcctgttgtaccttggtcattaggtagagtaggagttgggcatatggtgtacatctccggtttgacttgtgccttgagttcaacaaatatgaaagtgctgagagaggtggcatctagaggacgtcatgtcgaacgtgtgaagaatttttttagaaatatgtatatttgtgcgaaactttttagaaacttgactccattttattttctatgttactctcggctttgtttcctatcctttccaatgacttgctatgcatttgcactgtatttggcatgtttaaaactgctacacaaaacttgctatatattttgtccaaaaatactatatccttgttatgattgattgatctttattttgtctgctcttctattcttgcgtggg

SEQ ID NO: 217507 - DNA, 2541 bp, Zea Mays
ccccgcgcgcgtcttcctccggcatgcgccagcccccccgagctcgcccgcgcaccaatctcgccgtcgggtatcccgcccgcgagcccgcgcaccaagctccttccccgcgacaagctccctcccccgcgacgcgtcttcctcctcgccctagatcgccgccccagctctctcctcaccccgcaatccccgccgcccatgctccgctctctactcgccccagatcgtcgcccctgttcgcgtggattgggtaccggtcccaactatctccatggattgcgcgtccgcgacaacccaatctcctcccggtctccatggaaggcgcgtcctccccccgtgattctcgattccccgcgtccgcgccccagatccactctcctctctcccacaatccccacggactctgccccgtatcaccaccccggctccttagaacgtgatccactctcctctctcctgcaatccccgctacctcaacccagatcgccgccctcgctctcgatcctcgcccacgctctccatggaaggcgaggccgcgatgctcgcgtggatctatgtagaggctgcgacgctctcccaggaagactactgccagtgctccgtgctccatgcgccgcgctggaacgccaccgtgcggtccatgtcctcgtagtatcgcccagactcgcccatgtagtcccacctgcatccaccgaccaccaagcacactctcactgcagaccagagaggattgccacgaataggtgtgtgcagttctactctacccctgcatcgagccggtgtgcgtccaccagaggccggagttgaaggagagcacgtcggcgtcgcgccatgactcggcgttctcgtagatgtcgtccagcatcagcacctgcttcccctggaccacgtcgatgtccaccagggtccacggagacgagctgcgtcggcgactgcagcgcggcggcgtgcagcaggcagacgagcgactcccactggttgcgccccagcgagtcgcccacgaacatcaccgtcttccccttcatccgtgtcaggaagaccgtggcacaacgcctgatgtcacgttgtcccagcggcgccgcggccggcgtcacgccacgcggatggtcacccacgccacgtccctagaccggtgtggtacgccggcgcccacagcgtcgatgaggaggaggtcggagcagcagtagctgtcatgggcagtgccgcagatgtggagcagtcgaatgagaggctagacgggctggagcaccacagcaggctggtgtcgctgttggccggtagccgctcctcccccaccggcaccgagagggacttgtgacccaaggatctgttcccgggggatgtggtgtttgcgctcgtcgatgatctcaggctcaaccactccaaggacccataggccatggggttatgcaatccaaagaaggaaattcctgcttgagccaattacagaaggccctgatatttgtcaaattgatggttgtagtgttaaattggaatacaagaggaggcaagtcaaatatggtttgtgtgacagcacgttactaacttactctactatatctgcatgagaaaggatgaaccctgtttgcatgtatactaattaatctacggattcattaatgtgtgaataagattttatttaattatgacagcaaacgtgacatgccattacaatttcgtttatgcaaaaaagtaagttgcttatagtttagcctttggtttcaatttgcactttatagaattatactggcagagctcctgacggagcacctgacggagctcgccacaggtaccaaacggcgcagcagcagttgatgtgcaacccgagtgtactgccgctcgaggaggccagtaagtgccaacaacatgaatagccaaagcagggaaatagggctggcgggggcacatgggtaacttggtcctggagcattggagaaggagcataccacaaggaaaccaacacgattactgggttaacgaacaactcatactttgatggagcacatgaggttcgacattatgtcaggaagcattcgaatcttggtcgtattgtgcttgaagttgctaaggactcgcaaatcccccgccaagcaaactgctagaaatcttttcagaggtggagatgatgaagatgatagtgctgatgccgacacaaatgatcctgttgtaccttggtcattaggtagagtaggagttgggcatatggtgtacatctccggtttgacttgtgccttgagttcaacaaatatgaaagtgctgagagaggtggcatctagaggacgtcatgtcgaacgtgtgaagaatttttttagaaatatgtatatttgtgcgaaactttttagaaacttgactccattttattttctatgttactctcggctttgtttcctatcctttccaatgacttgctatgcatttgcactgtatttggcatgtttaaaactgctacacaaaacttgctatatattttgtccaaaaatactatatccttgttatgattgattgatctttattttgtctgctcttctattcttgcgtggg

SEQ ID NO: 217508 - DNA, 3309 bp, Zea Mays
attggaatcatcgaccctgactgtagactcattggtcttcatctctatgacggcttatttaaggttataccatttgacaacaaagggcagctgaaggaagctttcaatatcagactggaagaacttcaagtactggacatcaaatttctgcatggttgtgttaaacctacaattgttgtcctctaccaggataataaagatgtgaggcatgttaagacttatgaagttgcactgaaggacaaagattttattgagggcccttggtctcagaataatgtagacaatggtgctggtttgttgatacctgtaccagctccacttggtggtgtgataataattggcgaggagcaaatagtttactgcaatgccaattctacatttaaagcaataccaataaaaacaagtaatctcttgcctacatctctttaaatttctttgtggtgcctacttcaggttggtaagtatcgtgtctacactaattcttttgcccttgatttccgtttttcgccagtccattattagagcttatggacgggttgacccagatggttctcgatatttacttggtgataatactggaattctgcatttacttgtccttacccatgaacgagaaagggttactggtttgaaaattgaatacctgggggagacttcgattgcatcatcgatttcatatcttgataatggcgttgtttatgttggttcacggtttggcgattcacagctggtgaagctgaacctccaagctgatgcaagtggttcatttgttgaaattctcgaacggtatgttaatcttggaccgattgtggacttctgcgtgattgaccttgataggcagggtcaaggtcaggtggtcacttgttctggggcatttaaagatggttcccttcgggtggttcggaatggtatagggattaatgagcaggcttcagtagaactccaaggcataaagggattatggtcattgaaatcttctttcaatgatccatatgacatgtaccttgttgtgagctttataagtgagacacgattcttggcaatgaacatggaagatgaacttgaagagaccgagatagaggggtttgatgcacaaactcagaccctgttttgtcaaaatgcgatcaatgaccttcttatacaggttctgttggcaaccggtggtggccatcttgtttacctagaaattagggatgctaaacttgttgaagtgaagcatgcacagttagaacatgagatttcttgtcttgatttgaacccaattggagagcatctagagtatagttccctagctgctgttgggatgtggacagatataagtgttagaatattttcacttccagatcttgtattaataaggaaagaaaatttgggtggagaaattgttcctcggtctgttctgctgtgcaccttggagggggtttcgtatttactttgtgctcttggggatggtaatctgttcagttttctgctgaatgcaagcacaggtgaactgactgatagaaaaaaggttaccctcgggacccaaccaatcagccttcgtacattctcatcaaagggtaccacccacgtgtttgcttcatcagataggccaactgtcatctatagcagcaataagaagcttctctatagcaatgtaaatttgaaagaggttaatcatatgtgccctttcaatacagccgcttttccagacagtcttgcaattgctaaagagggtgagctttcaattggaactattgatgatatccagaagcttcatatccgcacaatcccccttaatgaacaagcacgccgcatttgccaccaggagcaatcaaagacactagcattttgcagtttcaagtacaaccagagtgtggaggaaagtgagactcacttaatacgtctgctagatcatcagacttttgagtccctgtgtgtgtatcctctagaccagtatgaatgtggctgctccatcattagctgttcgtttgtggatgacaataatgtctattactgtgtgggaactgcatatgttatacctgaagaaaatgaaccaaccaagggccgaatccttgtatttgcagttgaagatggaagtttgcaattaattgtggagaaagaaaccaaaggagcagtttattcgttgaatgcattcaatgggaaattgttggctgctatcaaccagaagattcaattatacaagtggatgtcgcgcgaggatggttcacatgagctgcaatctgagtgtggccaccatgggcacatacttgccttgtacactcaaacacgtggtgacttcattgtggttggcgatctgatgaagtcaatttccttgctggtgtataagcatgaggaaagcgcgatcgaagagcgtgctagggattacaatgcaaactggatgactgcagttgagatgcttgatgatgaagtctatgttggggcggagaatggctataacttattcaccgtgcgcaagaacagtgatgctgccacagatgacgaaagggccaagcttgaggtcgttggggagtaccatctcggagagtttgtgaacagattccgccatggttcactcgtgatgcgccttccagactcagagatagggaagattcctacggtcatctttggcacaataaacggggtcattggcattatcgcctccctcccgcatgaccattacaccttccttgagaagttccagtccactcttgtcaagtacataaagggagttggaaacatgagccatgagcaatggcggtcgttccataacgacaagaagacagcggaggcacggaacttccttgatggtgacctgatcgagtcgttccttgaccttagccggagcaagatggaggtggtgtccaaggctatgggcgtttcggtggaggatctgtccaagattgtggaagagctgacgaggcttcactagtacatggatacgcagaagctttgcttgtaacttgatgcatgtacatcctctttttgccatctatttttgtgctgtagcagttccatgagctgcctcagcagttgccgcgggccgtgttggcccgaagctgtagcctgccctgctttattggttgactcggaatactttttgggttgtgccagtttgttgagattgttttttttcttttattctatgttgaatggaaagattagcggtgaatcctgtcatggtcctatctgaatatattggggtactaggagccagagagatgaccgaatgactgtcttgtaggacctggttcattccaggcccaattcaatcgggcagggtcagcaacccagccctttgtttaaaaaatgtatccggtgttcaaagga

SEQ ID NO: 217509 - DNA, 3520 bp, Zea Mays
attggaatcatcgaccctgactgtagactcattggtcttcatctctatgacggcttatttaaggttataccatttgacaacaaagggcagctgaaggaagctttcaatatcagactggaagaacttcaagtactggacatcaaatttctgcatggttgtgttaaacctacaattgttgtcctctaccaggataataaagatgtgaggcatgttaagacttatgaagttgcactgaaggacaaagattttattgagggcccttggtctcagaataatgtagacaatggtgctggtttgttgatacctgtaccagctccacttggtggtgtgataataattggcgaggagcaaatagtttactgcaatgccaattctacatttaaagcaataccaataaaaacaatccattattagagcttatggacgggttgacccagatggttctcgatatttacttggtgataatactggaattctgcatttacttgtccttacccatgaacgagaaagggttactggtttgaaaattgaatacctgggggagacttcgattgcatcatcgatttcatatcttgataatggcgttgtttatgttggttcacggtttggcgattcacagctggtgaagctgaacctccaagctgatgcaagtggttcatttgttgaaattctcgaacggtatgttaatcttggaccgattgtggacttctgcgtgattgaccttgataggcagggtcaaggtcaggtggtcacttgttctggggcatttaaagatggttcccttcgggtggttcggaatggtatagggattaatgagcaggcttcagtagaactccaaggcataaagggattatggtcattgaaatcttctttcaatgatccatatgacatgtaccttgttgtgagctttataagtgagacacgattcttggcaatgaacatggaagatgaacttgaagagaccgagatagaggggtttgatgcacaaactcagaccctgttttgtcaaaatgcgatcaatgaccttcttatacaggttactgctaattcggttcgattagtcagttgtacctcccgggagctagtggatcagtggaatgcaccagcaggattctcagtcaatgttgcttcagctaatgccagtcaggttctgttggcaaccggtggtggccatcttgtttacctagaaattagggatgctaaacttgttgaagtgaagcatgcacagttagaacatgagatttcttgtcttgatttgaacccaattggagagcatctagagtatagttccctagctgctgttgggatgtggacagatataagtgttagaatattttcacttccagatcttgtattaataaggaaagaaaatttgggtggagaaattgttcctcggtctgttctgctgtgcaccttggagggggtttcgtatttactttgtgctcttggggatggtaatctgttcagttttctgctgaatgcaagcacaggtgaactgactgatagaaaaaaggttaccctcgggacccaaccaatcagccttcgtacattctcatcaaagggtaccacccacgtgtttgcttcatcagataggccaactgtcatctatagcagcaataagaagcttctctatagcaatgtaaatttgaaagaggttaatcatatgtgccctttcaatacagccgcttttccagacagtcttgcaattgctaaagagggtgagctttcaattggaactattgatgatatccagaagcttcatatccgcacaatcccccttaatgaacaagcacgccgcatttgccaccaggagcaatcaaagacactagcattttgcagtttcaagtacaaccagagtgtggaggaaagtgagactcacttaatacgtctgctagatcatcagacttttgagtccctgtgtgtgtatcctctagaccagtatgaatgtggctgctccatcattagctgttcgtttgtggatgacaataatgtctattactgtgtgggaactgcatatgttatacctgaagaaaatgaaccaaccaagggccgaatccttgtatttgcagttgaagatggaagtttgcaattaattgtggagaaagaaaccaaaggagcagtttattcgttgaatgcattcaatgggaaattgttggctgctatcaaccagaagattcaattatacaagtggatgtcgcgcgaggatggttcacatgagctgcaatctgagtgtggccaccatgggcacatacttgccttgtacactcaaacacgtggtgacttcattgtggttggcgatctgatgaagtcaatttccttgctggtgtataagcatgaggaaagcgcgatcgaagagcgtgctagggattacaatgcaaactggatgactgcagttgagatgcttgatgatgaagtctatgttggggcggagaatggctataacttattcaccgtgcgcaagaacagtgatgctgccacagatgacgaaagggccaagcttgaggtcgttggggagtaccatctcggagagtttgtgaacagattccgccatggttcactcgtgatgcgccttccagactcagagatagggaagattcctacggtcatctttggcacaataaacggggtcattggcattatcgcctccctcccgcatgaccattacaccttccttgagaagttccagtccactcttgtcaagtacataaagggagttggaaacatgagccatgagcaatggcggtcgttccataacgacaagaagacagcggaggcacggaacttccttgatggtgacctgatcgagtcgttccttgaccttagccggagcaagatggaggtggtgtccaaggctatgggcgtttcggtggaggatctgtccaagattgtggaagagctgacgaggcttcactagtacatggatacgcagaagctttgcttgtaacttgatgcatgtacatcctctttttgccatctatttttgtgctgtagcagttccatgagctgcctcagcagttgccgcgggccgtgttggcccgaagctgtagcctgccctgctttattggttgactcggaatactttttgggttgtgccagtttgttgagattgttttttttcttttattctatgttgaatggaaagattagcggtgaaacagaggcgcacccttacgtctccttcaccataaattttgtctgagaccggcatgttcctggccgtctgcggcccaggcaatatttcgagcagaactgccataaattctttgttgatttgtcggttcatgtgctcctgtaattcacatcacagagagaccagccgatcaataatgtagtttctgaggacatgtttccctgcagtattgtaccttgggagcgcattgtaaatggcctggaacagttgtctactggatttgtttatttatttacaataaaagccatgtgaaaataagtaactaaaatttggattgtcagttgatgaaaaatggaatgtggagctagctaggctctgggtttgtggcgc

SEQ ID NO: 217510 - DNA, 3614 bp, Zea Mays
gtcttcatctctatgacggcttatttaaggttataccatttgacaacaaagggcagctgaaggaagctttcaatatcagttatcattttcttctgttagactggaagaacttcaagtactggacatcaaatttctgcatggttgtgttaaacctacaattgttgtcctctaccaggataataaagatgtgaggcatgttaagacttatgaagttgcactgaaggacaaagattttattgagggcccttggtctcagaataatgtagacaatggtgctggtttgttgatacctgtaccagctccacttggtggtgtgataataattggcgaggagcaaatagtttactgcaatgccaattctacatttaaagcaataccaataaaaacaagtaatctcttgcctacatctctttaaatttctttgtggtgcctacttcaggttggtaagtatcgtgtctacactaattcttttgcccttgatttccgtttttcgccagtccattattagagcttatggacgggttgacccagatggttctcgatatttacttggtgataatactggaattctgcatttacttgtccttacccatgaacgagaaagggttactggtttgaaaattgaatacctgggggagacttcgattgcatcatcgatttcatatcttgataatggcgttgtttatgttggttcacggtttggcgattcacagctggtgaagctgaacctccaagctgatgcaagtggttcatttgttgaaattctcgaacggtatgttaatcttggaccgattgtggacttctgcgtgattgaccttgataggcagggtcaaggtcaggtggtcacttgttctggggcatttaaagatggttcccttcgggtggttcggaatggtatagggattaatgagcaggcttcagtagaactccaaggcataaagggattatggtcattgaaatcttctttcaatgatccatatgacatgtaccttgttgtgagctttataagtgagacacgattcttggcaatgaacatggaagatgaacttgaagagaccgagatagaggggtttgatgcacaaactcagaccctgttttgtcaaaatgcgatcaatgaccttcttatacaggttactgctaattcggttcgattagtcagttgtacctcccgggagctagtggatcagtggaatgcaccagcaggattctcagtcaatgttgcttcagctaatgccagtcaggttctgttggcaaccggtggtggccatcttgtttacctagaaattagggatgctaaacttgttgaagtgaagcatgcacagttagaacatgagatttcttgtcttgatttgaacccaattggagagcatctagagtatagttccctagctgctgttgggatgtggacagatataagtgttagaatattttcacttccagatcttgtattaataaggaaagaaaatttgggtggagaaattgttcctcggtctgttctgctgtgcaccttggagggggtttcgtatttactttgtgctcttggggatggtaatctgttcagttttctgctgaatgcaagcacaggtgaactgactgatagaaaaaaggttaccctcgggacccaaccaatcagccttcgtacattctcatcaaagggtaccacccacgtgtttgcttcatcagataggccaactgtcatctatagcagcaataagaagcttctctatagcaatgtaaatttgaaagaggttaatcatatgtgccctttcaatacagccgcttttccagacagtcttgcaattgctaaagagggtgagctttcaattggaactattgatgatatccagaagcttcatatccgcacaatcccccttaatgaacaagcacgccgcatttgccaccaggagcaatcaaagacactagcattttgcagtttcaagtacaaccagagtgtggaggaaagtgagactcacttaatacgtctgctagatcatcagacttttgagtccctgtgtgtgtatcctctagaccagtatgaatgtggctgctccatcattagctgttcgtttgtggatgacaataatgtctattactgtgtgggaactgcatatgttatacctgaagaaaatgaaccaaccaagggccgaatccttgtatttgcagttgaagatggaagtttgcaattaattgtggagaaagaaaccaaaggagcagtttattcgttgaatgcattcaatgggaaattgttggctgctatcaaccagaagattcaattatacaagtggatgtcgcgcgaggatggttcacatgagctgcaatctgagtgtggccaccatgggcacatacttgccttgtacactcaaacacgtggtgacttcattgtggttggcgatctgatgaagtcaatttccttgctggtgtataagcatgaggaaagcgcgatcgaagagcgtgctagggattacaatgcaaactggatgactgcagttgagatgcttgatgatgaagtctatgttggggcggagaatggctataacttattcaccgtgcgcaagaacagtgatgctgccacagatgacgaaagggccaagcttgaggtcgttggggagtaccatctcggagagtttgtgaacagattccgccatggttcactcgtgatgcgccttccagactcagagatagggaagattcctacggtcatctttggcacaataaacggggtcattggcattatcgcctccctcccgcatgaccattacaccttccttgagaagttccagtccactcttgtcaagtacataaagggagttggaaacatgagccatgagcaatggcggtcgttccataacgacaagaagacagcggaggcacggaacttccttgatggtgacctgatcgagtcgttccttgaccttagccggagcaagatggaggtggtgtccaaggctatgggcgtttcggtggaggatctgtccaagattgtggaagagctgacgaggcttcactagtacatggatacgcagaagctttgcttgtaacttgatgcatgtacatcctctttttgccatctatttttgtgctgtagcagttccatgagctgcctcagcagttgccgcgggccgtgttggcccgaagctgtagcctgccctgctttattggttgactcggaatactttttgggttgtgccagtttgttgagattgttttttttcttttattctatgttgaatggaaagattagcggtgaaacagaggcgcacccttacgtctccttcaccataaattttgtctgagaccggcatgttcctggccgtctgcggcccaggcaatatttcgagcagaactgccataaattctttgttgatttgtcggttcatgtgctcctgtaattcacatcacagagagaccagccgatcaataatgtagtttctgaggacatgtttccctgcagtattgtaccttgggagcgcattgtaaatggcctggaacagttgtctactggatttgtttatttatttacaataaaagccatgtgaaaataagtaactaaaatttggattgtcagttgatgaaaaatggaatgtggagctagctaggctctgggtttgtggcgc

SEQ ID NO: 217511 - DNA, 3417 bp, Zea Mays
caatatcaggactggaagaacttcaagtactggacatcaaatttctgcatggttgtgttaaacctacaattgttgtcctctaccaggataataaagatgtgaggcatgttaagacttatgaagttgcactgaaggacaaagattttattgagggcccttggtctcagaataatgtagacaatggtgctggtttgttgatacctgtaccagctccacttggtggtgtgataataattggcgaggagcaaatagtttactgcaatgccaattctacatttaaagcaataccaataaaaacaatccattattagagcttatggacgggttgacccagatggttctcgatatttacttggtgataatactggaattctgcatttacttgtccttacccatgaacgagaaagggttactggtttgaaaattgaatacctgggggagacttcgattgcatcatcgatttcatatcttgataatggcgttgtttatgttggttcacggtttggcgattcacagctggtgaagctgaacctccaagctgatgcaagtggttcatttgttgaaattctcgaacggtatgttaatcttggaccgattgtggacttctgcgtgattgaccttgataggcagggtcaaggtcaggtggtcacttgttctggggcatttaaagatggttcccttcgggtggttcggaatggtatagggattaatgagcaggcttcagtagaactccaaggcataaagggattatggtcattgaaatcttctttcaatgatccatatgacatgtaccttgttgtgagctttataagtgagacacgattcttggcaatgaacatggaagatgaacttgaagagaccgagatagaggggtttgatgcacaaactcagaccctgttttgtcaaaatgcgatcaatgaccttcttatacaggttactgctaattcggttcgattagtcagttgtacctcccgggagctagtggatcagtggaatgcaccagcaggattctcagtcaatgttgcttcagctaatgccagtcaggttctgttggcaaccggtggtggccatcttgtttacctagaaattagggatgctaaacttgttgaagtgaagcatgcacagttagaacatgagatttcttgtcttgatttgaacccaattggagagcatctagagtatagttccctagctgctgttgggatgtggacagatataagtgttagaatattttcacttccagatcttgtattaataaggaaagaaaatttgggtggagaaattgttcctcggtctgttctgctgtgcaccttggagggggtttcgtatttactttgtgctcttggggatggtaatctgttcagttttctgctgaatgcaagcacaggtgaactgactgatagaaaaaaggttaccctcgggacccaaccaatcagccttcgtacattctcatcaaagggtaccacccacgtgtttgcttcatcagataggccaactgtcatctatagcagcaataagaagcttctctatagcaatgtaaatttgaaagaggttaatcatatgtgccctttcaatacagccgcttttccagacagtcttgcaattgctaaagagggtgagctttcaattggaactattgatgatatccagaagcttcatatccgcacaatcccccttaatgaacaagcacgccgcatttgccaccaggagcaatcaaagacactagcattttgcagtttcaagtacaaccagagtgtggaggaaagtgagactcacttaatacgtctgctagatcatcagacttttgagtccctgtgtgtgtatcctctagaccagtatgaatgtggctgctccatcattagctgttcgtttgtggatgacaataatgtctattactgtgtgggaactgcatatgttatacctgaagaaaatgaaccaaccaagggccgaatccttgtatttgcagttgaagatggaagtttgcaattaattgtggagaaagaaaccaaaggagcagtttattcgttgaatgcattcaatgggaaattgttggctgctatcaaccagaagattcaattatacaagtggatgtcgcgcgaggatggttcacatgagctgcaatctgagtgtggccaccatgggcacatacttgccttgtacactcaaacacgtggtgacttcattgtggttggcgatctgatgaagtcaatttccttgctggtgtataagcatgaggaaagcgcgatcgaagagcgtgctagggattacaatgcaaactggatgactgcagttgagatgcttgatgatgaagtctatgttggggcggagaatggctataacttattcaccgtgcgcaagaacagtgatgctgccacagatgacgaaagggccaagcttgaggtcgttggggagtaccatctcggagagtttgtgaacagattccgccatggttcactcgtgatgcgccttccagactcagagatagggaagattcctacggtcatctttggcacaataaacggggtcattggcattatcgcctccctcccgcatgaccattacaccttccttgagaagttccagtccactcttgtcaagtacataaagggagttggaaacatgagccatgagcaatggcggtcgttccataacgacaagaagacagcggaggcacggaacttccttgatggtgacctgatcgagtcgttccttgaccttagccggagcaagatggaggtggtgtccaaggctatgggcgtttcggtggaggatctgtccaagattgtggaagagctgacgaggcttcactagtacatggatacgcagaagctttgcttgtaacttgatgcatgtacatcctctttttgccatctatttttgtgctgtagcagttccatgagctgcctcagcagttgccgcgggccgtgttggcccgaagctgtagcctgccctgctttattggttgactcggaatactttttgggttgtgccagtttgttgagattgttttttttcttttattctatgttgaatggaaagattagcggtgaaacagaggcgcacccttacgtctccttcaccataaattttgtctgagaccggcatgttcctggccgtctgcggcccaggcaatatttcgagcagaactgccataaattctttgttgatttgtcggttcatgtgctcctgtaattcacatcacagagagaccagccgatcaataatgtagtttctgaggacatgtttccctgcagtattgtaccttgggagcgcattgtaaatggcctggaacagttgtctactggatttgtttatttatttacaataaaagccatgtgaaaataagtaactaaaatttggattgtcagttgatgaaaaatggaatgtggagctagctaggctctgggtttgtggcgc

SEQ ID NO: 217512 - DNA, 2123 bp, Zea Mays
cataaagggattatggtcattgaaatcttctttcaatgatccatatgacatgtaccttgttgtgagctttataagtgagacacgattcttggcaatgaacatggaagatgaacttgaagagaccgagatagaggggtttgatgcacaaactcagaccctgttttgtcaaaatgcgatcaatgaccttcttatacaggttactgctaattcggttcgattagtcagttgtacctcccgggagctagtggatcagtggaatgcaccagcaggattctcagtcaatgttgcttcagctaatgccagtcaggttctgttggcaaccggtggtggccatcttgtttacctagaaattagggatgctaaacttgttgaagtgaagcatgcacagttagaacatgagatttcttgtcttgatttgaacccaattggagagcatctagagtatagttccctagctgctgttgggatgtggacagatataagtgttagaatattttcacttccagatcttgtattaataaggaaagaaaatttgggtggagaaattgttcctcggtctgttctgctgtgcaccttggagggggtttcgtatttactttgtgctcttggggatggtaatctgttcagttttctgctgaatgcaagcacaggtgaactgactgatagaaaaaaggttaccctcgggacccaaccaatcagccttcgtacattctcatcaaagggtaccacccacgtgtttgcttcatcagataggccaactgtcatctatagcagcaataagaagcttctctatagcaatgtaaatttgaaagaggttaatcatatgtgccctttcaatacagccgcttttccagacagggccgaatccttgtatttgcagttgaagatggaagtttgcaattaattgtggagaaagaaaccaaaggagcagtttattcgttgaatgcattcaatgggaaattgttggctgctatcaaccagaagattcaattatacaagtggatgtcgcgcgaggatggttcacatgagctgcaatctgagtgtggccaccatgggcacatacttgccttgtacactcaaacacgtggtgacttcattgtggttggcgatctgatgaagtcaatttccttgctggtgtataagcatgaggaaagcgcgatcgaagagcgtgctagggattacaatgcaaactggatgactgcagttgagatgcttgatgatgaagtctatgttggggcggagaatggctataacttattcaccgtgcgcaagaacagtgatgctgccacagatgacgaaagggccaagcttgaggtcgttggggagtaccatctcggagagtttgtgaacagattccgccatggttcactcgtgatgcgccttccagactcagagatagggaagattcctacggtcatctttggcacaataaacggggtcattggcattatcgcctccctcccgcatgaccattacaccttccttgagaagttccagtccactcttgtcaagtacataaagggagttggaaacatgagccatgagcaatggcggtcgttccataacgacaagaagacagcggaggcacggaacttccttgatggtgacctgatcgagtcgttccttgaccttagccggagcaagatggaggtggtgtccaaggctatgggcgtttcggtggaggatctgtccaagattgtggaagagctgacgaggcttcactagtacatggatacgcagaagctttgcttgtaacttgatgcatgtacatcctctttttgccatctatttttgtgctgtagcagttccatgagctgcctcagcagttgccgcgggccgtgttggcccgaagctgtagcctgccctgctttattggttgactcggaatactttttgggttgtgccagtttgttgagattgttttttttcttttattctatgttgaatggaaagattagcggtgaatcctgtcatggtcctatctgaatatattggggtactaggagccagagagatgaccgaatgactgtcttgtaggacctggttcattccaggcccaattcaatcgggcagggtcagcaacccagccctttgtttaaaaaatgtatccggtgttcaaagga

SEQ ID NO: 217513 - DNA, 2222 bp, Zea Mays
caagaaatagggagcttatcaaattatttcttgtgtacatgcaattgcaatctaaaggttctgttggcaaccggtggtggccatcttgtttacctagaaattagggatgctaaacttgttgaagtgaagcatgcacagttagaacatgagatttcttgtcttgatttgaacccaattggagagcatctagagtatagttccctagctgctgttgggatgtggacagatataagtgttagaatattttcacttccagatcttgtattaataaggaaagaaaatttgggtggagaaattgttcctcggtctgttctgctgtgcaccttggagggggtttcgtatttactttgtgctcttggggatggtaatctgttcagttttctgctgaatgcaagcacaggtgaactgactgatagaaaaaaggttaccctcgggacccaaccaatcagccttcgtacattctcatcaaagggtaccacccacgtgtttgcttcatcagataggccaactgtcatctatagcagcaataagaagcttctctatagcaatgtaaatttgaaagaggttaatcatatgtgccctttcaatacagccgcttttccagacagtcttgcaattgctaaagagggtgagctttcaattggaactattgatgatatccagaagcttcatatccgcacaatcccccttaatgaacaagcacgccgcatttgccaccaggagcaatcaaagacactagcattttgcagtttcaagtacaaccagagtgtggaggaaagtgagactcacttaatacgtctgctagatcatcagacttttgagtccctgtgtgtgtatcctctagaccagtatgaatgtggctgctccatcattagctgttcgtttgtggatgacaataatgtctattactgtgtgggaactgcatatgttatacctgaagaaaatgaaccaaccaagggccgaatccttgtatttgcagttgaagatggaagtttgcaattaattgtggagaaagaaaccaaaggagcagtttattcgttgaatgcattcaatgggaaattgttggctgctatcaaccagaagattcaattatacaagtggatgtcgcgcgaggatggttcacatgagctgcaatctgagtgtggccaccatgggcacatacttgccttgtacactcaaacacgtggtgacttcattgtggttggcgatctgatgaagtcaatttccttgctggtgtataagcatgaggaaagcgcgatcgaagagcgtgctagggattacaatgcaaactggatgactgcagttgagatgcttgatgatgaagtctatgttggggcggagaatggctataacttattcaccgtgcgcaagaacagtgatgctgccacagatgacgaaagggccaagcttgaggtcgttggggagtaccatctcggagagtttgtgaacagattccgccatggttcactcgtgatgcgccttccagactcagagatagggaagattcctacggtcatctttggcacaataaacggggtcattggcattatcgcctccctcccgcatgaccattacaccttccttgagaagttccagtccactcttgtcaagtacataaagggagttggaaacatgagccatgagcaatggcggtcgttccataacgacaagaagacagcggaggcacggaacttccttgatggtgacctgatcgagtcgttccttgaccttagccggagcaagatggaggtggtgtccaaggctatgggcgtttcggtggaggatctgtccaagattgtggaagagctgacgaggcttcactagtacatggatacgcagaagctttgcttgtaacttgatgcatgtacatcctctttttgccatctatttttgtgctgtagcagttccatgagctgcctcagcagttgccgcgggccgtgttggcccgaagctgtagcctgccctgctttattggttgactcggaatactttttgggttgtgccagtttgttgagattgttttttttcttttattctatgttgaatggaaagattagcggtgaatcctgtcatggtcctatctgaatatattggggtactaggagccagagagatgaccgaatgactgtcttgtaggacctggttcattccaggcccaattcaatcgggcagggtcagcaacccagccctttgtttaaaaaatgtatccggtgttcaaagga

SEQ ID NO: 217514 - DNA, 1643 bp, Zea Mays
ctctctgtccagctctgaagctcacttagtcttgcaattgctaaagagggtgagctttcaattggaactattgatgatatccagaagcttcatatccgcacaatcccccttaatgaacaagcacgccgcatttgccaccaggagcaatcaaagacactagcattttgcagtttcaagtacaaccagagtgtggaggaaagtgagactcacttaatacgtctgctagatcatcagacttttgagtccctgtgtgtgtatcctctagaccagtatgaatgtggctgctccatcattagctgttcgtttgtggatgacaataatgtctattactgtgtgggaactgcatatgttatacctgaagaaaatgaaccaaccaagggccgaatccttgtatttgcagttgaagatggaagtttgcaattaattgtggagaaagaaaccaaaggagcagtttattcgttgaatgcattcaatgggaaattgttggctgctatcaaccagaagattcaattatacaagtggatgtcgcgcgaggatggttcacatgagctgcaatctgagtgtggccaccatgggcacatacttgccttgtacactcaaacacgtggtgacttcattgtggttggcgatctgatgaagtcaatttccttgctggtgtataagcatgaggaaagcgcgatcgaagagcgtgctagggattacaatgcaaactggatgactgcagttgagatgcttgatgatgaagtctatgttggggcggagaatggctataacttattcaccgtgcgcaagaacagtgatgctgccacagatgacgaaagggccaagcttgaggtcgttggggagtaccatctcggagagtttgtgaacagattccgccatggttcactcgtgatgcgccttccagactcagagatagggaagattcctacggtcatctttggcacaataaacggggtcattggcattatcgcctccctcccgcatgaccattacaccttccttgagaagttccagtccactcttgtcaagtacataaagggagttggaaacatgagccatgagcaatggcggtcgttccataacgacaagaagacagcggaggcacggaacttccttgatggtgacctgatcgagtcgttccttgaccttagccggagcaagatggaggtggtgtccaaggctatgggcgtttcggtggaggatctgtccaagattgtggaagagctgacgaggcttcactagtacatggatacgcagaagctttgcttgtaacttgatgcatgtacatcctctttttgccatctatttttgtgctgtagcagttccatgagctgcctcagcagttgccgcgggccgtgttggcccgaagctgtagcctgccctgctttattggttgactcggaatactttttgggttgtgccagtttgttgagattgttttttttcttttattctatgttgaatggaaagattagcggtgaatcctgtcatggtcctatctgaatatattggggtactaggagccagagagatgaccgaatgactgtcttgtaggacctggttcattccaggcccaattcaatcgggcagggtcagcaacccagccctttgtttaaaaaatgtatccggtgttcaaagga

SEQ ID NO: 217515 - DNA, 1690 bp, Zea Mays
atgtcatggtcggggccagaactggcgaagtggtcgcgtgacggccaggaagcggagcaggagcccgagtcggtgcctcgtcgcaagtcatggtcggcgccagaactggcgcagtggtcgcgtgccggcaaggaaaaggagcaggaggagcccgagtcgtcggaacctcagcgcaagtgggtggccctcgtctccgttgtcgtcctccccagcaacgaggacgagcgggcccatgagatcatccccggcaccgacatgctgatgctcgacctcaacgacccgccgctgccctcctacctcgtgcttcacccccgcgtcgcccccaatcccaggcgcaccaacgagccactgtccgcctacatcctcgccgccgaccgctccggctgcatcctcctccaggtcgtcgaaggcaaccgcccggacttcttcctctgcaacacccacactcgtaccgtcaccatcctccccccggtgtcctcctatacccaggccaacgacgtgggtctaatctacctccacctcagcatgggtctaatcgccgacccgcagcacagcggccactacatgtgtctgctgcgacccttcacgccagtccccgagagcccgcgctgcgcttcatccgctcccggccggctcgagatggccggccacgtcgccttcgaccgcgtcatcaagcccctcgtccgaaagcgccgctgcgtgaggcccagtgagggcaagctgcgcttcgtcgagatccgcggcctctcctacaaagtgcccgtcgacgagtctaaccccaccgtatggatgtggacgctcgttgacccggaggtcccgaacccctggacattcgagtacgaggtggccttcgcggaaatctgggaggacgagacctacgccgccgccggcctgcagccgggcgaggtgcccgacgtcgccctcgtcgaccccaacgaccactacgttgtctacttcttccagggctcgaagctcttcggcctggacctgcgcgagaagaaggtcgtcggctgcgaggaatggctgatagaccgcgatcgactcgagtaccaatcctcccgccccatcgtcgatgcctgggagctgtcgccaccaccgccatcgccacccattctttcgggcgatgacgactattcgacagacgatcagtcggaactgccttgcaccgaggaaaagaagcgccaggtggctgagtctgttgaatcttggctaaaccaggcccggttggcgtggacgagggacgcggacgtggacgcgtccaactggaggacatggaagatggcgcctccacaatctgatgaatcatctgttgacgctggtggccaaactgaagatgagccggagatacagttacccccttccccgtaactagcaggtgaggtgagagagacagagagagcccagagctcgattcgtcgtgtcaacacatgtggatgcttctttcgatcttgcgttatagtagatcagcctgcagctttgtgtcagtcatctgagttgatgaaagccaacgaacaatcacactgcgaccgttgttatcaagatgcgcgtgcagttccccagtactggaatgccagtcctgttgttacttaccttttttttttctgtgaatggattgactgtgtctgttgggctgtgagaacctgcaatgtgttgcaagtcgaccagctgatacaaatggtattcagttctg

SEQ ID NO: 217516 - DNA, 6498 bp, Zea Mays
cataaaccctagtggcaaaatcgtagaaccccaggccgctttgtctctgcccacggtccaaccgaaggaaaaaaaagtttgaaaatcaaacacctttcattccccccatccctcctcctgctcatcactgctgctctctggctgctccctctccctccatccccactgctgctctcttgccaaatctgatctagggtttcgttccatctccacgcgccgtcccagtacctatctactctagactactacagtatccaaaaggcaagcttatctgcggagggagtgagctgacgcattcccgtgctggcgagggacagccagacccagacggggagatccgatccgattccgtgctagctgctgcggagtgagtgaggtgacgcgggagcgggatggcggcgccggggcggaggacggcggacgtgtcctcgtcctcgcccgccccctcgccgtccccttccaccggtaggcgcctcctgcgcacgcagaccgtcggcaacctcggcgagtccatcttcgacagcgaggtcgtgccgtcctcgctcgtcgagatcgcacccatcctccgcgtcgccaacgaggtcgaggccaccaacccgcgcgtcgcctacctctgtcgcttctacgctttcgagaaggctcaccgcctcgacccgacatccagtggccgtggtgttcgtcagtttaagaccgcacttctgcagaggcttgagagggaaaatgatcccacgctcaagggaagggtccaccagagcgatgctcgggagatgcagcgcttctaccgcgaatactacaagaagtacatccaggcactgcagcatgctgctgataaggctgaccgagcactgctcactaaagcgtaccagacagctgctgtcttgtttgaggtcttgagggccgttaatgtctcgcagtccgttgaagtcgatcaagcgattttggatacacacaataaggttgaagaaaagaaaaagttgtacgtaccttataacattctcccgcttgatcctgaaagtactggtcaagccattatgcgatatccagagattcaagctgctgtttatgctcttcgcaatactagaggtctgccatggccaaaggaccaagacaagaagcctggcgagaagaatactgggaaagaccttctcgattggcttcaggctatgtttgggtttcagaaagacaacgtgtccaaccaaagggaacatttggtactgttgcttgcaaatgttcatataatgaaagtacccaaggttgaccaacaaccgaagttggatgacaaagctctggatgctgtaatgaagaagctgtttaagaattataagaagtggtgcaagtaccttggccgcaaaagcagcttatggttgccaaccatccagcaggaagtgcagcagcgtaagcttctttatatgggcctctacctgctgatttggggaagctgaaaggagcaagaccatgaaatcaaagcactcccattggagaaactatgatgatctgaatgagtacttttggtcagttgattgtttccggctaggatggcctatgagagctgatgctgactttttcaaaactccaaaagatgcttatctgaatcttttgaatggagagaacagatctgcaggtaatacccattggatgggaaaagttaattttgtggagatacgttcattttggcacatattccgtagtttcgacagaatgtggatcttcttaatattgtccttacaggccatgataattattgcttggaatggtggaacaccaagtgatatttttgatgctggagtatttaagaaggttttgagcatatttattactgctgcaattttgaagttgggtcaagcaatcctagacctcatatttggttggaaagcaagaagaaacatgtcatttgcagtcaagctgcgatatatcttgaagttaatatgtgctgctgcatgggttgtgattttacctgtgacttacgcgtacacttgggagaatcctactggacttgcaagaacaataaaaagttggcttggtgatggtcagaatcagccatctttgtacatattggccatagtgatatatatggcaccaaacatagttgcttctatgctatttcttttcccatttatgagaagattcttagagagttcaaatgttaaggtcataacgatcataatgtggtggtctcagccccggttatttgttggcagagggatgcatgaaggtgcattctccctcttcaagtataccatgttctgggttcttcttttagcaacgaagctgactgtaagcttctatattgagatcaaacctctggtacagccaaccatagatataatgagggaacctatcaggactttccagtggcacgaatttttccctcatggaactaacaatattggtgttgttatatcactgtgggctccaataattctagtatatttcatggacacccaaatttggtatgcactgttctcgacattaattggtggtatctatggggcttatcgtcgtcttggtgagatacggacattaggaatgttgagatctcgctttgaatctttgcccgaggccttcaatgaacgcttgattccttctgatgcaaataagagtaaaggtcttcgtgctgccttttcaagtagacccaaggcttctggtgacgaaagacagaaagagaaaagagctgcaaggtttgctcaaatgtggaatgtcattattacaagtttccgtgaagaagacctcatagacaatagggagatggatctgctactggttccatactgtaaagaccgtgagctcgatatatttcaatggccacctttcttacttgctagcaagatcccaatagcactggatatggcagcagacagtggcggaaaagaccgtgatctgacgaagaggataaaatcagatccatacttttcctttgctatcagagaatgctatgcttcattcaagaacatcatcaatactttagtgtttggtcagcgggagaaagatgtcctagcacagattttcgcagttgtggatcagcatatagaagatgaaactctgataaaggatctcaatatgaggaaccttcctgcactgagcaagaagtttgttgaattacttgaattactgcaaaaaaacaaggaggaagacttgggtcaggtagtcattttgttccaagatatgcttgaggtggtcacaagggatataatggaggaacaggaccagctcggcacactgttggaatctgcacatggtgcaaatagtagaaaacatgaaggaattacaccgctagatcagcaagaccagttgtttgctaaagctattaagttccctgtggatgaatcaattgcatggactgaaaagataaagaggcttcatcttctgttaactgtgaaggagtctgctatggatgttcctactaatcttgatgctaggcggcggatatcattctttgcaaattctttatttatggatatgcccaatgctccaaaagttcggaacatgttggccttctctatcttgactccttattacaaggaagatgttctgttctcattacaaaatctagaagagccaaatgaggatggagtttccattcttttctacttacaaaaaatttacccagatgaatggaaaaatttcctcgaaagggttggctgcaagaatgaagagggactccgtgaagatgaagaactagaagagaagcttcgtctttgggcgtcgtatagggggcagacattaacaagaactgtaagagggatgatgtactatcgaaaagctttggagcttcaggcttttcttgatatggcggaagatgatgatcttatggaaggttacagagcaacagaagtaatgcccgaggactcgcaattaatgactcaatgcaaggctatagctgacatgaagtttacatatgttgtctcatgccaacaatatggaattcagaagcgttctaatgagccttgcgcacatgatattttgagactaatgacggaatatccatcacttcgggtcgcctatattgatgaagttgaagcgcctagccaagatagaaacaagaagattgaaaaggtttactactcagtgttggtgaaggcttctgttacaaaacctgatgagcctggtcagagccttgatcaggtcatctacaagataaagctaccaggtaatgccattttaggtgaaggaaagccagaaaatcagaaccatgcaataatattcaccagaggcgaatgcctccaaactatagatatgaatcaggagcactatatggaggaggctttgaaaatgagaaatctgctgcaagagtttgagaagaaacatggagtgagatatccatcgatacttggagtcagagaacacatatttacgggcagtgtgtcatcccttgcatggttcatgtcaaatcaggaaactagtttcgtaacaattggacaacgagtgcttgccaatccgttgagggttcgttttcattatggtcatcctgatatcttcgatcgccttttccacattacgaggggtggtgtgagtaaagcatccaaaattatcaatctcagtgaggacatatttgcaggattcaattccacattgcgtgaaggcaatgttactcaccacgagtacatgcaagttggcaagggaagggatgtgggtctcaatcaaatatctctgtttgaggcaaagatagcaaatggcaatggcgaacagacgctgagccgtgacatctaccggctgggtcatcgctttgatttcttcagaatgctatcttgctactatacaacaattggtttctacttcagtacaatgattacagtgtggactgtatatgttttcctctatgggcggttatatcttgtacttagtggacttgatgaagcgctggctactggaaggaggtttgtgcacaatgcacctctccaggttgcgcttgcatcggagtcttttgtgcagcttgggtttttgatggcgctacccatgatgatggaaatcggtttggagagaggattcagaacagcattgagtgacttcatactgatgcagcttcagttggcctcagttttcttcacgttctcattgggaacaaaaactcattactacggaaggacattactccatggaggagctgaatacagagccactggacgtgggtttgtggtgttccatgcgaaatttgctgacaactatcgactctattcccgtagccattttgtcaagggcattgagctgatgattctactagttgtgtatgaaatatttagccagccatatagaggggctgtaacttacatcttcatcaccgtgtccatgtggttcatggtgggcacttggctctttgcaccattcctgttcaatccttctggatttgagtggcagaagattgtggacgactggaccgattggcacaagtggatcagcaatcgtggaggtatcggtgtagcaccagagaaaagctgggagtcatggtgggaaaaggagcaagagccccttcgatactccgggaagcgcggtactgttgttgaaatactgcttgcgctgcgtttctttatctaccagtacggacttgtgtatcatctgaatataacgaagaagataactaaggacaaccagagtgtgctggtttattgcttctcatgggttgtaatttttgtgattttgctcgttatgaagaccgtatcagtgggcaggagaaggttcagtgcagagttccagctagtgttccggttgatcaagggtctgatatttataacatttacagccatcgtggtaatcctaatagcgatccctggcatgacggtgctggacatatttgtttgcatccttgctttcatgcccactggatggggtttgctgctgattgcccaagcgatccggcctgtgatccacaagactgggctctggggctcgatcaaggctcttgcccggggctacgagatcctgatgggacttctcctgttcacgcccatcgccttcctcgcctggttcccgttcgtgtcggaattccagaccaggatgctgttcaaccaggcgttcagcagaggtctgcagatctcccgtatcctgggaggacacaagaaagaccgagggacccggaacaaagaatagggctgggctgctgctgattcaaggtttgtgtgcgccactagtatttatgtgtgaatgggtgggtagcatatggctcgagagtatctcctgaatggagattgattgatcctgaagagtagaagagactcgagtgatgtaagatgctgcaggcttgttgctttgttacctaggcgttaggcagaacagatgttttcaggatctctggcctgttaaccacatcttcccctgttcagagtgaattaattcctaatggaaactgatttgtgaattacttcctaatagaggagtgcttccaaactgatttcatgtgtgtgctgtgatattgtttagcatatagtattttaaatgtagctttgaattttcattctttcgcaacaaaaaatgaataggacaagctggtcaaacttgaaaaaaaaa

SEQ ID NO: 217517 - DNA, 6621 bp, Zea Mays
ataaaccctagtggcaaaatcgtagaaccccaggccgctttgtctctgcccacggtccaaccgaaggaaaaaaaagtttgaaaatcaaacacctttcattccccccatccctcctcctgctcatcactgctgctctctggctgctccctctccctccatccccactgctgctctcttgccaaatctgatctagggtttcgttccatctccacgcgccgtcccagtacctatctactctagactactacagtatccaaaaggcaagcttatctgcggagggagtgagctgacgcattcccgtgctggcgagggacagccagacccagacggggagatccgatccgattccgtgctagctgctgcggagtgagtgaggtgacgcgggagcgggatggcggcgccggggcggaggacggcggacgtgtcctcgtcctcgcccgccccctcgccgtccccttccaccggtaggcgcctcctgcgcacgcagaccgtcggcaacctcggcgagtccatcttcgacagcgaggtcgtgccgtcctcgctcgtcgagatcgcacccatcctccgcgtcgccaacgaggtcgaggccaccaacccgcgcgtcgcctacctctgtcgcttctacgctttcgagaaggctcaccgcctcgacccgacatccagtggccgtggtgttcgtcagtttaagaccgcacttctgcagaggcttgagagggaaaatgatcccacgctcaagggaagggtccaccagagcgatgctcgggagatgcagcgcttctaccgcgaatactacaagaagtacatccaggcactgcagcatgctgctgataaggctgaccgagcactgctcactaaagcgtaccagacagctgctgtcttgtttgaggtcttgagggccgttaatgtctcgcagtccgttgaagtcgatcaagcgattttggatacacacaataaggttgaagaaaagaaaaagttattcaagctgctgtttatgctcttcgcaatactagaggtctgccatggccaaaggaccaagacaagaagcctggcgagaagaatactgggaaagaccttctcgattggcttcaggctatgtttgggtttcagaaagacaacgtgtccaaccaaagggaacatttggtactgttgcttgcaaatgttcatataatgaaagtacccaaggttgaccaacaaccgaagttggatgacaaagctctggatgctgtaatgaagaagctgtttaagaattataagaagtggtgcaagtaccttggccgcaaaagcagcttatggttgccaaccatccagcaggaagtgcagcagcgtaagcttctttatatgggcctctacctgctgatttggggtgaggcggctaacttgagattcatgccagagtgtatttgttacatctaccatcatatggcttttgaactctacggcatgctggctggaaatgtgagcccaatgacgggtgaaaatgttaaaccagcatatggtggtgatgaagaagcctttttgattaaagttgtgactccaatatacaaagttatagagaaggaagctgaaaggagcaagaccatgaaatcaaagcactcccattggagaaactatgatgatctgaatgagtacttttggtcagttgattgtttccggctaggatggcctatgagagctgatgctgactttttcaaaactccaaaagatgcttatctgaatcttttgaatggagagaacagatctgcaggtaatacccattggatgggaaaagttaattttgtggagatacgttcattttggcacatattccgtagtttcgacagaatgtggatcttcttaatattgtccttacaggccatgataattattgcttggaatggtggaacaccaagtgatatttttgatgctggagtatttaagaaggttttgagcatatttattactgctgcaattttgaagttgggtcaagcaatcctagacctcatatttggttggaaagcaagaagaaacatgtcatttgcagtcaagctgcgatatatcttgaagttaatatgtgctgctgcatgggttgtgattttacctgtgacttacgcgtacacttgggagaatcctactggacttgcaagaacaataaaaagttggcttggtgatggtcagaatcagccatctttgtacatattggccatagtgatatatatggcaccaaacatagttgcttctatgctatttcttttcccatttatgagaagattcttagagagttcaaatgttaaggtcataacgatcataatgtggtggtctcagccccggttatttgttggcagagggatgcatgaaggtgcattctccctcttcaagtataccatgttctgggttcttcttttagcaacgaagctgactgtaagcttctatattgagatcaaacctctggtacagccaaccatagatataatgagggaacctatcaggactttccagtggcacgaatttttccctcatggaactaacaatattggtgttgttatatcactgtgggctccaataattctagtatatttcatggacacccaaatttggtatgcactgttctcgacattaattggtggtatctatggggcttatcgtcgtcttggtgagatacggacattaggaatgttgagatctcgctttgaatctttgcccgaggccttcaatgaacgcttgattccttctgatgcaaataagagtaaaggtcttcgtgctgccttttcaagtagacccaaggcttctggtgacgaaagacagaaagagaaaagagctgcaaggtttgctcaaatgtggaatgtcattattacaagtttccgtgaagaagacctcatagacaatagggagatggatctgctactggttccatactgtaaagaccgtgagctcgatatatttcaatggccacctttcttacttgctagcaagatcccaatagcactggatatggcagcagacagtggcggaaaagaccgtgatctgacgaagaggataaaatcagatccatacttttcctttgctatcagagaatgctatgcttcattcaagaacatcatcaatactttagtgtttggtcagcgggagaaagatgtcctagcacagattttcgcagttgtggatcagcatatagaagatgaaactctgataaaggatctcaatatgaggaaccttcctgcactgagcaagaagtttgttgaattacttgaattactgcaaaaaaacaaggaggaagacttgggtcaggtagtcattttgttccaagatatgcttgaggtggtcacaagggatataatggaggaacaggaccagctcggcacactgttggaatctgcacatggtgcaaatagtagaaaacatgaaggaattacaccgctagatcagcaagaccagttgtttgctaaagctattaagttccctgtggatgaatcaattgcatggactgaaaagataaagaggcttcatcttctgttaactgtgaaggagtctgctatggatgttcctactaatcttgatgctaggcggcggatatcattctttgcaaattctttatttatggatatgcccaatgctccaaaagttcggaacatgttggccttctctatcttgactccttattacaaggaagatgttctgttctcattacaaaatctagaagagccaaatgaggatggagtttccattcttttctacttacaaaaaatttacccagatgaatggaaaaatttcctcgaaagggttggctgcaagaatgaagagggactccgtgaagatgaagaactagaagagaagcttcgtctttgggcgtcgtatagggggcagacattaacaagaactgtaagagggatgatgtactatcgaaaagctttggagcttcaggcttttcttgatatggcggaagatgatgatcttatggaaggttacagagcaacagaagtaatgcccgaggactcgcaattaatgactcaatgcaaggctatagctgacatgaagtttacatatgttgtctcatgccaacaatatggaattcagaagcgttctaatgagccttgcgcacatgatattttgagactaatgacggaatatccatcacttcgggtcgcctatattgatgaagttgaagcgcctagccaagatagaaacaagaagattgaaaaggtttactactcagtgttggtgaaggcttctgttacaaaacctgatgagcctggtcagagccttgatcaggtcatctacaagataaagctaccaggtaatgccattttaggtgaaggaaagccagaaaatcagaaccatgcaataatattcaccagaggcgaatgcctccaaactatagatatgaatcaggagcactatatggaggaggctttgaaaatgagaaatctgctgcaagagtttgagaagaaacatggagtgagatatccatcgatacttggagtcagagaacacatatttacgggcagtgtgtcatcccttgcatggttcatgtcaaatcaggaaactagtttcgtaacaattggacaacgagtgcttgccaatccgttgagggttcgttttcattatggtcatcctgatatcttcgatcgccttttccacattacgaggggtggtgtgagtaaagcatccaaaattatcaatctcagtgaggacatatttgcaggattcaattccacattgcgtgaaggcaatgttactcaccacgagtacatgcaagttggcaagggaagggatgtgggtctcaatcaaatatctctgtttgaggcaaagatagcaaatggcaatggcgaacagacgctgagccgtgacatctaccggctgggtcatcgctttgatttcttcagaatgctatcttgctactatacaacaattggtttctacttcagtacaatgattacagtgtggactgtatatgttttcctctatgggcggttatatcttgtacttagtggacttgatgaagcgctggctactggaaggaggtttgtgcacaatgcacctctccaggttgcgcttgcatcggagtcttttgtgcagcttgggtttttgatggcgctacccatgatgatggaaatcggtttggagagaggattcagaacagcattgagtgacttcatactgatgcagcttcagttggcctcagttttcttcacgttctcattgggaacaaaaactcattactacggaaggacattactccatggaggagctgaatacagagccactggacgtgggtttgtggtgttccatgcgaaatttgctgacaactatcgactctattcccgtagccattttgtcaagggcattgagctgatgattctactagttgtgtatgaaatatttagccagccatatagaggggctgtaacttacatcttcatcaccgtgtccatgtggttcatggtgggcacttggctctttgcaccattcctgttcaatccttctggatttgagtggcagaagattgtggacgactggaccgattggcacaagtggatcagcaatcgtggaggtatcggtgtagcaccagagaaaagctgggagtcatggtgggaaaaggagcaagagccccttcgatactccgggaagcgcggtactgttgttgaaatactgcttgcgctgcgtttctttatctaccagtacggacttgtgtatcatctgaatataacgaagaagataactaaggacaaccagagtgtgctggtttattgcttctcatgggttgtaatttttgtgattttgctcgttatgaagaccgtatcagtgggcaggagaaggttcagtgcagagttccagctagtgttccggttgatcaagggtctgatatttataacatttacagccatcgtggtaatcctaatagcgatccctggcatgacggtgctggacatatttgtttgcatccttgctttcatgcccactggatggggtttgctgctgattgcccaagcgatccggcctgtgatccacaagactgggctctggggctcgatcaaggctcttgcccggggctacgagatcctgatgggacttctcctgttcacgcccatcgccttcctcgcctggttcccgttcgtgtcggaattccagaccaggatgctgttcaaccaggcgttcagcagaggtctgcagatctcccgtatcctgggaggacacaagaaagaccgagggacccggaacaaagaatagggctgggctgctgctgattcaaggtttgtgtgcgccactagtatttatgtgtgaatgggtgggtagcatatggctcgagagtatctcctgaatggagattgattgatcctgaagagtagaagagactcgagtgatgtaagatgctgcaggcttgttgctttgttacctaggcgttaggcagaacagatgttttcaggatctctggcctgttaaccacatcttcccctgttcagagtgaattaattcctaatggaaactgatttgtgaattacttcctaatagaggagtgcttccaaactgatttcatgtgtgtgctgtgatattgtttagcatatagtattttaaatgtagctttgaattttcattctttcgcaacaaaaaatgaataggacaagctggtcaaacttgaaaaaaaaa

SEQ ID NO: 217518 - DNA, 2242 bp, Zea Mays
ctctaataaaaagctatttgataaagcatcactgaattcatcctagaagttgtctgggagttctacaaaacactcccttgctctaagcacaactgatggaccactacaaaacactcccttgctcgaatccgctaagcacaggcccaaaccgtccacttggaaactcgaagcccatcctgtctttcctttgcgtcagtcgtcttcgacgcaaggagaattgggaattcaggaatcaggatgcggctctccttcccccttgtcgccggcgccgtcgtgatcggagtgatttctgggaatgttatatttgggccaccgcttcagaagtactgggcagagaagcagcagcaagaggcagcaaaagaaggccaagctggttcaacctgacaaaatgtcctccccttctgcagttacacggagaaatgtgtactcctcggtcctgaactagcatcggcttttgttagcattggttacatttagttgcccaagttttcggcgctggaagaagacaccgtgcaatgcacagaaagatttgaaaaacgtttaaatgctggttgatctcattctgaaatacagtacctttgatgaatgcaccgtgcaagacacggtggagacaccttcgaatgatttcaagcctcctttgaaatacctttgaagaagacaccgtgcaagacacggtattgtagtttgcatatctccgagtgcaggttgatttctgaaatagctagaagtcaggatcacagcgctgtatatcctactatcctagcctctttttcgtggcttccggatcttgctgggccgaccgttcgtctgagttctggcccaaattggcttttccggaatacggctcggccctctccagtacaacctccaccgctttctgaacacgaattagaaaaggacgcgatattgcagaagctcccgcccatttttcaccaatcaccagccctagccgcccattttccccatttttcaccaatcacaagaacctttgcgtcctccggcgaggcggcaaccgccggatccctgaacgtctgaatcctggagtgaaccccgcacaggatggcgaggaaagcgaaacccgccgcccaaggcaccgcggtcgtggctgccgccaccggcgtccagtactggctcttgaagacggagccgggcgagtggtcgtggtccgaccaggcgcgcgccccgggcggcgtcgcgccgtgggacggcgtccggaaccggcaggccatgagcagcctgcgcgccatgcggccgggcgaccgctgcctgttctaccactccggcgccggcgccgcctcccgccgcgtcgtcggcgtcgtcgaggtcgccaggccctggtacgagggcgagggcgaggaggcggtggccggtggcgccgtggacgtgcgggcggtcggggagttccggaaccccgtccctctgggtgtcatcaagaaggcggcgggcgaggtggaggggatgaaggacttcgcgctgctccggcaggcgcggctgtcggtgatgcccgtgccggcgaagatctgggactgggtttgcgacgcgggaggcggcctcgtgcaagacggcgagggtgaggacgaggaagaggaagaagaggcttgattccgcagaccagcaaatgtgaagaagaaccaagttgctcctgctggtgacatgagcagttgcaacttgcaaggcggcgttgtgtgggagtccttttggcctgcaagtgttttgctagctttgacaaggcactcctgtttcttcagtgttcgccgtctcggcgccgaagtgcccaagaaaaaaatgtatttactatttgatctactcctatgtaagttcagtggttcatgtagccaagtagcttggatatctatgaaggtactcgagctgttgcatgctgcggcagttttgcacacacacacgtcggctatacagccatccagattcagataggataggacccaatgaatgtgacccggaccctgacgcagagggctgggctgggctgtgctgggacttggagcagcggcagccggtagtgagctgtggcgcaagctctgcgttttatctgtttcgtcttcaattcgtcccatgttgcctgtcggcgacttgcttggggtcgtgactactttttctttctgccactgccacgacacgagccaatcccaccagatctgggcggagcattgaagtgccggcactcccaagtcctgcgggcaccgtcatcatctttctttgaattcctcgcagtaacaggtgg

SEQ ID NO: 217519 - DNA, 1324 bp, Zea Mays
atcctcatcacaggcaacaaggcaccacacctcttcttcttcttcctcctcctcctagcacagctagcgcctgctccccttcgcctgtgatcatgtcttgcagcagcggcaagtgcgactgtggctccagctgctcctgcagcagcacaagcaagaaccacacctcctcccttcgcctgtgatcatgtcgtcttgctgcggcggcaagtgcgggtgcggctccagctgctcctgcggcagcggatgcaacggctgcggtatgtaccctgacgtggagaccgccgccaccagcagcgtcaagaccacggtcctcgccgcgccgaccaccaaggccagcgccggcggcttcgaggcggccaccgagggcggcggctgcgactgcaacacctgcaagtgcggcaccagctgcggctgctcctgctgcagctgcaactgagctggcccggcccggcgatggcgcacgagagtcgagaggaggaggacgacgacgaggcgtataaatataatagcggcgtccagtaaataagatcctgtcaactgcacccgccattatccatggtcgctcgctcctcgcctgcgtctcctggtcctggggttcgtctgaacgtcctcgcggcttcacgacggcgatgccgcctccgtcgatcctgtccgtctcgtgccggatttaatattagatctatatgcgtgtttttctgcgttattactacatctacatgtgtctgtctgtggtgtgtctctctgacggccccatgcgtcagcgtcactgcttgcttcagttctgcatctcactctgttgaggtgaaaaactgataacatctttgcagtgctagaaaacctgagaacctcatgatatctaagtaactgagccaagagagagagagagagagagagtatctaagtaccttgatccacttggacagcacagttagactctgaaacgatcgttgcataatgcagagtaccctgaaattcgaagcatcgacatgaccagctacagttccggctactgttatgggtttttctcttcgcccctttagataacagaatatcgatatctttataaaggaaataatggaatagtaatgggcaatgctacggcaatttccctactagaacgcaatttcttaaataaatttgaacagttattttttttagtttttaaattgattatttcattaacctacaaaataaaaaaaaacacagcaaagccctgtagtgatatctaactagcccaaaaagaacaaatgtatgagtatcttaatgtgcttggaaatatttttcggcgagagagagagtgagagagctcttaatgtgattttaa

SEQ ID NO: 217520 - DNA, 1347 bp, Zea Mays
gtttccggctgcgacaacaagcgtaaactaggagagaaccagcaccccaaggatatcctgaacgaggtgtcgaggactcatcaagcaatacaatcgctggacaaggcggtgtccaccctggagatggagatggccgtggagcgcgcgaggagcgcggcggcgtggcatccggcaggagtcctccccagaaggccttcgtcgtggtcggcatcaacacggccttcaccagcaggaagcggcgcgactcgctccgggacacctgggtccccagagggcataagctgaggaagctggagcgggagaagggggtcgtgatccggttcgtgatcgggcacagcggcacgccgggcggcggcgcgctggaccgcgccctggacgcggaggaggccgagagcagggacttcctgcggctcgaccacgccgagggctaccacgagctgtcgtccaagaccaggagctacttcaccaccgccgtcgccacctgggacgccgacttctacgtcaaggtcgacgacgacatccacctcaacctcgggatgctgacgagcaggctggccaaacacagaacgcggcgtcggctgtatgaagtctgggcctgtcctgtcacagaaaggagtgaagtaccacgagccagagtactggaagttcggtgactagggcaacaagtacttccgccacgccaccggccggccaaatctacgccatctccaaagacctcgccgcctacatctccatcaactagccgatccttcacaggttcgcgaacgaggacgtctcgctgggcgcgtggctgatcgtgctcgaggtcgagcacgtcgacgaccgaagcatgtgctgcgcgacgcctccagactgcgagtggaagaagcgagccggcaacgtgtgcgtagcgtccttcgacgggtcgtgcagcggcgtctgcaagtcggcggacaggatgatgcggcacatccactgcggcgaaggcgacggggccgtctggaacgccgccacgtgagattgcccatctcacatcgggaaccccaaccgttgctgtatgtggaggtggagcttcactcggcatccgattttctgaaaacgccaaggcgagagggaagcgaggtcgttgatccactgtttggcatattgagcattccgcatatgcatgacaagtatatggccgtttcacttgagacgtcatgctgtgatatgatccacgtaaaaagcgcatggattggtgtgtgtgaatgtgaatgtgaatgtacagacagggagtgaggggcttggattaatggtacttggtcgaccaactgaagtaatgctgttcactaatcatgatttgttttttttggcctattttgaactaac

SEQ ID NO: 217521 - DNA, 1614 bp, Zea Mays
cgtgcgtgtacgcacgcctttggtgcgcaggcactggcggagcggcagccgcagctggagaagaagccgccgcgcggggggagggcgccgctgtcggggaaggccgtcgcggcgctgtgcgtgacgagcttcgttgtggggctgctgctcagcggcaacgtgtcgctgatgtcggcctcggcggcggcggcggcgtcgtcgtcgtactcgagcagggacaaaactaggagagaaccagcaccccaaggatatcctgaacgaggtgtcgaggactcatcaagcaatacaatcgctggacaaggcggtgtccaccctggagatggagatggccgtggagcgcgcgaggagcgcggcggcgtggcatccggcaggagtcctccccagaaggccttcgtcgtggtcggcatcaacacggccttcaccagcaggaagcggcgcgactcgctccgggacacctgggtccccagagggcataagctgaggaagctggagcgggagaagggggtcgtgatccggttcgtgatcgggcacagcggcacgccgggcggcggcgcgctggaccgcgccctggacgcggaggaggccgagagcagggacttcctgcggctcgaccacgccgagggctaccacgagctgtcgtccaagaccaggagctacttcaccaccgccgtcgccacctgggacgccgacttctacgtcaaggtcgacgacgacatccacctcaacctcggtgcgtatacggtgggtgtactactacacgccgtgagtctctgaagaaattcgcttccaatccaactgcagggatgctgacgagcaggctggccaaacacagaacgcggcgtcggctgtatgaagtctgggcctgtcctgtcacagaaaggagtgaagtaccacgagccagagtactggaagttcggtgactagggcaacaagtacttccgccacgccaccggccggccaaatctacgccatctccaaagacctcgccgcctacatctccatcaactagccgatccttcacaggttcgcgaacgaggacgtctcgctgggcgcgtggctgatcgtgctcgaggtcgagcacgtcgacgaccgaagcatgtgctgcgcgacgcctccagactgcgagtggaagaagcgagccggcaacgtgtgcgtagcgtccttcgacgggtcgtgcagcggcgtctgcaagtcggcggacaggatgatgcggcacatccactgcggcgaaggcgacggggccgtctggaacgccgccacgtgagattgcccatctcacatcgggaaccccaaccgttgctgtatgtggaggtggagcttcactcggcatccgattttctgaaaacgccaaggcgagagggaagcgaggtcgttgatccactgtttggcatattgagcattccgcatatgcatgacaagtatatggccgtttcacttgagacgtcatgctgtgatatgatccacgtaaaaagcgcatggattggtgtgtgtgaatgtgaatgtgaatgtacagacagggagtgaggggcttggattaatggtacttggtcgaccaactgaagtaatgctgttcactaatcatgatttgttttttttggcctattttgaactaac

SEQ ID NO: 217522 - DNA, 2509 bp, Zea Mays
tcccccactccctacaacgacagtatgtgcagtgcatcgatcttccttcctcgatgccccaatacaatgtttcagaagaacctgctgcccctggccgcagtcctcgccgtcgtcgcatcgctcatggccgctgccgccggttacccgtggtcagtgtgcggtgacagcaccgacagcagcgactttatgcctaacggcagataccaggcccatctcgacttcatcgcagctgccttgcccaagaacgcctccaagtcgccatacctcttcgcaaccgtcgtcgccggcaccgtcccggaccaggtctgggccgtggggctctgccgcggcgacgccaagcccacggcgtgcttcacctgcctcaccctggccttccaggacctgcccggctactgcacctacgccaaggacgccagcatctactacgaccgctgcatggtccactactccgacgtgcacacactctccggcgacgacgacaccggcccgatgatggacaggtacgccatcggcgacacccaaaccatcgcatcggaccccggccggttcgtcctcctcgtggcggcgctcgtgaacgccaccgccgactacgccgcgtacggctccggctccgccgcccgccgggggtttgcgacaggcgaagccgacgcaggcttcgacccggagttccccaagctctacgccctggcccagtgcatgccgggccagacgccggcgctgtgccgggagtgcctctccaggctcatatcgcagtcgctggacggattccggaacagtatcggaggcagggtgctcgccgtcagctgcacctacaggtacgagagtgcgcctttctatgatggaccggcgatggtacggctggcaccaccaagctctggagcgccggcgccggcgccggctgtgaactttcgggttcctgcggcggacggacggaagtaccatgtgccctgggtggctcttgccgttgtgctaccggctctagcagccttgaaccttgtcgcctgcctctgtctccgcttccggaggcggcgccggcggcaaccaactgcaccacgggacaagcagcaaaaagatcccgtgcattccaccgaagcagaggacatcgagatggtggagtccatgatgatggacgtctccacccttcgagccgccacaggggatttcgacgagagcaacaagctcggcgaaggcggctttggtgctgtgtacaagggtgtcctcccggatggcgaggagatagcggtgaagcgtctgtctagcagctcgtcgcagggagtggaggagctgaagaacgagctcgcgctggtcgccaagctgaagcacaggaacctcgtcaggctcgtcggcgtctgcctggagcagcaggagcggctgctggtctacgagttcgtccccaaccggagcctcgacctggcactcttcggtgctgatggacgtgaacagccgccgctggagctggactgggggcagaggtacaggatcatcaacggcatcgctcggggcctgcagtacctccacgaggactcccggctcagggtggtgcaccgcgatctcaaggccagcaacgtcctccttgacaagaacatgaaccccaagatctcggacttcggcctggccaggatctttggccgagaccagacgcaggccgtcaccagccgcgtcgtgggcacctatgggtacatggcaccggagtacatgatgcgggggaactactccgtgaagtcggacgcgtttagcttcggcgtcatggtgctggagatcgtaacgggtcggaagaacagcaacgatggctgcgatctcttgaccacggtatggatgcactgggaggccgggacggtggcggagctggtcgaaccgacgagcatgggcggcagtttcccggagggcgacgtgctgaggtgcatccacatcggcctcttgtgcgtccagccagaccctgcggcccgaccagtgatgtcgtcggtcgtcacgatgctcggcagcgacacggtcaccctccaggctccgtccaagccgggattcttcgccaggaacaacagcgcctacacaaccgtgtcgacagtgccggtggatgcttagcctggccataggactgagagaccgtatccagtgcacatggtttgatggtgcacaaaatacacatattaaatcctgctctttcatgtaacatccaatggctcacacgtatctcacctctctctcactgctttttgctaaaatcccctcccatctctctcgtacctgctctctattagtttgctaaaaccccctctgctccatcctcgatggttcttcctggagaccaaacaaactgcaccgtcagtcagcttcccttgctatcacggttggccgacatcttctccaatgttgttgtgctttcaaggaagtgcataatatcagcttctgcaagtgtcacaacatgtcgctgggagagcagagagagctgttgagtgggggaagcagacagagctgctaagtggggggaaatagagagagtgtctgagtgcag

SEQ ID NO: 217523 - DNA, 656 bp, Zea Mays
ttttgtcttcacaacatttgtgttttgtcttcacaacatttgaggctgtgtttgggctcaatagctatgaagtactccgtatatcgtacccacctttccgcctatcgttggtaattagccttttcatgtacgatatgctgagattttaaggaaaagcttgaaatttatgaaatgcagtggtggcattctgaagctcaacgaggacgtgcagacttgcggctacaaggacgtccaggtcatgttcgacatgttgacatcggaactcgaggcagccgctcaagcccagaagccaccgacgtcgccgccccgcaaaggaggagcgctaccgcctgcatggcccggccggtcctcgtcggcgatcactgctgcacagtaggtacctgcgaacagtaccattagagaggcgtccgccgccccctgcccttcttccgtcagaaagagcgaaaaattgcagcgagaacaataagatgaggagtaagcgcgagagatagagaggctcccaaacatcgtgtttaggtgtgtagatagaggatgatatgaaccagtgctgaacactttttttcgcccatcggaagaagagagagcaagaggggttactttcaatcccaaggtgtatttttattttgtttcaatatgatccatgctggtttctggtt

SEQ ID NO: 217524 - DNA, 3668 bp, Zea Mays
ctcaccgccgcgctcgcccgccctctcgcctcgtcgtcacgtcagactcagacatcacccccacccccaccctctctctccctccgtcccgccaataaattttcccagcgcgacggcgccccgctctcccgctccgttcctcctcccttccccgaagcttcggcgccccctcgctccctccgccccgttttaagcgcgcccgcctccgaccgaccggccgccacgcgagcgaccgcttcggcaaacggggaggaggaggagtgtttgcttctctgtcttgatcggggaggcgccatggcggacacccgcaaattcgtgctgcccggccaacccccagacatctcgcagatactgcaggaggctcagaaccggtggctgcggcccaccgagatctgcgagatactgtccaactacaagctcttctccatcgccgccgagccgcccaacatgccgaggagtggctctctttttctatttgatcgcaaagtactgaggtacttcagaaaggatggacacaactggagaaagaaaaaagatggcaagactgtcaaagaagctcatgagaaactgaaagctggcagcattgatgtactccattgctactatgcccatggagaggagaacgaaaactttcaaaggcgaacatattggctgttggaagaggatttcactcatattgttcttgtacattacctagaagtcaagggatgcaagcaaagtttcaatcgtgtgaaagaagaacttatgcagctatcgaatgtcgacagtccttcatgttcaaattccatcactagtcagaatcagatgggcccacaaaacatggaggctgctgaaagcccaataagcggacagatttcagaatatgaagacactgaatcagtgtatctaaagcgaaattcggtgcagcagataattgccgagcaagctccagataccaccctctcgctgagatgcagcagcttgtggatggagtcataacggaaaacatgttatacccttccgcatcaactgttggtagtagacaaggttatcatggtgaaatgttgccaataacagataacttagataaccgttcattttctaaccatgacatagctagaatgctcgacggcgccaacattgggctaagcgatgtttccagcactctgtttgattcagtgccattcaatgagcccttcaccaattattcagctgggttcacagagccaacactccattcttcatttgcctgcttagaggctaacgatttggacgatagctcttgtttgcagacatttacatctgaggctctatacactaaccacctcaaccagaaggaagctgatgcactgggtttcactggcatattagcatcagaggtgaacagagatagatataatgatggtagcatcaaacattcactcttgaagcagtcatcattggatctattgacgattgaggctcctggtttgaagaaaaatgacagcttttcaagatggatgagtaaagaacttgaagagctggatgcttatgtagtgaacccttcactttctcaagaccaactattcagcattctcgatgtttcaccaagttgtgcatatattggtacaaatacaaaggtttcagttactggtacattcttggtgaataaaaaacatgtggaaagtcacaggtggtcatgtatgtttggggatgttgaagtaccagctgaggttttgaccgatggcaccctacgctgctatgcaccagcacaccaatcaggaagagttccattttatgtgacctgttcaaacagggtggcttgtagtgaagtgcgagaatttgagtatcgtgattctgaagctcattacatggagacttctcgttcccaagccaatggtgtaaatgaaatgcatctacacattcgtcttgagaagctactcactttggggccagatgaccatcaaatgcttgctataaattccttaatgcttgatgggaaatggtcaaatcaagaatcttctgtcaaggaagtagtttccactgctagggtccaaagtttaaagaaactggtgaaagagaagctgcatcaatggctcatctgcaaagtaaacgatgatggaaagggtcccaatgttctgtgcaaggaaggacagggtgtgattcatttagtagcagcactgggttatgattgggctataagaccgataatgattgctggtgtcaatgtgaacttccgggatgctcatggatggactgcactccactgggctgcatctttgggaagagagcggacagttagtgtcctcatagcaaatggagctgcagcaggagcactaaccgatccaacttctgagttcccttctggaagaagtccagctgatttagcttcagtaaatggacacaaggggattgctggttttctcgcagaatctgctttgacaagccatctgtcagcacttactattagggaatcaaatgatagcactgtagaagcgtgtgggctaccatttgctgaagatctcactggcatcgattctgtccatctcgctggagagggtcctgatgctgaatcacttgaaggttctttaagtgccgtgcggaaatccactcaagctgcagctcgtatatttcaagccttcagggtggagtcattccacagaaagaaagtcgtggaatacggagatgacacctgtggattatctgatgaatgcacactttcacttgtttctcttaaaaatgtcaaaccaggacaacatgatacacatctgcattctgctgctgttcgcatacagaacaagtttcgcggatggaagggaagaaaggaatttatgatcattcgccagagaattgtcaagctacaggctcatgtacgaggacatcaagtgaggaagaactatcggaaggtagtctggtcagtcggtatcgtcgagaaggtcatactgagatggaggagaaagaggcctgggttacgcgggtttcggcccgagaaacaactagaaggtccatcgcaaatccaacctgcaaaggctgaagatgaatacgatttcttgcacgacggcagaaggcaggccgaagccaggctacagagagcacttgcccgggtgcactctatgtcacagtacccagaagcgagagagcagtaccacaggcttacaacctgcgttgctgaaatgaaacagtccaggatgatgcaggatgagatgctaagccaggcggctggtggtgcggacgatttcatggctggactggaggacttgatctgcatagatgatgccccgccccgatgtctgccattcggtgaagctgagcctttttacatcagataggcagggaggcggtttccttgctccccttttgtcagactagccctgtaaatattcttcagctagttgttcaccccgactgtttactcgctttctgctagtgtacaactataacatagtttcaatgcactgattatcggtagaataatcgcctcttatttgatatatagtttatattaattcaacgtattttatggttttatctgtaattctgcattcgtatcgagccataacagtgtgaatttgcgacatccgccatgacccaataatacaagcaccatggcggcggatctgtttgaatgcactatagccaaaccaactaagacttagtttcatagtttgagtactctagtattgaccataatctatatgtattgagttgga

SEQ ID NO: 217525 - DNA, 3720 bp, Zea Mays
ctcaccgccgcgctcgcccgccctctcgcctcgtcgtcacgtcagactcagacatcacccccacccccaccctctctctccctccgtcccgccaataaattttcccagcgcgacggcgccccgctctcccgctccgttcctcctcccttccccgaagcttcggcgccccctcgctccctccgccccgttttaagcgcgcccgcctccgaccgaccggccgccacgcgagcgaccgcttcggcaaacggggaggaggaggagtgtttgcttctctgtcttgatcggggaggcgccatggcggacacccgcaaattcgtgctgcccggccaacccccagacatctcgcagatactgcaggaggctcagaaccggtggctgcggcccaccgagatctgcgagatactgtccaactacaagctcttctccatcgccgccgagccgcccaacatgccgaggagtggctctctttttctatttgatcgcaaagtactgaggtacttcagaaaggatggacacaactggagaaagaaaaaagatggcaagactgtcaaagaagctcatgagaaactgaaagctggcagcattgatgtactccattgctactatgcccatggagaggagaacgaaaactttcaaaggcgaacatattggctgttggaagaggatttcactcatattgttcttgtacattacctagaagtcaagggatgcaagcaaagtttcaatcgtgtgaaagaagaacttatgcagctatcgaatgtcgacagtccttcatgttcaaattccatcactagtcagaatcagatgggcccacaaaacatggaggctgctgaaagcccaataagcggacagatttcagaatatgaagacactgaatcagtgtatctaaagcgaaattcggtgcagcagataattgccgagcaagctccagataccaccctctcgctgagatgcagcagcttgtggatggagtcataacggaaaacatgttatacccttccgcatcaactgttggtagtagacaaggttatcatggtgaaatgttgccaataacagataacttagataaccgttcattttctaaccatgacatagctagaatgctcgacggcgccaacattgggctaagcgatgtttccagcactctgtttgattcagtgccattcaatgagcccttcaccaattattcagctgggttcacagagccaacactccattcttcatttgcctgcttagaggctaacgatttggacgatagctcttgtttgcagacatttacatctgaggctctatacactaaccacctcaaccagaaggaagctgatgcactgggtttcactggcatattagcatcagaggtgaacagagatagatataatgatggtagcatcaaacattcactcttgaagcagtcatcattggatctattgacgattgaggctcctggtttgaagaaaaatgacagcttttcaagatggatgagtaaagaacttgaagaggttgttgatttggctggatgcttatgtagtgaacccttcactttctcaagaccaactattcagcattctcgatgtttcaccaagttgtgcatatattggtacaaatacaaaggtttcagttactggtacattcttggtgaataaaaaacatgtggaaagtcacaggtggtcatgtatgtttggggatgttgaagtaccagctgaggttttgaccgatggcaccctacgctgctatgcaccagcacaccaatcaggaagagttccattttatgtgacctgttcaaacagggtggcttgtagtgaagtgcgagaatttgagtatcgtgattctgaagctcattacatggagacttctcgttcccaagccaatggtgtaaatgaaatgcatctacacattcgtcttgagaagctactcactttggggccagatgaccatcaaatgcttgttataagcagtggtaatgagaaatatgagataatgaatgctataaattccttaatgcttgatgggaaatggtcaaatcaagaatcttctgtcaaggaagtagtttccactgctagggtccaaagtttaaagaaactggtgaaagagaagctgcatcaatggctcatctgcaaagtaaacgatgatggaaagggtcccaatgttctgtgcaaggaaggacagggtgtgattcatttagtagcagcactgggttatgattgggctataagaccgataatgattgctggtgtcaatgtgaacttccgggatgctcatggatggactgcactccactgggctgcatctttgggaagagagcggacagttagtgtcctcatagcaaatggagctgcagcaggagcactaaccgatccaacttctgagttcccttctggaagaagtccagctgatttagcttcagtaaatggacacaaggggattgctggttttctcgcagaatctgctttgacaagccatctgtcagcacttactattagggaatcaaatgatagcactgtagaagcgtgtgggctaccatttgctgaagatctcactggcatcgattctgtccatctcgctggagagggtcctgatgctgaatcacttgaaggttctttaagtgccgtgcggaaatccactcaagctgcagctcgtatatttcaagccttcagggtggagtcattccacagaaagaaagtcgtggaatacggagatgacacctgtggattatctgatgaatgcacactttcacttgtttctcttaaaaatgtcaaaccaggacaacatgatacacatctgcattctgctgctgttcgcatacagaacaagtttcgcggatggaagggaagaaaggaatttatgatcattcgccagagaattgtcaagctacaggctcatgtacgaggacatcaagtgaggaagaactatcggaaggtagtctggtcagtcggtatcgtcgagaaggtcatactgagatggaggagaaagaggcctgggttacgcgggtttcggcccgagaaacaactagaaggtccatcgcaaatccaacctgcaaaggctgaagatgaatacgatttcttgcacgacggcagaaggcaggccgaagccaggctacagagagcacttgcccgggtgcactctatgtcacagtacccagaagcgagagagcagtaccacaggcttacaacctgcgttgctgaaatgaaacagtccaggatgatgcaggatgagatgctaagccaggcggctggtggtgcggacgatttcatggctggactggaggacttgatctgcatagatgatgccccgccccgatgtctgccattcggtgaagctgagcctttttacatcagataggcagggaggcggtttccttgctccccttttgtcagactagccctgtaaatattcttcagctagttgttcaccccgactgtttactcgctttctgctagtgtacaactataacatagtttcaatgcactgattatcggtagaataatcgcctcttatttgatatatagtttatattaattcaacgtattttatggttttatctgtaattctgcattcgtatcgagccataacagtgtgaatttgcgacatccgccatgacccaataatacaagcaccatggcggcggatctgtttgaatgcactatagccaaaccaactaagacttagtttcatagtttgagtactctagtattgaccataatctatatgtattgagttgga

SEQ ID NO: 217526 - DNA, 3639 bp, Zea Mays
ctcaccgccgcgctcgcccgccctctcgcctcgtcgtcacgtcagactcagacatcacccccacccccaccctctctctccctccgtcccgccaataaattttcccagcgcgacggcgccccgctctcccgctccgttcctcctcccttccccgaagcttcggcgccccctcgctccctccgccccgttttaagcgcgcccgcctccgaccgaccggccgccacgcgagcgaccgcttcggcaaacggggaggaggaggagtgtttgcttctctgtcttgatcggggaggcgccatggcggacacccgcaaattcgtgctgcccggccaacccccagacatctcgcagatactgcaggaggctcagaaccggtggctgcggcccaccgagatctgcgagatactgtccaactacaagctcttctccatcgccgccgagccgcccaacatgccgaggagtggctctctttttctatttgatcgcaaagtactgaggtacttcagaaaggatggacacaactggagaaagaaaaaagatggcaagactgtcaaagaagctcatgagaaactgaaagctggcagcattgatgtactccattgctactatgcccatggagaggagaacgaaaactttcaaaggcgaacatattggctgttggaagaggatttcactcatattgttcttgtacattacctagaagtcaagggatgcaagcaaagtttcaatcgtgtgaaagaagaacttatgcagctatcgaatgtcgacagtccttcatgttcaaattccatcactagtcagaatcagatgggcccacaaaacatggaggctgctgaaagcccaataagcggacagatttcagaatatgaagacactgaatcagataattgccgagcaagctccagataccaccctctcgctgagatgcagcagcttgtggatggagtcataacggaaaacatgttatacccttccgcatcaactgttggtagtagacaaggttatcatggtgaaatgttgccaataacagataacttagataaccgttcattttctaaccatgacatagctagaatgctcgacggcgccaacattgggctaagcgatgtttccagcactctgtttgattcagtgccattcaatgagcccttcaccaattattcagctgggttcacagagccaacactccattcttcatttgcctgcttagaggctaacgatttggacgatagctcttgtttgcagacatttacatctgaggctctatacactaaccacctcaaccagaaggaagctgatgcactgggtttcactggcatattagcatcagaggtgaacagagatagatataatgatggtagcatcaaacattcactcttgaagcagtcatcattggatctattgacgattgaggctcctggtttgaagaaaaatgacagcttttcaagatggatgagtaaagaacttgaagagctggatgcttatgtagtgaacccttcactttctcaagaccaactattcagcattctcgatgtttcaccaagttgtgcatatattggtacaaatacaaaggtttcagttactggtacattcttggtgaataaaaaacatgtggaaagtcacaggtggtcatgtatgtttggggatgttgaagtaccagctgaggttttgaccgatggcaccctacgctgctatgcaccagcacaccaatcaggaagagttccattttatgtgacctgttcaaacagggtggcttgtagtgaagtgcgagaatttgagtatcgtgattctgaagctcattacatggagacttctcgttcccaagccaatggtgtaaatgaaatgcatctacacattcgtcttgagaagctactcactttggggccagatgaccatcaaatgcttgctataaattccttaatgcttgatgggaaatggtcaaatcaagaatcttctgtcaaggaagtagtttccactgctagggtccaaagtttaaagaaactggtgaaagagaagctgcatcaatggctcatctgcaaagtaaacgatgatggaaagggtcccaatgttctgtgcaaggaaggacagggtgtgattcatttagtagcagcactgggttatgattgggctataagaccgataatgattgctggtgtcaatgtgaacttccgggatgctcatggatggactgcactccactgggctgcatctttgggaagagagcggacagttagtgtcctcatagcaaatggagctgcagcaggagcactaaccgatccaacttctgagttcccttctggaagaagtccagctgatttagcttcagtaaatggacacaaggggattgctggttttctcgcagaatctgctttgacaagccatctgtcagcacttactattagggaatcaaatgatagcactgtagaagcgtgtgggctaccatttgctgaagatctcactggcatcgattctgtccatctcgctggagagggtcctgatgctgaatcacttgaaggttctttaagtgccgtgcggaaatccactcaagctgcagctcgtatatttcaagccttcagggtggagtcattccacagaaagaaagtcgtggaatacggagatgacacctgtggattatctgatgaatgcacactttcacttgtttctcttaaaaatgtcaaaccaggacaacatgatacacatctgcattctgctgctgttcgcatacagaacaagtttcgcggatggaagggaagaaaggaatttatgatcattcgccagagaattgtcaagctacaggctcatgtacgaggacatcaagtgaggaagaactatcggaaggtagtctggtcagtcggtatcgtcgagaaggtcatactgagatggaggagaaagaggcctgggttacgcgggtttcggcccgagaaacaactagaaggtccatcgcaaatccaacctgcaaaggctgaagatgaatacgatttcttgcacgacggcagaaggcaggccgaagccaggctacagagagcacttgcccgggtgcactctatgtcacagtacccagaagcgagagagcagtaccacaggcttacaacctgcgttgctgaaatgaaacagtccaggatgatgcaggatgagatgctaagccaggcggctggtggtgcggacgatttcatggctggactggaggacttgatctgcatagatgatgccccgccccgatgtctgccattcggtgaagctgagcctttttacatcagataggcagggaggcggtttccttgctccccttttgtcagactagccctgtaaatattcttcagctagttgttcaccccgactgtttactcgctttctgctagtgtacaactataacatagtttcaatgcactgattatcggtagaataatcgcctcttatttgatatatagtttatattaattcaacgtattttatggttttatctgtaattctgcattcgtatcgagccataacagtgtgaatttgcgacatccgccatgacccaataatacaagcaccatggcggcggatctgtttgaatgcactatagccaaaccaactaagacttagtttcatagtttgagtactctagtattgaccataatctatatgtattgagttgga

SEQ ID NO: 217527 - DNA, 3203 bp, Zea Mays
cttgatgtgttgggggatctggtggctctctttttctatttgatcgcaaagtactgaggtacttcagaaaggatggacacaactggagaaagaaaaaagatggcaagactgtcaaagaagctcatgagaaactgaaagctggcagcattgatgtactccattgctactatgcccatggagaggagaacgaaaactttcaaaggcgaacatattggctgttggaagaggatttcactcatattgttcttgtacattacctagaagtcaagggatgcaagcaaagtttcaatcgtgtgaaagaagaacttatgcagctatcgaatgtcgacagtccttcatgttcaaattccatcactagtcagaatcagatgggcccacaaaacatggaggctgctgaaagcccaataagcggacagatttcagaatatgaagacactgaatcagataattgccgagcaagctccagataccaccctctcgctgagatgcagcagcttgtggatggagtcataacggaaaacatgttatacccttccgcatcaactgttggtagtagacaaggttatcatggtgaaatgttgccaataacagataacttagataaccgttcattttctaaccatgacatagctagaatgctcgacggcgccaacattgggctaagcgatgtttccagcactctgtttgattcagtgccattcaatgagcccttcaccaattattcagctgggttcacagagccaacactccattcttcatttgcctgcttagaggctaacgatttggacgatagctcttgtttgcagacatttacatctgaggctctatacactaaccacctcaaccagaaggaagctgatgcactgggtttcactggcatattagcatcagaggtgaacagagatagatataatgatggtagcatcaaacattcactcttgaagcagtcatcattggatctattgacgattgaggctcctggtttgaagaaaaatgacagcttttcaagatggatgagtaaagaacttgaagagctggatgcttatgtagtgaacccttcactttctcaagaccaactattcagcattctcgatgtttcaccaagttgtgcatatattggtacaaatacaaaggtttcagttactggtacattcttggtgaataaaaaacatgtggaaagtcacaggtggtcatgtatgtttggggatgttgaagtaccagctgaggttttgaccgatggcaccctacgctgctatgcaccagcacaccaatcaggaagagttccattttatgtgacctgttcaaacagggtggcttgtagtgaagtgcgagaatttgagtatcgtgattctgaagctcattacatggagacttctcgttcccaagccaatggtgtaaatgaaatgcatctacacattcgtcttgagaagctactcactttggggccagatgaccatcaaatgcttgctataaattccttaatgcttgatgggaaatggtcaaatcaagaatcttctgtcaaggaagtagtttccactgctagggtccaaagtttaaagaaactggtgaaagagaagctgcatcaatggctcatctgcaaagtaaacgatgatggaaagggtcccaatgttctgtgcaaggaaggacagggtgtgattcatttagtagcagcactgggttatgattgggctataagaccgataatgattgctggtgtcaatgtgaacttccgggatgctcatggatggactgcactccactgggctgcatctttgggaagagagcggacagttagtgtcctcatagcaaatggagctgcagcaggagcactaaccgatccaacttctgagttcccttctggaagaagtccagctgatttagcttcagtaaatggacacaaggggattgctggttttctcgcagaatctgctttgacaagccatctgtcagcacttactattagggaatcaaatgatagcactgtagaagcgtgtgggctaccatttgctgaagatctcactggcatcgattctgtccatctcgctggagagggtcctgatgctgaatcacttgaaggttctttaagtgccgtgcggaaatccactcaagctgcagctcgtatatttcaagccttcagggtggagtcattccacagaaagaaagtcgtggaatacggagatgacacctgtggattatctgatgaatgcacactttcacttgtttctcttaaaaatgtcaaaccaggacaacatgatacacatctgcattctgctgctgttcgcatacagaacaagtttcgcggatggaagggaagaaaggaatttatgatcattcgccagagaattgtcaagctacaggctcatgtacgaggacatcaagtgaggaagaactatcggaaggtagtctggtcagtcggtatcgtcgagaaggtcatactgagatggaggagaaagaggcctgggttacgcgggtttcggcccgagaaacaactagaaggtccatcgcaaatccaacctgcaaaggctgaagatgaatacgatttcttgcacgacggcagaaggcaggccgaagccaggctacagagagcacttgcccgggtgcactctatgtcacagtacccagaagcgagagagcagtaccacaggcttacaacctgcgttgctgaaatgaaacagtccaggatgatgcaggatgagatgctaagccaggcggctggtggtgcggacgatttcatggctggactggaggacttgatctgcatagatgatgccccgccccgatgtctgccattcggtgaagctgagcctttttacatcagataggcagggaggcggtttccttgctccccttttgtcagactagccctgtaaatattcttcagctagttgttcaccccgactgtttactcgctttctgctagtgtacaactataacatagtttcaatgcactgattatcggtagaataatcgcctcttatttgatatatagtttatattaattcaacgtattttatggttttatctgtaattctgcattcgtatcgagccataacagtgtgaatttgcgacatccgccatgacccaataatacaagcaccatggcggcggatctgtttgaatgcactatagccaaaccaactaagacttagtttcatagtttgagtactctagtattgaccataatctatatgtattgagttgga

SEQ ID NO: 217528 - DNA, 2052 bp, Zea Mays
agcattttgtttttttcagaataatgatgattcatgccttgcctatgtattaggagccatttctaatctattatcaaagataggcatctcaaacacagttggaataatcagttctccatattcacttgggaccaatattggactaggcacaccattatccattcagcaacagttacttgttcttttaaagcgatcactcaagagagctgatgcattgaaacttccaagtttactatcctttgatcacctttcgcttgcaaaatttgatctgaagcatgtccaaaggccactagtctctttcggccctaatgcatctacaaagcttagaacatgtcctgcagatgtctgtaagaatctaaggttaggttcccgtgtgttgactgactttggagcagatgttctatctacttcaaatgataatggtagttttagcacttcttggcttaggaatctatccgccacttctgattcatggcgtagcagttcaaagaacaccaaaaaaatacatattaatgacttcgacaatttccattatcatgcacaaccaagtccagtacctgcatcaatattgcaattagctggctcagcatatttgctgagagctaccgcttgggagcactatgggagtgctccaatggtacgaatgaatgttctagtttatgcaacctgctttgcggatgctgcaagttcatcagagttatcactagcatatgttaagctaattcaacaactggcggtgttcaaaggatattcagctgcattctgtgctctaaagcttgctgaaaagaagttcccatcctcaacaagtttacacatccagcttctaggaatgcagattctacatgagcgcgcacttcatcggggcatctaaaagtcgcgcaacaaatctgtgatgagtttggggtgttatcatcttctgtttctggagtagacattgagctaaagacagaatttagtgtacggcgtgctcgcactctccttgccgcaaaacagtttagccaggccgcagctgtggccaattctcttttctctacgtgctacaagtacaacatgcaggttgagaatgcaagtgttcttttattacttgctgaaatacataaaaaatctgacaatgcggtacttgggcttccttatgcgttggccagccaatcattctgcaaatcattcaacttggatctgcttgaagcctcagctacacttactctcgctgagttgtggctggatcttggatcaagccatgcaaagaaggcactgagtcttgtctaccagagccttcccatgattcttggtcatggtgggcttgagctgcgtgctcgagctcacgttgttttagcaaagtgccatttatccgatctgaaattctcagttctcgaagatcctgaagctgttttggatcctctgaaccaagccactgaagacctgcaagcattggagtaccacgagatggcagcagaggcgtactatctgaaggcaatggcatacaaccatctcggcaagcttgatgagagggaggaagccgcggctcgtttcaaggatcacgtcactgcccttgagaccccgcataacgaagaggactcgcttaagtactgagacccaagaccatttgttattggcaagcatgccccactgccagagactaaagagggcgtggtggccttctggacccgcatggtggcactggcaggctacaatgctacactgaggcgaatggcgtttgctgccatgcggaggcactgccactgactgtgggcggaccggcggacggcggtgactgaaggagacgggcagccggtgaggtcaatgtgctagttgggtcagcgtggtatggtctcatccatggaccatggtgttcattagagcgagacgaagacatcagattgagacttgatgttcttactctgttcttatcgacttctctgctctgttactggggagttccgaattgctaactcagacagacagtgctgacaatgtgtttgtgtttgaatgtaaacagaacaagaacagaaaaatagaagattgatctgtattttcccttgactgatgctggat

SEQ ID NO: 217529 - DNA, 2032 bp, Zea Mays
agcattttgtttttttcagaataatgatgattcatgccttgcctatgtattaggagccatttctaatctattatcaaagataggcatctcaaacacagttggaataatcagttctccatattcacttgggaccaatattggactaggcacaccattatccattcagcaacagttacttgttcttttaaagcgatcactcaagagagctgatgcattgaaacttccaagtttactatcctttgatcacctttcgcttgcaaaatttgatctgaagcatgtccaaaggccactagtctctttcggccctaatgcatctacaaagcttagaacatgtcctgcagatgtctgtaagaatctaaggttaggttcccgtgtgttgactgactttggagcagatgttctatctacttcaaatgataatggtagttttagcacttcttggcttaggaatctatccgccacttctgattcatggcgtagcagttcaaagaacaccaaaaaaatacatattaatgacttcgacaatttccattatcatgcacaaccaagtccagtacctgcatcaatattgcaattagctggctcagcatatttgctgagagctaccgcttgggagcactatgggagtgctccaatggtacgaatgaatgttctagtttatgcaacctgctttgcggatgctgcaagttcatcagagttatcactagcatatgttaagctaattcaacaactggcggtgttcaaaggatattcagctgcattctgtgctctaaagcttgctgaaaagaagttcccatcctcaacaagtttacacatccagcttctaggaatgcagattctacatgagcgcgcacttcatcgagggcatctaaaagtcgcgcaacaaatctgtgatgagtttggggtgttatcatcttctgtttctggagtagacattgagctaaagacagaatttagtgtacggcgtgctcgcactctccttgccgcaaaacagtttagccaggccgcagctgtggccaattctcttttctctacgtgctacaagtacaacatgcaggttgagaatgcaagtgttcttttattacttgctgaaatacataaaaaatctgacaatgcggtacttgggcttccttatgcgttggccagccaatcattctgcaaatcattcaacttggatctgcttgaagcctcagctacacttactctcgctgagttgtggctggatcttggatcaagccatgcaaagaaggcactgagtcttgtctaccagagccttcccatgattcttggtcatggtgggcttgagctgcgtgctcgagctcacgttgttttagcaaagtgccatttatccgatctgaaattctcagttctcgaagatcctgaagctgttttggatcctctgaaccaagccactgaagacctgcaagcattggagtaccacgagatggcagcagaggcgtactatctgaaggcaatggcatacaaccatctcggcaagcttgatgagagggaggaagccgcggctcgtttcaaggatcacgtcactgcccttgagaccccgcataacgaagaggactcgcttaagtactgagacccaagaccatttgttattgagactaaagagggcgtggtggccttctggacccgcatggtggcactggcaggctacaatgctacactgaggcgaatggcgtttgctgccatgcggaggcactgccactgactgtgggcggaccggcggacggcggtgactgaaggagacgggcagccggtgaggtcaatgtgctagttgggtcagcgtggtatggtctcatccatggaccatggtgttcattagagcgagacgaagacatcagattgagacttgatgttcttactctgttcttatcgacttctctgctctgttactggggagttccgaattgctaactcagacagacagtgctgacaatgtgtttgtgtttgaatgtaaacagaacaagaacagaaaaatagaagattgatctgtattttcccttgactgatgctggat

SEQ ID NO: 217530 - DNA, 1993 bp, Zea Mays
agcattttgtttttttcagaataatgatgattcatgccttgcctatgtattaggagccatttctaatctattatcaaagataggcatctcaaacacagttggaataatcagttctccatattcacttgggaccaatattggactaggcacaccattatccattcagcaacagttacttgttcttttaaagcgatcactcaagagagctgatgcattgaaacttccaagtttactatcctttgatcacctttcgcttgcaaaatttgatctgaagcatgtccaaaggccactagtctctttcggccctaatgcatctacaaagcttagaacatgtcctgcagatgtctgtaagaatctaaggttaggttcccgtgtgttgactgactttggagcagatgttctatctacttcaaatgataatggtagttttagcacttcttggcttaggaatctatccgccacttctgattcatggcgtagcagttcaaagaacaccaaaaaaatacatattaatgacttcgacaatttccattatcatgcacaaccaagtccagtacctgcatcaatattgcaattagctggctcagcatatttgctgagagctaccgcttgggagcactatgggagttcatcagagttatcactagcatatgttaagctaattcaacaactggcggtgttcaaaggatattcagctgcattctgtgctctaaagcttgctgaaaagaagttcccatcctcaacaagtttacacatccagcttctaggaatgcagattctacatgagcgcgcacttcatcgagggcatctaaaagtcgcgcaacaaatctgtgatgagtttggggtgttatcatcttctgtttctggagtagacattgagctaaagacagaatttagtgtacggcgtgctcgcactctccttgccgcaaaacagtttagccaggccgcagctgtggccaattctcttttctctacgtgctacaagtacaacatgcaggttgagaatgcaagtgttcttttattacttgctgaaatacataaaaaatctgacaatgcggtacttgggcttccttatgcgttggccagccaatcattctgcaaatcattcaacttggatctgcttgaagcctcagctacacttactctcgctgagttgtggctggatcttggatcaagccatgcaaagaaggcactgagtcttgtctaccagagccttcccatgattcttggtcatggtgggcttgagctgcgtgctcgagctcacgttgttttagcaaagtgccatttatccgatctgaaattctcagttctcgaagatcctgaagctgttttggatcctctgaaccaagccactgaagacctgcaagcattggagtaccacgagatggcagcagaggcgtactatctgaaggcaatggcatacaaccatctcggcaagcttgatgagagggaggaagccgcggctcgtttcaaggatcacgtcactgcccttgagaccccgcataacgaagaggactcgcttaagtactgagacccaagaccatttgttattggcaagcatgccccactgccagagactaaagagggcgtggtggccttctggacccgcatggtggcactggcaggctacaatgctacactgaggcgaatggcgtttgctgccatgcggaggcactgccactgactgtgggcggaccggcggacggcggtgactgaaggagacgggcagccggtgaggtcaatgtgctagttgggtcagcgtggtatggtctcatccatggaccatggtgttcattagagcgagacgaagacatcagattgagacttgatgttcttactctgttcttatcgacttctctgctctgttactggggagttccgaattgctaactcagacagacagtgctgacaatgtgtttgtgtttgaatgtaaacagaacaagaacagaaaaatagaagattgatctgtattttcccttgactgatgctggat

SEQ ID NO: 217531 - DNA, 2156 bp, Zea Mays
tcgtgcaccagatttaatttctgttctgtttggtcttcataaagtagagcactagctagaagacatattcacacgcatcagctatcaaattgcaagcttagaattgacctcaaagttgggacatgcttgtcttaccacaagcaactgatagcttggagttgtagtccggactgtctgcgctggaccagtatggctgacactccaacgtcccgcatggtgcacccctttggcgacgccccaaggcagactcccaagcaattcctgtattctggtaacccgcagcacctctgccatccgtaccagtcagctccggacacccatgtcgtgctccagcgccgttacaccgtgaggtctcagtctcactcaccaaataatgctggttctgaagaccatgagactcacaagcagtacacgctggagtcctcagcggcttctggttgttcaaggcatggttctccctccagccaaagcgtccatgccgggagtggcagccctgtgtctcacgacgacagccactccggctccacgaatggccatggatcacctgtgagcgcgtcgtgtgtcaccggcgaggaccctactgatctcaagcagaaactgaaggatcttgaggctgtaatgctggggacgtctgagactgaccccgagatagtcaacagtctcgagatctccgcggcaaaccaactctcgttggagcccgaggagtgggagcacatggtgagcatgcccagagggaacctgaaggagctgctgattgcctgcgctagggcagtggaacgtaacaacagctacgccattgatctgatgatcacagagctgaggaagatggtttcggtgtccggcgagccgcttgagaggctgggagcctacatggtggaaggtcttgttgccaggctcgcggcctccggcagctcaatctacaaggctttgaagtgtaaggagcccaggagctctgatctcctctcctacatgcacttcctgtatgaggcctgcccctacttcaagttcggctacatgtcagccaacggcgcgatcgcggaggccatcaagggagaggacaggatccatatcatcgacttccacatcgcgcaaggggctcagtgggtctctctcctccaagcccttgcagccaggcctggcgggccaccgttcgtgagggtcaccggcattgatgattcagtctcagcttacgctcgaggcggcggtctggagttggttggcaggaggttgacacatattgctggcctctacaaggtgccctttcagttcgacgcagtcgctatctcaggcagtgaggtggaggaggagcatctgggcgtcgtcccaggcgaagccgtcgccgtcaacttcacccttgagctgcaccacatccccgacgagaccgtgagcacggcgaaccaccgggaccggatcctgaggctggtgaagggcctgtcgcccaaggtgctcacgctggtggagcaggagtccaacaccaacacggcccccttcgcgcagcggttcgcagagacgctggactactacacggccatcttcgagtccatcgacctggcgctgccgagggacgacagggagcggatcaacatcgagcagcactgcctggcccgggagatcgtgaacctggtggcctgcgagggcgaggagcgggtggagcggcacgaggtgttcggcaagtggaaggcgcggctgatgatggccgggttcagcccgtccccgctcagcgcgctggtgaacgccaccatcaagacgctgctgcagagctactcgccggactacaagctcgccgagagggacggcgtgctctacctcggctggaagaacaggcccctgatcgtctcatcggcatggcactagtgttgacttcagagaatgttgacctgatggagaatgtttcttgtaaccttcgaagtacctcttagtggtttagatatgtttggctggtcactggaactatctataggaagcctatggtgatagatactgagttgtagtagaacacatatagcctaaatgcctaatgctgtgatggcagtcactaccagcctagcctagaacaggttgatgatgtgtagtagtaagtttgggtatatgtttcagttaatcagttttgcttgggtgcattctgaagggtggcctcttcaaaaaggacatcaaac

SEQ ID NO: 217532 - DNA, 1854 bp, Zea Mays
atggcgctccgtcgctgcaatgccgccgcgcaacgtcgccaggcttcaccgacgccgaatccgaggtatgtggcctcctcagttgttcatcgtggtccgcttgtcgtgctaagcctttcgggtggtggttggtgcgcgggggcgtcggagcatgaaggcatgataccttctgtgaggatctctcctggctatgcagccttctctggctccagcctacgcttaaaattacattcaattccatccatctctagtctcaaaccctccaaatatgtggtctcctcgctgaaaccactctacctagcaccgctagatggtccacacacttctgagcttaagtcttggagacaaccacttgagttccgttgtgctgcttctgctgccgatgacaaggagtcaaagactcaggtggtgccagttcagttggaaggcgcacagaggttaaagatctccatctatttcgcgacctggtgggcgcttaatgtgatatttaacatttacaacaagaaggttctcaatgctttcccttacccctggctcacctccacactctcccttgcctgcggctctgcgatgatgcttttctcgtgggccactcgtcttgttgaggcccccaagaccgacctagacttctggaaagttcttttcccggttgctgtggcacatacaattggccatgttgctgcgacagtgagcatgtctaaggtggcagtgtcattcacacacataattaaaagtgcagaacctgcattcactgttttggtgtcaaagttcctccttggggagacgtttccagttccagtctatctttctcttcttccaatcattggtggttgtgctctagctgctgtcacagagctgaactttaatatggttggatttatgggtgctatgatatccaaccttgcatttgttttccgcaacatcttctcgaagaggggcatgaaggggaagttcgtcagtggcatgaattactatgcttgcctgtcaataatgtcgctggtcatactgactccatttgctatagctatggaaggtcctcagatgtgggctgctggttggcaaaaggctgttgcagaagttggacccaatgttgtctggtggatcgctgcacagagcgtgttctatcacttatataaccaggtgtcctacatgtctctcgatcagatctctccattgacgtttagcattggcaatacaatgaaacgtatatcagtgattgtttcatctataattatcttccacacgcctgtccgccctgtcaatgcactgggagctgccattgccatccttggcacattcctgtactctcaggcaaaggcgtgaggctaaagctttggccaaaggatcggagccagtagcaggcactggatccagttttgcttgttggagtggcatgtagatataaggccgtgacatgaaccgtcgtcaagtgtacctgaataacaccgtaacgaaattcaccgatgctgtttctttatggtattttagcagagctaagctgcgagccatgaccatgaccatgagcgcttgaacctccctacctttctggcgtttgagcatcatcagaagttagcttgaacaagcaagagtgaagatttcgaaggcttgaagaatgttctctgcatcagtgtacaaatatattgcagggctagtacaacaaagtagaatgtgatgttatgtttagctgcattgtgattgctttgccagtttacatgtaacaactaaaaagatagctgggacgtaaaataatactacctttgttctcggatatttgtcacccgttagtttatttttgaagtaaaccgtgtcaaataaaaaagagaaagagaacggaagatgcgtggaaggtttgca

SEQ ID NO: 217533 - DNA, 2078 bp, Zea Mays
cggcacaacctaccggcttcgcggtttcccttttgttccgtttcgtgcacttaagccgtccgcacgccgtcttccccatctcgcgcagcgctactgccggctgtccggagtcccgaccaccgtcctcggctccccgccgtgaatccatcatcccgtaatggagacctgcccctcggtgaagaacatcctcttgctggactcggagggaaagcgcgtcgccgtaaagtactacagcgatgactggcctactctatccgcgaagctggccttcgagaagtcggtatttaccaaaacccagaaagcgaatgctggaacggaaggtaatttacatatgctttctcttatgcggaagtagttgtgtgagccacggcgagcgttgctgtgctcgattgaggtagtacagagtagttgattagcattatcatctcataatgaactcacgtgtgtcagtgtgtgatgtattgttataatccgttctatatatgctgatgttgggcaagaatgcttctttatagggtagaatcacttcttcgatattaaattacaccattcttgttttgattcttttgctgtgctacatgttaatttattggtgcctatgccattttattcattgcttatttgacatggcttatatacaaattatctactctactccctccattccaaattgcaagatgttttagcttttctagacatcttttgctatgtacttagatatacattatatttaaatacattatatttatatacattatatgtttttcatgtccagctgtttatcatctattaacctcagtcataacactgtttgtacgagctcccactcatgccacaaatctgtaaatgagccagggctagttttccatctgactgaccttgatttctccttaaacatgcagatatgactgtttgagtttttgttcttctcttcaagtatttcatatttttctttgtttctctttaacagttgagattgtaatgtttgacggtcaaattgtggtatacaagttcatccaagacctgcacttttttgttactggaggagaagaagagaatgagcttattttagcatcagttcttcagggattctctgatgctgtcgaacgacttctcaaaaacatggttgacaaaaggacagcactcgagaatttggatatgatcctattgtgccttgatgaaattgttgatggagggattgtacttgaaacagaaggaagagagatagctgaaaaggtgtctggacatggattggagggtgcttcatcagctgagcagactttagtcaacgccctaacgcaagcaagagagcattttgcgaagtctcttctcatgtgatgctatgctttatatattagggcgacgatggagtatctattactgtgtctggataacacagtttttttttttggttagcagtggaccaaaaaaaaaaaaggtctgaaatctttgaatgtgtagaatggcatgttgtgtccaaaattttcatttgtaagccttcaaagttgtgtagcatgtttttttcttctaattttgactggtttcgttatcggtcgttttgtttaatctcttcctgttgtaaacggtaaaatagcatgcttgatggcatgttgtaacttaacaaattagggctacactttgtttaagatggtaatgtctccctgaaaccaaaacattattggaatctgccaaaaattcaccttacaattttgtatccatgttttttatattaatgggtgcaaaaagcaaagggtgacggtgagtgtttactcgccggcggtgacatggtgagacagatcgtctctccgcttgattgcattgtcgacatgtcgagacaggtcgtctctctgcttgattgcattgtcatctgcggcgtcactgaactgctgcttgtagccaaggtcatggttgcctgaaaccagttcgtctctgcttggagtcccttccatgtcgatgatgatgttggttatcaagcagcagacaaagatgatccgtggcagccggtgtttgtcaggcctccacagctctccctgaatgacacgccacctccctttgagcgtcgccaatgcggtctgcac

SEQ ID NO: 217534 - DNA, 2354 bp, Zea Mays
tagccataacccataccagagtgctcgcaatcacaagagaaaaaaaagaaacttaataaggagagagaggagcttagcgctgtctctctctcgctcgtgcgtgcgtgcccaattgcaggaaagccacaaagtctcgtgttcctgggggcagggatctcctctcctctcctctggctctttaaccggagaggcgaggagtagtacggagcagcatgaggctgctgtcacctccattgccgtccctgcgctcttccgtcccggccgtcctcctccacctcctcctcctgctgctgctgctgtcctcatgcccctccccggcaaacggaagggccgcgccgtcgtctccgggcgctacggcgcctgtcaccagtgatcatcgtggagcgccaccgtcatttccaccgtgagctagtcatcgcctccatcctcgcctcaatcgccatcgtcgcgattatcctctccacgctctacgcgtggatcctgtggcggcggtcccgccggctgccccgcggcaagagcgcagacaccgcgagggggatcatgctggcgccgatcctgagcaagttcaactcgctcaagacgagcaggaaggggctcgtggcgatgatcgagtacccgtcgctggaggcggcgacgggggagttcagtgagagcaacgtgctcggcgtaggcggcttcggttgcgtctacaaggcagtcttcgatggcggcgttaccgcggcggtcaagaggctggagggaggtggccctgagtgcgagaaggaattcgaggtgtcaatacttgcccgttggccattggtaactggcgaaggggttatttgttcttgtcctgactgcttcggttgcggttgctggcagaatgagctggatctgcttggcaggattcggcaccccaacatcgtgtccctgctgggcttttgtgttcacgaggggaatcactacattgtttatgagctcatggagaagggatccctggacacacagctgcatggggcctcacatggatcagcgctgacctggcatatccggatgaagatcgcactcgacatggccaggggattagaatacctccatgagcactgcagtccaccagtgatccatagggatctgaagtcatctaacatacttttagattctgacttcaatgctaagatttcagattttggtcttgcagtgaccagtgggaacattgacaagggaagcatgaagctttctgggaccttgggttatgtggcccctgagtacctattagatggtattgtgtcagcttaattgtcaacttcgactcacatacataaacaacttcattatcgacagtgaagttctacttccatcccgtatctttcagctactgtgtcgatttcagggaagctgactgaaaagagtgacgtatatgcatttggagtggtgcttcttgagctactaatgggaaggaagcctgtcgagaagatgagtcaaactcagtgccaatcaattgtgacgtgggtacggtgcacacaaagttacactaaacatagtatatctctgatcaagtcaaattcctcaacttggaactttagtagtaatggacaattgtcaaccctcattttcacgcaatgtttattgcatcttagttttattttatcatatactagaaaaacatcaacttcacgatcagtgctaacatttaaggagtcaaatgcagtttctttgtgtgctgatatttgacatgctgaaaaaaaaatgacaaacaggccatgccgcagctgactgacagaacaaaacttcccaacatagttgacccagtgatcagggacaccatggatccaaagcatttgtaccaagtggcagcagtggcagttctatgtgtgcaaccagaaccaagttacagaccgctgattactgatgttctccactctcttgtccctctagtccctgtggagctcggagggacactgagggttgtagagccaccttccccaaacctaaaacattctccttgttgaggcgtcccgatcagtcgaagatcacagctacatgctgatgaacttggacgatgtttatcagtaactttatcaccctagctgtgtgccagaggatgacggttccaacctgccggttgctggttggatcgagagagaattctggtttgaaaagagttgtctcctgtgggtttgcttgtacaaagaagtgaaagaaaacaacactcttttccttagaattttaggtcccttctgtacagatcaaagtttgtccaacactatttaaaagaatttgagaatgacgagctttgggttccacatgggtacccgagcactttggtttgctgcgatattttgcttcttgtcgtacttcgataaaactgaaaaatgatt

SEQ ID NO: 217535 - DNA, 3880 bp, Zea Mays
cctcccctcacgaccacccacccaacccccgctgtcaccgcgccaccgagggcagagccgcgtcgcgaataaccgtgggggcgtgcgcgcgtgcgtgcctctctccgtctctccctccccgcccgccccacctccaccccccaccccggcgtgcgtcgcgtctctcccggccggaggcggaggagcggagctgcggaggacgaccaccggcgcggacgcaggcgtcccgcattccccgacccggccccgcctgacccccgttgccacggcagctcggtccgacccgaccaactcgtaggccagcaggcgccacgtagaaatacacgttcttcaattgttaacgtacaagtattacgatggtatcactctgctatttctgccccgggctcacaacgcggtcccggatgcccgtgaagcggtacaagaagatccttgctgaaatctttcccaaaacacaggatgaagagcctaacgagagaaggattgggaagctgtgcgagtacgcttcgaaaaaccctcttcgagtgccaaagatcacagtttacttggagcaacatatttatcgggacttaagaagtgagcaatacggctttgcaaaagttgtgatgttgatataccgcagactgtcagtttcctgtaaagaacagatgcctctgtttgcaagtagcctattaagcattgtccacacccttttagaccaaaagaggcaggatgatttatgtatcgttggatgcgaaaccttgtttgattttgctgtcaatcaggtggacggtacatatcagttcaatttggaagggctggtcccaagactgtgtgaaatagcacaagaagtaggagaagatgagcgagcaagtgccctacgagcggcagccctgcaatctctttcagctatggtctggtttatgggggagctttctcatatctcgtcagagtttgacaatgttgttcaagttgtactggaaaactacaaacctcagaagatgcaaaatgatgatcaaggtaccaatgatgccgacaaccagttggtgcaggaagaccagaaggctgagcaccccccttcccctttcattatcactccggccccctcttgggagagcatagttaatgttaagggaggagtcaacctaccagaggaagatgctagagatcccaaattttggtccagaatctgtgtgcacaatatggccaagctttctagggaggcaaccacattccgccgcatcttggaatgtttgtttcggtactttggtaacaatagttcatggttatcagaaaatggacttgctttgtgtgtcttgttggacatgcaacttttagtagaaagctcaggacaaaatatgcacttaatgctttcactgctgataaagcatattgagcacaaaacaatgttgaagcagccggacatgcagcttagcatcgtggaggtggcagctacccttgcagaacaatccagtgctatcgcttcaccaacaactatgggtgccataagtgatcttgtgaggcatttgaaaaggacattccatattactcttggcagcaaagatacggaattagtaaaatggaatgagaaattccggaagggcatagatgaatgcttagttcagctgtcaaagaaggtgtctgatgctgggccagttcttgacatgatggctgttatgctagaaaacattgcgagcactcctgttgtagctagatcaactgcagctgctgtttatcgcacagctcaaataattgcttcggtgccaaatttgcaataccagaataaggtgtttcctgaagctctgtttcatcagttgctgttaacaatgatacaccctgaccatgaagctcgtgttgctgcacaccgcatttttgccattgtcttagtcccatcttctgtttccccttcgattcaagccagtccatctagccgaccaaagaaacatgacatgcagaggacactctctagggctgtctctgtattttcttcttcagctgctatctttgacaagatgaaaaaggacaagaactcagaaaattcacaaggagaaagcaaggacaatagtatgcatagcgttggtgaagggaccggacaatcaaagagtcaaaaccttcacgtgtctcaaagccgccgtagcatgaaagctccgaatttttccatgaaaagaggtccttcaatggccatgagagctccttcagtagcgatcagagctccctcaatatctctgagaggtccttcaatgtctttgagagcatcttctatgtctgtaaaggaagaccaaagttcctcaaacaagtcagatgaggaaacggaatctgtgttggtgaagctgagcgcacgtcagatcacacttttgctgtcatccatttgggctcaatcaacatcccctgaaaatactcctgtgaactatgaagccattgctcatacttacagtttgcttctgttgttctctggatctaaggcatcaacttttgaggctcttactcagagttttcaggttgcattttctttgaggagctattcactcactgaagcagattcattacaaccgtctcggcgccggtcattgtttactctgtccacagccatgattattttctcgtcaagagcttacaatgtcttgccactcatcccgatctgtaaacaaatgatcaatgatcgtgcggccgatccgttccttcatttggtggatgagagcagacttacagctgttaaggattcttcaaatgatccttcaaaaatatatggatcaccagaggacaacaataatgcactgaagtccctttcagaaatagaactatcagaaagtcaatctcgagaatgcatagtctccacaatcatgaacaacatcgcaaatatgctggatgcggaattgcataatgtgagaagccaattgctaagtgatttcactcccgatgacatgtgtcctacaagcactcagttctttgaagtgcatgctgataacccttcatcagggtcttatgagactggtcaccatcaagagggcttgctgattgacctagggaatgaccatgatgcttttggggaagcttcagaaagcgcagaagcttccgcatcttctatacctgcatcagatcttctgagtatcgatcagcttcttgaaacggttggtgcagaaccagcacctcaggctggagtagtgtcagcagacattgggttcaaggatatgactagccactgcgaagccctgacgattgggaaacagcagaaaatgtccgccttcatgagcttccagcaaagcgtgcaagcggcagggctgccgagcagccagcccaaccagatggagctggacctttcccaagacccgcagttgcctcagaccggggcacatagcacgaacccattcactgatgacagccttcagggatatccacagtacacgaaggggcccaacggcgacaacgcacagccaggccaggacttccaacaacagtccctgaagttaccggcggcgagcccatatgacaatttcctcagagctgctggctatagccacgaactttccattccgcaggaaatcaaggaagagagcctactcgctgtcatgggacaccatgaagacgtgatcgcaaagcttgctgcaaaacttacaggtgactcgaacgattgttccggctttgtcgtctttccaccctctgttttgggcttttggcatgagaggaggcttctgcaggaatacgccacttctcctccgtactagaaaacgtgcctctgcctgacgacgtacaatgttcatgggatgactgggaacagaactgcaccagttagcacatcgtcatgtgagctgggcaccaatccagatgatgggcgttgtgtcgtaccaggacagtaggagtattactactgtattggagtagttcgcagttggagatagagtca

SEQ ID NO: 217536 - DNA, 407 bp, Zea Mays
gaaccgaaacccgatacatccaggcgtacagccctccgcctcgtgaaggcaaagcacgcgcaaagccaccacagcgtcttcatcttcgtctccagtccaagcaagcgaagagcacccctcgagatctctccctccccgcgccgccatggacgcagttgactcggtagtcgacccgctccgggagttcgccaaggacagcatccgcctcgtcaagcgctgccacaagccggaccgcaaggagttcaccaaggtcgccgcgcggactgcgatcggcttcgtcgtcatgggattcgtcggcttctttgtcaagctcatcttcatccctatcaacaacatcatcgtcggctccggctgatccgtaaacctcagtgactggctagtctgggtgccttttagatcattcgggg

SEQ ID NO: 217537 - DNA, 3090 bp, Zea Mays
aattttatcaatggctttaagggcccaagctggaagatcaacagccattgctaggtagatgaccatccctgtgagaacatgttgaacgtgcacttttcgaccagctttagtcaataactcagccttccatccagagagttgatttgcaatcttgtcaataatgggttgaacttgggtttttgaaagctttttacattgcttttcattatgttggatgtttggaaatcgtgtgccacacatgctcgataatgattatacaccctattctgcagtggatatatttgtcaaggatcttggtatagtatcttgtgaaagttccaattcgaggatcccagttcacgtctctagtatagcccaccagctgtttatttcaggatctgcttctgggtggggtagatatgacgatgctgccgttgtgaaggtctatgagacattaactggtgtaaaagttgaagggaaggctccgatgctcagtaaagaagatgttcttcagtctcttccatctgaatggccagaagatccaattgataatcttgtacctattgcatctcatagtagcaaaaagtttcttgtagttttagatgatgatccaactgggactcaaacagttcatgatatagaagttttaactgaatggcctgttgaagcccttgttgaacagttcctcaagctaccaacttgcttttttattttgacaaactctcgttccatgactgctgataaggccatgctgctagtacaaactatctgtaaaaatcttaaagctgcggcagagaaggtccctggtgttagttatacaatagtcttgagaggtgattcaactctacgtggtcatttcccagaggtgagatggatgcttggataatctgtccattttttcttcaaggtgggagatacactattaacgacatccactacgtcgcagactctgatagattaattcctgctggtgaaaccgaatttgccaaggatgcagtttttggctataaatcttccaatctcagacagtgggttgaagagaagaccaaaggacgggttttggagaaccaagtttcaacaatttccataactctcttgcgtaaacaaggaccaactgctgtttgtgagcatctctgtagcttggagaagggctctgtgtgcatcgtcaatgctgctagtgacagggacatggctgtctttgcttctggaatgatccaggctgaattgaaaggaaagcgatttctctgccgcacagctgcaagttttgtgagcgcaaggattgggatcaagccaaagccacctatctgtccaaatgaccttggcttaaaaagagctttaactggaggcctcataattgttggttcatatgtgccaaaaactacaaagcaggttgatgagttgcgatcacagttcgggcaatctcttcgagtcatagaggtgtctgtcgagatggtttcaatgaaatcaatggaggacagagaccaagaaatcagacgaattgttgaactagggaatgcttatatacaatccagaaaagacactctaattctcaccagccgccaactcattactggaaaaactcctgaagaaagcttagaaattaattataaagtgagttcagcactagtggagattgtgagaaggattgatagtaaacctcattatatcattgcaaagggaggaatcacttcatctgatattgctacaaaggcgctggaagctaaacgtgccaaagtcatgggacaagcattagctggtgtacccttgtggcagcttggtcctgagagtagatttcctggggtcccttacattgtttttcctggtaatgttggtgataacagtgctcttgctaaagtggtgaaaagttgggcttccccatctagaagttctacaaaagaaattcttcttaatgcggagaagggcggttatgctgttggtgctttcaatgtgtataaccttgagggaattgaagctgttgttgcagcagcagaggctgaaaagagtcctgctattcttcagattcatccgagtgctctaaagcaaggtggagtcccactggtagcatgttgcattgctgctgcagaacaatccagtgtgcctatcagtgtccactatgaccacggcatttccaagtcagacttgcttcaagctcttgaagcgggatttgattcagtcatggtggatggttctcatctaactttaggggataacatcttatacacaaagagcatatcttccttggctcatgcaaaaggtttacttgtggaagctgagttgggtaggctctcaggctctgaagatggcatgaccgttgaagaatatgaagcaagatttactgatgttgcccaggctgaggaatttattgatgagacaagcattgatgctctagcagtttgcattggaaatgttcatggaaaatatccacctagtggaccaaaccttaaattcgacttgctaaaggaccttcgtgcattaacattaaagaaaggagttagcttggtcctccatggagcatctggtctatctcatgagctcgtaaaggagtgcatagacttgggcgtgagaaaattcaatgtgaacaccgaggttcggaacagctacctggcgtccctcagaaagccagaaaaggacttgattcaggtgatggcgtctgctaaagaggcaatgaaagctgttgtagcagagaagctgcgcctgtttggatcgtgtgggaaagcctgagcgaagtacttgcgttgcgccggcaacatgcagtacaagaccgactgcatcatcgggttcgtgatgctgctgctactgtgcagttgcttacagttacagctcattgcgttgaacagctgaagtggttattgtactttgcagtgtagcgcaactaaggctaattcataaatcgtaataatgtatgtatgctgccccgctgtaaaaatgctccgtcgttaataaatgccatcgcgcttgctgtgcctttgtttacatttttattcgcctctcgagtgttctaacatgcaatctcagttgtcctatttagccctagtttgaaaactcaaatctcctctaagattggagggcatttctctctaatcttgtagaggatttgagtcttcaaactct

SEQ ID NO: 217538 - DNA, 526 bp, Zea Mays
accaagagcttgtgaatcaagtacttgatgaaattggcattgatatcaaccaagagcttgttggagccccgtcggccgctgttgctcaacctgcttcagcgggaagggttgcccaggctgaaagtgctgggaatgctgacactggaatcgacgccgatttgcaggcaaggctggacaatctgaggagaatgtaggtgctacaccagcaaaagagtagtgccttctagctctgttgcctgcgaatgtgaatacctagtcaatcaaagcaaaacgtttacaagccagtgtgtatgttgaaatgaatgaagcgttcgatatgccggtagtaatgacaaatgttaaatatacatatttacaatttcttcccctctgagttcatgatggattgatgcctgcagatgcggcatgtcagctgcgtgctaactgtgatttgcaagctgttgcttaaatacacagcagatatctaagctttaaattgccatgcttcctttccggcgattcaacgtcgtcgaagctccgaatcgtt

SEQ ID NO: 217539 - DNA, 416 bp, Zea Mays
gcagcatgacaggagagcagattcaggccccttcaagtcccagggatggcgaggatgttgcaattaccattgggcgccccaaggaaagtggacctaagttcggcaccatgatgggtgtctttgttccatgcttgcagaacatcttgggaatcatttattatatccgttttacctggattgtaggtatgtcaggtgtatggcagtcacttgtgttggtttcattttgtggtgcatgcacatttttgacctcgatatcattaagtgccattgcaacgaatggagctatgaagggtggtgggccatattatcttataggccgtgcacttggtcctgaagttggagttagtataggattatgcttcttcctcgggaatgcagtggctggatccatgtatcaccgtgaactcctcttctag

SEQ ID NO: 217540 - DNA, 3657 bp, Zea Mays
agcatgacaggagagcagattcaggccccttcaagtcccagggatggcgaggatgttgcaattaccattgggcgccccaaggaaagtggacctaagttcggcaccatgatgggtgtctttgttccatgcttgcagaacatcttgggaatcatttattatatccgttttacctggattgtaggtatgtcaggtgtatggcagtcacttgtgttggtttcattttgtggtgcatgcacatttttgacctcgatatcattaagtgccattgcaacgaatggagctatgaagggtggtgggccatattatcttataggccgtgcacttggtcctgaagttggagttagtataggattatgcttcttcctcgggaatgcagtggctggatccatgtatgtgcttggggctgtagaaacctttcttgacgctgttccttctgctggacttttccaaaagagtgtaacagttgtcaacaatacattagtgaatggtacagaaactgctggcacgtcaactatatctacacccagcttgcacgatcttcaagtgtatggtgttattgtgaccatactgctgtgttttattgtgttcggtggtgtcaaaattatcaacaaggttgcacctgctttcttaataccagtcctgttttctttgctgtgcatctatcttggtgtcttcattgcaccaaggcataatgctccaaagggaatcactggattgagtataaccacattgaaagacaattggggtgaaaactatcaacgtacaaataatgctggcgttcctgatccaagtggatcaatatattgggatttcaagtaagttaaacagaatggcaggatggtatgttaccaaaaagagtttcaccctgttcatatgcacttgtttagtgaattccatctgccctatatttaaggtctgttggaactagatgattaactgtgacaaggttcagagatttctaagctattaagagcatgaccctgttcatttttaaatgcacggccgtttgcacatttccttatgtatgtgaaactttattgtgctaaattttttgtatcgatccttcagtgctttggtaggtctgtttttcccagcagtcactggaattatggctggctcaaaccgatctgcttcactgaaagatacacagcgttcgataccaatcggcacattatctgcaactctttcaacaactgctatgtacttgttctctgtgcttctgtttggagccttggccacacgggaagagcttctaactgataggcttcttactgctacggtggcttggcctgctcctgcagtgatttacattggtattattctgtccaccttaggtgcagcactgcagagtttgactggggctccaaggttgcttgcagcaattgcgaatgatgacattcttcctgttcttaattacttcaaagtttctgagggatctgagccacatgcggccactttattcacagctttcatctgtatttgctgtgttgttattggaaacttggatttgattacccccactatcacaatgtttttccttctgtgctatgctggcgtgaacctgtcatgctttctgcttgacctccttgatgctcctagttggcgccctagatggaaatttcaccattggagcctttcacttgttggggcattactctgtgttgtgattatgtttctgatctcctggtctttcactgttgtctcccttgcccttgcaagcctcatctattactatgtgagcataaaagggaaggctggagactggggagatgggttcaagagtgcatactttcaattggccctccgaagtctcagatcacttggagcaaaccaagtccatcctaagaattggtaccccattcctctggtattctgccgtccatggggtaaacttccggaaaatgttccttgtcatccaaaacttgcagacttcgctaattgtatgaagaagaagggtcgtggtatgtccatttttgtctcgataattgatggtgattatcatgaactagctgaggatgcaaagactgcctgccgccaactagatgcttatattgactacaaacgctgtgagggtgttgcagagatcattgtagctcctaatatgtctgatggtttccgtagcattgtgcagacaatgggcctaggaaacttaaaaccaaatattgttgtgatgcggtaccctgagatctggcgacgtgagaatttgacacagataccgtcaacatttgtcagcataataaatgattgcattattgctaacaaggcagtagtcattgtgaagggactcgatgagtggcctaatgagtaccagcgacaatacggtactattgacctctactggattgtaagagatggaggattgatgcttcttctgtctcagctcctgctgacaaaggagagttttgagagctgtaagatccaagtattctgcatatctgaagaggatacagatgcagaggagttgaaggctgatgtcaagaagttcttgtatgatcttaggatgcaagctgaggtcattgttgtcactatgaaatcatgggaatcacacatggagagcagcagtaacggcgctcagcaggataactcccatgaggcttacacaagcgcacagcaaaggatcaggacataccttgatgagatgaaggaaactgctcaaacagaaaggcagttactaatggagaatgggaggcaagttgtgaacgaacagaaggttgataaattcctttacacaatgtttaagttgaactccacgatactcaggtactccagaatggcagctgtagttcttgtgagccttcctccaccgccattataccatccttcatatttctacatggagtacatggatttgcttgtagagaatgtcccacgcatgttaatagttaggggatatacgagagatgttgtcacatttttcacatgattatacatacgaacttctcacctggagactctagtgccgtcaggctgttgtactatctcagcagagactggatacacaagagcgtggaatctaccactgaaatgacaagccctcaccttgaaggcaaccacgatgagatgtcagatgtgcagagctgttgttcgcatattggattcgtgaactattgaactgcagtgtcttcattcttttttctggatttaaaagatccacatagcgagctttgattcttacagattttgtagctatcatatgtaaacacttaccatcttgtaattgtaagcatacttacatgctggcccaaagacaaatgcaatccttaccttctcactgaaacatttatataggtattttttttgcatcacttgtatgcgtctaaaactgatggacttgttgagatgagcagagctgcgaattttgaatggctacccccaaatgaattttggttatgctttgtcgcaaatatttggttttaatggtacaagatttctgagatacattactcaatgaggggtgctctgctactttacccagttactttcttgatatatgttttgttgaatgctgttctacatgtgatcttcagccagtaccttgatgttcaggcaatacatctacctgtcgaatgcaatttgtgccgtgtttcccgagctcgtaccactttcaagctcgggcctattcggaacggtactgtttcccaagcttaaagactcgag

SEQ ID NO: 217541 - DNA, 1797 bp, Zea Mays
gcatgacaggagagcagattcaggccccttcaagtcccagggatggcgaggatgttgcaattaccattgggcgccccaaggttttctttcatttcaacattttctgctgtgtgtttgaaaattcctgttcctttaaaaaaagataaaaaattaagaattatcgataatagcaatcttaaagaaagtggacctaagttcggcaccatgatgggtgtctttgttccatgcttgcagaacatcttgggaatcatttattatatccgttttacctggattgtaggtatgtcaggtgtatggcagtcacttgtgttggtttcattttgtggtgcatgcacatttttgacctcgatatcattaagtgccattgcaacgaatggagctatgaagggtggtgggccatattatcttataggccgtgcacttggtcctgaagttggagttagtataggattatgcttcttcctcgggaatgcagtggctggatccatgtatgtgcttggggctgtagaaacctttcttgacgctgttccttctgctggacttttccaaaagagtgtaacagttgtcaacaatacattagtgaatggtacagaaactgctggcacgtcaactatatctacacccagcttgcacgatcttcaagtgtatggtgttattgtgaccatactgctgtgttttattgtgttcggtggtgtcaaaattatcaacaaggttgcacctgctttcttaataccagtcctgttttctttgctgtgcatctatcttggtgtcttcattgcaccaaggcataatgctccaaagggaatcactggattgagtataaccacattgaaagacaattggggtgaaaactatcaacgtacaaataatgctggcgttcctgatccaagtggatcaatatattgggatttcaatgctttggtaggtctgtttttcccagcagtcactggaattatggctggctcaaaccgatctgcttcactgaaagatacacagcgttcgataccaatcggcacattatctgcaactctttcaacaactgctatgtacttgttctctgtgcttctgtttggagccttggccacacgggaagagcttctaactgataggcttcttactgctacggtggcttggcctgctcctgcagtgatttacattggtattattctgtccaccttaggtgcagcactgcagagtttgactggggctccaaggttgcttgcagcaattgcgaatgatgacattcttcctgttcttaattacttcaaagtttctgagggatctgagccacatgcggccactttattcacagctttcatctgtatttgctgtgttgttattggaaacttggatttgattacccccactatcacaatgtttttccttctgtgctatgctggcgtgaacctgtcatgctttctgcttgacctccttgatgctcctagttggcgccctagatggaaatttcaccattggagcctttcacttgttggggcattactctgtgttggtatggttcttaatactcttacaattttattttgtctatcatgatcttcagcatgaacagtttaaacttgagttaggtctttggtttgagactttgttcacttctattgtttttaatccaaccaccttatcttcacctatactaaagtcttgtttatcatgttttacaatagcaaatatctaatcgaaacagccataaatgcatttataattataagtgctgacatgaaaaaaacagttggtaacggaaacaacactttattttggactgatagatggataaatggc

SEQ ID NO: 217542 - DNA, 3348 bp, Zea Mays
gcatgacaggagagcagattcaggccccttcaagtcccagggatggcgaggatgttgcaattaccattgggcgccccaaggaaagtggacctaagttcggcaccatgatgggtgtctttgttccatgcttgcagaacatcttgggaatcatttattatatccgttttacctggattgtaggtatgtcaggtgtatggcagtcacttgtgttggtttcattttgtggtgcatgcacatttttgacctcgatatcattaagtgccattgcaacgaatggagctatgaagggtggtgggccatattatcttataggccgtgcacttggtcctgaagttggagttagtataggattatgcttcttcctcgggaatgcagtggctggatccatgtatgtgcttggggctgtagaaacctttcttgacgctgttccttctgctggacttttccaaaagagtgtaacagttgtcaacaatacattagtgaatggtacagaaactgctggcacgtcaactatatctacacccagcttgcacgatcttcaagtgtatggtgttattgtgaccatactgctgtgttttattgtgttcggtggtgtcaaaattatcaacaaggttgcacctgctttcttaataccagtcctgttttctttgctgtgcatctatcttggtgtcttcattgcaccaaggcataatgctccaaagggaatcactggattgagtataaccacattgaaagacaattggggtgaaaactatcaacgtacaaataatgctggcgttcctgatccaagtggatcaatatattgggatttcaatgctttggtaggtctgtttttcccagcagtcactggaattatggctggctcaaaccgatctgcttcactgaaagatacacagcgttcgataccaatcggcacattatctgcaactctttcaacaactgctatgtacttgttctctgtgcttctgtttggagccttggccacacgggaagagcttctaactgataggcttcttactgctacggtggcttggcctgctcctgcagtgatttacattggtattattctgtccaccttaggtgcagcactgcagagtttgactggggctccaaggttgcttgcagcaattgcgaatgatgacattcttcctgttcttaattacttcaaagtttctgagggatctgagccacatgcggccactttattcacagctttcatctgtatttgctgtgttgttattggaaacttggatttgattacccccactatcacaatgtttttccttctgtgctatgctggcgtgaacctgtcatgctttctgcttgacctccttgatgctcctagttggcgccctagatggaaatttcaccattggagcctttcacttgttggggcattactctgtgttgcctcatctattactatgtgagcataaaagggaaggctggagactggggagatgggttcaagagtgcatactttcaattggccctccgaagtctcagatcacttggagcaaaccaagtccatcctaagaattggtaccccattcctctggtattctgccgtccatggggtaaacttccggaaaatgttccttgtcatccaaaacttgcagacttcgctaattgtatgaagaagaagggtcgtggtatgtccatttttgtctcgataattgatggtgattatcatgaactagctgaggatgcaaagactgcctgccgccaactagatgcttatattgactacaaacgctgtgagggtgttgcagagatcattgtagctcctaatatgtctgatggtttccgtagcattgtgcagacaatgggcctaggaaacttaaaaccaaatattgttgtgatgcggtaccctgagatctggcgacgtgagaatttgacacagataccgtcaacatttgtcagcataataaatgattgcattattgctaacaaggcagtagtcattgtgaagggactcgatgagtggcctaatgagtaccagcgacaatacggtactattgacctctactggattgtaagagatggaggattgatgcttcttctgtctcagctcctgctgacaaaggagagttttgagagctgtaagatccaagtattctgcatatctgaagaggatacagatgcagaggagttgaaggctgatgtcaagaagttcttgtatgatcttaggatgcaagctgaggtcattgttgtcactatgaaatcatgggaatcacacatggagagcagcagtaacggcgctcagcaggataactcccatgaggcttacacaagcgcacagcaaaggatcaggacataccttgatgagatgaaggaaactgctcaaacagaaaggcagttactaatggagaatgggaggcaagttgtgaacgaacagaaggttgataaattcctttacacaatgtttaagttgaactccacgatactcaggtactccagaatggcagctgtagttcttgtgagccttcctccaccgccattataccatccttcatatttctacatggagtacatggatttgcttgtagagaatgtcccacgcatgttaatagttaggggatatacgagagatgttgtcacatttttcacatgattatacatacgaacttctcacctggagactctagtgccgtcaggctgttgtactatctcagcagagactggatacacaagagcgtggaatctaccactgaaatgacaagccctcaccttgaaggcaaccacgatgagatgtcagatgtgcagagctgttgttcgcatattggattcgtgaactattgaactgcagtgtcttcattcttttttctggatttaaaagatccacatagcgagctttgattcttacagattttgtagctatcatatgtaaacacttaccatcttgtaattgtaagcatacttacatgctggcccaaagacaaatgcaatccttaccttctcactgaaacatttatataggtattttttttgcatcacttgtatgcgtctaaaactgatggacttgttgagatgagcagagctgcgaattttgaatggctacccccaaatgaattttggttatgctttgtcgcaaatatttggttttaatggtacaagatttctgagatacattactcaatgaggggtgctctgctactttacccagttactttcttgatatatgttttgttgaatgctgttctacatgtgatcttcagccagtaccttgatgttcaggcaatacatctacctgtcgaatgcaatttgtgccgtgtttcccgagctcgtaccactttcaagctcgggcctattcggaacggtactgtttcccaagcttaaagactcgag

SEQ ID NO: 217543 - DNA, 3601 bp, Zea Mays
gcatgacaggagagcagattcaggccccttcaagtcccagggatggcgaggatgttgcaattaccattgggcgccccaaggaaagtggacctaagttcggcaccatgatgggtgtctttgttccatgcttgcagaacatcttgggaatcatttattatatccgttttacctggattgtaggtatgtcaggtgtatggcagtcacttgtgttggtttcattttgtggtgcatgcacatttttgacctcgatatcattaagtgccattgcaacgaatggagctatgaagggtggtgggccatattatcttataggccgtgcacttggtcctgaagttggagttagtataggattatgcttcttcctcgggaatgcagtggctggatccatgtatgtgcttggggctgtagaaacctttcttgacgctgttccttctgctggacttttccaaaagagtgtaacagttgtcaacaatacattagtgaatggtacagaaactgctggcacgtcaactatatctacacccagcttgcacgatcttcaagtgtatggtgttattgtgaccatactgctgtgttttattgtgttcggtggtgtcaaaattatcaacaaggttgcacctgctttcttaataccagtcctgttttctttgctgtgcatctatcttggtgtcttcattgcaccaaggcataatgctccaaagggaatcactggattgagtataaccacattgaaagacaattggggtgaaaactatcaacgtacaaataatgctggcgttcctgatccaagtggatcaatatattgggatttcaagtaagttaaacagaatggcaggatggtatgttaccaaaaagagtttcaccctgttcatatgcacttgtttagtgaattccatctgccctatatttaaggtctgttggaactagatgattaactgtgacaaggttcagagatttctaagctattaagagcatgaccctgttcatttttaaatgcacggccgtttgcacatttccttatgtatgtgaaactttattgtgctaaattttttgtatcgatccttcagtgctttggtaggtctgtttttcccagcagtcactggaattatggctggctcaaaccgatctgcttcactgaaagatacacagcgttcgataccaatcggcacattatctgcaactctttcaacaactgctatgtacttgttctctgtgcttctgtttggagccttggccacacgggaagagcttctaactgataggcttcttactgctacggtggcttggcctgctcctgcagtgatttacattggtattattctgtccaccttaggtgcagcactgcagagtttgactggggctccaaggttgcttgcagcaattgcgaatgatgacattcttcctgttcttaattacttcaaagtttctgagggatctgagccacatgcggccactttattcacagctttcatctgtatttgctgtgttgttattggaaacttggatttgattacccccactatcacaatgtttttccttctgtgctatgctggcgtgaacctgtcatgctttctgcttgacctccttgatgctcctagttggcgccctagatggaaatttcaccattggagcctttcacttgttggggcattactctgtgttgcctcatctattactatgtgagcataaaagggaaggctggagactggggagatgggttcaagagtgcatactttcaattggccctccgaagtctcagatcacttggagcaaaccaagtccatcctaagaattggtaccccattcctctggtattctgccgtccatggggtaaacttccggaaaatgttccttgtcatccaaaacttgcagacttcgctaattgtatgaagaagaagggtcgtggtatgtccatttttgtctcgataattgatggtgattatcatgaactagctgaggatgcaaagactgcctgccgccaactagatgcttatattgactacaaacgctgtgagggtgttgcagagatcattgtagctcctaatatgtctgatggtttccgtagcattgtgcagacaatgggcctaggaaacttaaaaccaaatattgttgtgatgcggtaccctgagatctggcgacgtgagaatttgacacagataccgtcaacatttgtcagcataataaatgattgcattattgctaacaaggcagtagtcattgtgaagggactcgatgagtggcctaatgagtaccagcgacaatacggtactattgacctctactggattgtaagagatggaggattgatgcttcttctgtctcagctcctgctgacaaaggagagttttgagagctgtaagatccaagtattctgcatatctgaagaggatacagatgcagaggagttgaaggctgatgtcaagaagttcttgtatgatcttaggatgcaagctgaggtcattgttgtcactatgaaatcatgggaatcacacatggagagcagcagtaacggcgctcagcaggataactcccatgaggcttacacaagcgcacagcaaaggatcaggacataccttgatgagatgaaggaaactgctcaaacagaaaggcagttactaatggagaatgggaggcaagttgtgaacgaacagaaggttgataaattcctttacacaatgtttaagttgaactccacgatactcaggtactccagaatggcagctgtagttcttgtgagccttcctccaccgccattataccatccttcatatttctacatggagtacatggatttgcttgtagagaatgtcccacgcatgttaatagttaggggatatacgagagatgttgtcacatttttcacatgattatacatacgaacttctcacctggagactctagtgccgtcaggctgttgtactatctcagcagagactggatacacaagagcgtggaatctaccactgaaatgacaagccctcaccttgaaggcaaccacgatgagatgtcagatgtgcagagctgttgttcgcatattggattcgtgaactattgaactgcagtgtcttcattcttttttctggatttaaaagatccacatagcgagctttgattcttacagattttgtagctatcatatgtaaacacttaccatcttgtaattgtaagcatacttacatgctggcccaaagacaaatgcaatccttaccttctcactgaaacatttatataggtattttttttgcatcacttgtatgcgtctaaaactgatggacttgttgagatgagcagagctgcgaattttgaatggctacccccaaatgaattttggttatgctttgtcgcaaatatttggttttaatggtacaagatttctgagatacattactcaatgaggggtgctctgctactttacccagttactttcttgatatatgttttgttgaatgctgttctacatgtgatcttcagccagtaccttgatgttcaggcaatacatctacctgtcgaatgcaatttgtgccgtgtttcccgagctcgtaccactttcaagctcgggcctattcggaacggtactgtttcccaagcttaaagactcgag

SEQ ID NO: 217544 - DNA, 3315 bp, Zea Mays
gcatgacaggagagcagattcaggccccttcaagtcccagggatggcgaggatgttgcaattaccattgggcgccccaaggaaagtggacctaagttcggcaccatgatgggtgtctttgttccatgcttgcagaacatcttgggaatcatttattatatccgttttacctggattgtaggtatgtcaggtgtatggcagtcacttgtgttggtttcattttgtggtgcatgcacatttttgacctcgatatcattaagtgccattgcaacgaatggagctatgaagggtggtgggccatattatcttataggccgtgcacttggtcctgaagttggagttagtataggattatgcttcttcctcgggaatgcagtggctggatccatgtatgtgcttggggctgtagaaacctttcttgacgctgttccttctgctggacttttccaaaagagtgtaacagttgtcaacaatacattagtgaatggtacagaaactgctggcacgtcaactatatctacacccagcttgcacgatcttcaagtgtatggtgttattgtgaccatactgctgtgttttattgtgttcggtggtgtcaaaattatcaacaagagggaatcactggattgagtataaccacattgaaagacaattggggtgaaaactatcaacgtacaaataatgctggcgttcctgatccaagtggatcaatatattgggatttcaatgctttggtaggtctgtttttcccagcagtcactggaattatggctggctcaaaccgatctgcttcactgaaagatacacagcgttcgataccaatcggcacattatctgcaactctttcaacaactgctatgtacttgttctctgtgcttctgtttggagccttggccacacgggaagagcttctaactgataggcttcttactgctacggtggcttggcctgctcctgcagtgatttacattggtattattctgtccaccttaggtgcagcactgcagagtttgactggggctccaaggttgcttgcagcaattgcgaatgatgacattcttcctgttcttaattacttcaaagtttctgagggatctgagccacatgcggccactttattcacagctttcatctgtatttgctgtgttgttattggaaacttggatttgattacccccactatcacaatgtttttccttctgtgctatgctggcgtgaacctgtcatgctttctgcttgacctccttgatgctcctagttggcgccctagatggaaatttcaccattggagcctttcacttgttggggcattactctgtgttgtgattatgtttctgatctcctggtctttcactgttgtctcccttgcccttgcaagcctcatctattactatgtgagcataaaagggaaggctggagactggggagatgggttcaagagtgcatactttcaattggccctccgaagtctcagatcacttggagcaaaccaagtccatcctaagaattggtaccccattcctctggtattctgccgtccatggggtaaacttccggaaaatgttccttgtcatccaaaacttgcagacttcgctaattgtatgaagaagaagggtcgtggtatgtccatttttgtctcgataattgatggtgattatcatgaactagctgaggatgcaaagactgcctgccgccaactagatgcttatattgactacaaacgctgtgagggtgttgcagagatcattgtagctcctaatatgtctgatggtttccgtagcattgtgcagacaatgggcctaggaaacttaaaaccaaatattgttgtgatgcggtaccctgagatctggcgacgtgagaatttgacacagataccgtcaacatttgtcagcataataaatgattgcattattgctaacaaggcagtagtcattgtgaagggactcgatgagtggcctaatgagtaccagcgacaatacggtactattgacctctactggattgtaagagatggaggattgatgcttcttctgtctcagctcctgctgacaaaggagagttttgagagctgtaagatccaagtattctgcatatctgaagaggatacagatgcagaggagttgaaggctgatgtcaagaagttcttgtatgatcttaggatgcaagctgaggtcattgttgtcactatgaaatcatgggaatcacacatggagagcagcagtaacggcgctcagcaggataactcccatgaggcttacacaagcgcacagcaaaggatcaggacataccttgatgagatgaaggaaactgctcaaacagaaaggcagttactaatggagaatgggaggcaagttgtgaacgaacagaaggttgataaattcctttacacaatgtttaagttgaactccacgatactcaggtactccagaatggcagctgtagttcttgtgagccttcctccaccgccattataccatccttcatatttctacatggagtacatggatttgcttgtagagaatgtcccacgcatgttaatagttaggggatatacgagagatgttgtcacatttttcacatgattatacatacgaacttctcacctggagactctagtgccgtcaggctgttgtactatctcagcagagactggatacacaagagcgtggaatctaccactgaaatgacaagccctcaccttgaaggcaaccacgatgagatgtcagatgtgcagagctgttgttcgcatattggattcgtgaactattgaactgcagtgtcttcattcttttttctggatttaaaagatccacatagcgagctttgattcttacagattttgtagctatcatatgtaaacacttaccatcttgtaattgtaagcatacttacatgctggcccaaagacaaatgcaatccttaccttctcactgaaacatttatataggtattttttttgcatcacttgtatgcgtctaaaactgatggacttgttgagatgagcagagctgcgaattttgaatggctacccccaaatgaattttggttatgctttgtcgcaaatatttggttttaatggtacaagatttctgagatacattactcaatgaggggtgctctgctactttacccagttactttcttgatatatgttttgttgaatgctgttctacatgtgatcttcagccagtaccttgatgttcaggcaatacatctacctgtcgaatgcaatttgtgccgtgtttcccgagctcgtaccactttcaagctcgggcctattcggaacggtactgtttcccaagcttaaagactcgag

SEQ ID NO: 217545 - DNA, 3729 bp, Zea Mays
gcatgacaggagagcagattcaggccccttcaagtcccagggatggcgaggatgttgcaattaccattgggcgccccaaggaaagtggacctaagttcggcaccatgatgggtgtctttgttccatgcttgcagaacatcttgggaatcatttattatatccgttttacctggattgtaggtatgtcaggtgtatggcagtcacttgtgttggtttcattttgtggtgcatgcacatttttgacctcgatatcattaagtgccattgcaacgaatggagctatgaagggtggtgggccatattatcttataggccgtgcacttggtcctgaagttggagttagtataggattatgcttcttcctcgggaatgcagtggctggatccatgtatgtgcttggggctgtagaaacctttcttgacgctgttccttctgctggacttttccaaaagagtgtaacagttgtcaacaatacattagtgaatggtacagaaactgctggcacgtcaactatatctacacccagcttgcacgatcttcaagtgtatggtgttattgtgaccatactgctgtgttttattgtgttcggtggtgtcaaaattatcaacaaggttgcacctgctttcttaataccagtcctgttttctttgctgtgcatctatcttggtgtcttcattgcaccaaggcataatgctccaaagggaatcactggattgagtataaccacattgaaagacaattggggtgaaaactatcaacgtacaaataatgctggcgttcctgatccaagtggatcaatatattgggatttcaatgctttggtaggtctgtttttcccagcagtcactggaattatggctggctcaaaccgatctgcttcactgaaagatacacagcgttcgataccaatcggcacattatctgcaactctttcaacaactgctatgtacttgttctctgtgcttctgtttggagccttggccacacgggaagagcttctaactgataggcttcttactgctacggtggcttggcctgctcctgcagtgatttacattggtattattctgtccaccttaggtgcagcactgcagagtttgactggggctccaaggttgcttgcagcaattgcgaatgatgacattcttcctgttcttaattacttcaaagtttctgagggatctgagccacatgcggccactttattcacagctttcatctgtatttgctgtgttgttattggaaacttggatttgattacccccactatcacaatgtttttccttctgtgctatgctggcgtgaacctgtcatgctttctgcttgacctccttgatgctcctagttggcgccctagatggaaatttcaccattggagcctttcacttgttggggcattactctgtgttggtatggttcttaatactcttacaattttattttgtctatcatgatcttcagcatgaacagtttaaacttgagttaggtctttggtttgagactttgttcacttctattgtttttaatccaaccaccttatcttcacctatactaaagtcttgtttatcatgttttacaatagcaaatatctaatcgaaacagccataaatgcatttataattataagtgctgacatgaaaaaaacagttggtaacggaaacaacactttattttggactgatagatggataaatggcggctgcatcaatgattttgctcctgaagtcgtttccaagtgattatgtttctgatctcctggtctttcactgttgtctcccttgcccttgcaagcctcatctattactatgtgagcataaaagggaaggctggagactggggagatgggttcaagagtgcatactttcaattggccctccgaagtctcagatcacttggagcaaaccaagtccatcctaagaattggtaccccattcctctggtattctgccgtccatggggtaaacttccggaaaatgttccttgtcatccaaaacttgcagacttcgctaattgtatgaagaagaagggtcgtggtatgtccatttttgtctcgataattgatggtgattatcatgaactagctgaggatgcaaagactgcctgccgccaactagatgcttatattgactacaaacgctgtgagggtgttgcagagatcattgtagctcctaatatgtctgatggtttccgtagcattgtgcagacaatgggcctaggaaacttaaaaccaaatattgttgtgatgcggtaccctgagatctggcgacgtgagaatttgacacagataccgtcaacatttgtcagcataataaatgattgcattattgctaacaaggcagtagtcattgtgaagggactcgatgagtggcctaatgagtaccagcgacaatacggtactattgacctctactggattgtaagagatggaggattgatgcttcttctgtctcagctcctgctgacaaaggagagttttgagagctgtaagatccaagtattctgcatatctgaagaggatacagatgcagaggagttgaaggctgatgtcaagaagttcttgtatgatcttaggatgcaagctgaggtcattgttgtcactatgaaatcatgggaatcacacatggagagcagcagtaacggcgctcagcaggataactcccatgaggcttacacaagcgcacagcaaaggatcaggacataccttgatgagatgaaggaaactgctcaaacagaaaggcagttactaatggagaatgggaggcaagttgtgaacgaacagaaggttgataaattcctttacacaatgtttaagttgaactccacgatactcaggtactccagaatggcagctgtagttcttgtgagccttcctccaccgccattataccatccttcatatttctacatggagtacatggatttgcttgtagagaatgtcccacgcatgttaatagttaggggatatacgagagatgttgtcacatttttcacatgattatacatacgaacttctcacctggagactctagtgccgtcaggctgttgtactatctcagcagagactggatacacaagagcgtggaatctaccactgaaatgacaagccctcaccttgaaggcaaccacgatgagatgtcagatgtgcagagctgttgttcgcatattggattcgtgaactattgaactgcagtgtcttcattcttttttctggatttaaaagatccacatagcgagctttgattcttacagattttgtagctatcatatgtaaacacttaccatcttgtaattgtaagcatacttacatgctggcccaaagacaaatgcaatccttaccttctcactgaaacatttatataggtattttttttgcatcacttgtatgcgtctaaaactgatggacttgttgagatgagcagagctgcgaattttgaatggctacccccaaatgaattttggttatgctttgtcgcaaatatttggttttaatggtacaagatttctgagatacattactcaatgaggggtgctctgctactttacccagttactttcttgatatatgttttgttgaatgctgttctacatgtgatcttcagccagtaccttgatgttcaggcaatacatctacctgtcgaatgcaatttgtgccgtgtttcccgagctcgtaccactttcaagctcgggcctattcggaacggtactgtttcccaagcttaaagactcgag

SEQ ID NO: 217546 - DNA, 2169 bp, Zea Mays
acctcaaagtcgtctacccacatcataatcgacggcccacgcggccacgcgtacgtccccgattcatacaggctggccccaccttccgatcctaataagcccgctcccacactcctttcttcccctgcctgccgtctctcttccaccttccaccacaagcgccgccgcagccggtgcctgctccttcccgatccccgaggcaaagctgcgactccgcaaccgccgccatggcgttcgagaagatcaaggtctccaacccaatcgtcgagatggacggtgatgagatgaccagggtattctggcagtctatcaaggacaagcttatcctcccatttctggacctggacatcaagtactatgatttggggatactgcaccgtgaagcaactgatgacaaggtcacagtggaggctgcagaggctactctcaagtacaacgtggctattaagtgtgcgaccattactccagatgaaactcgggttaaggagttcaatctgaaacacatgtggaagagcccaaatggcacaattaggaacattataaatggcactgtgttcagagagcctattatatgcaaaaacgttccaagacttgttccaggatggactaagcccatctgcattggaaggcatgccttcggtgatcaataccgagctaccgatgcagttctgaaggggcctgggaagctgaagctagtttttgagggaaaagaagaacagattgatctggaggtattcaacttcactggtgctggaggagttgccttgtctatgtacaacaccgacgagtcaatccgagcttttgctgaggcttctatgacaactgcttatgagaagaaatggccactctaccttagcaccaaaaacacaatcctgaaaaaatatgatggcaggtttaaggacattttccaggaggtctatgaagctgactggaagtccaaatttgaggctgctggaatatggtatgagcatcgtcttattgatgacatggttgcgtacgcgcttaagagcgaaggaggctatgtgtgggcttgcaagaactacgatggagatgtgcagagtgatttcttagctcaaggttttggatctttgggtttgatgacatcagtgttggtgtgccctgatggaaaaaccatcgaagctgaagctgcccatggcacggttacccgtcatttccgtgtccaccagaaaggaggcgaaaccagcacgaacagcattgcttcgatctttgcatggacaagaggacttgcccacagggcaaagctcgacgacaacgctagactactcgacttcgctctcaaactcgaggctgcttgcgttgagaccgtggagtccgggaagatgactaaagatctggcgattcttgtccatggatcttccagcgtcacgagaagccattacctgaacaccgaggagttcatcgacgcagtcgctactgagctccgatcaagactgggagccaactgagcctacaagaaactttgcatggcgactttgaatgcttcgtcaccgtcaccgatctgctagtcgtcttttctgttatgaagaagtgaattttacaaaatgccttccgttcaagccgcgtactaccgcgggatcacggaccactctctcagacggccaggtggttgtggtctcccaattccgcgctccagtggcaccacgtctccaggccacgcgttccaatttccacggcgctagtgacgtcgccaaaaaaggtgagaggaaaaggagggccgcgacgaggacgaccatgccggggcaaccgacaccgggactgccgcgtgatttgtgcccttgcgcacagtactacctatctatgcgtgtgtacgatatcttgtgtgcgctgcttggctgctctgtctacgcgcgcgtggactgcgactctgaaacctttcggcagcgtacgcaattgtcggatttcaataaaggaccgtctggtctgaatctctcaataaggacatgtataagtctaggttcttggttggctttttcagtataaaaacagctaagagatcagcatgatataactctaaactttaaatcagaaatgtatttcaaagacaatatgtatagaaagttgtgttgagatatgttttttatgaagagtctgtctcttgtaccttttttagttaatccttaaatacttctcaagagaccttatattaaa

SEQ ID NO: 217547 - DNA, 2800 bp, Zea Mays
atgaagtgtgctagagtaccagaagtggtttcaaaggagatgcacacctatctgagaaggaacatgagggttgtgattactgcggatggtgatgaaggtgaagaggaaggggagcagattgatgtaggccccctaccaagttctgggacaaaaaccaagcaaacaaaaaagcaaattgctcaagcttccatgtcttcatttgttgtagcagctcctataaaaccaaatacacagaaggcaagcaaatcagtgagtgccatgctttgcaagactccagaggaagttgtagcagagagacataaaaatagaacttctcagaccactcttgagcattgcacaaagaaaggaacagaagcaaagcaaattgttgacgaccatgtagctgattttctatatgagaacaagattccattgaatgtcgtcaattcaagaagctggcagattatgatggagtccattggtcagtatggtcctggatatcgtggcccatcatactatgaggcaagggtaccttggcttgaaagggcagtgaagagaacatcaacattgagagctaagcacgaagaggcttggaaggaatatggttgctcaattatgtcagatgggtggactgacatacgacaacggcatttgataaacttccttgccaacagtccagcggggacctacttcttaggttctgtcgatgcatcaagtgagatagcaaatgccaatatgttggcagatctattggagaagcaaataattaaggtggggaaagaacatgtggtacatgtgatcactgacaatggagccaatttcaaagcagcagggaggatccttatggacagaattccccatctgttttggactccttgtgctgcgcattgcttggatttgttgttggaggatattggcaagatcaaggagttcaacacttgcatcaacatggccaagaaggtttcgaggttcctgtacaagcatgggcgacttcacagcctaatgagagaaaagctaggtggggaccttgttaggccaggtgtgactcgatttgcaacatcattcttgactttggcaagcatgtataagcataagagtaaattacaaggcttgtttgttagtgatgaatggaacgggtctaaatttgccctagttaaagaaggtgaacaagctgaaaatattgtcctttcagtatcattttggcaaactcttgaaaattgtcttcgggcttcacaaccactactcattgctctaaggattgctgacggtgatgagacgccaacagctccagagataatggcagctatggacaaagcaaaagctaccatacaagagtctttgaaagagaagccacgattacttgctgaagtaatctcatgctttgagaagaggtgggatactcagatggagcaaaaattatatggggcagccctttatttgaatccaggtaaattctttaccttaagggataaagacaggaggcaagctgcaagacttcgagctatgttcaatgatgttttgtggaaaatgatcagtgatgaggatgagcaaacaaaaataagtaaacaagcagatgactatgaaagatcagaaggggaatgcttttcaaaggctggagcaataagagaaagagagaaaaaaagtcctagttgtgagagaaattggtcagattttgcagcaatccatacaaaaaagaggaaccgactagaacaccagaggcttaataaattggtctatgtcagttacaataggaagatggaaaataggtttcaaacactaagagagctgggatccaaaggaaaaagaagcaacccactcgtgcttgaagagttcatgtgggaaaatgaatgggttgaagaaaatgaagatgatggtgacaacaacatatggcatgctgtggatgaggctttaggagcaactcaggctcttcgaggcagaaacttgccaagaatagctgctgcaggtgctggttcgtcttctcagcctcaacgaacatatgttaggacaaggaagcgttcaagaaatacagcagctcaagatattggagaggaggatagtgatgatcaagaagatggtgttgctgcagcacaagcagaacaaacccaagaagcaactggattggacgaagatggtagcagccagcagtgcacaataattagaaccacacaactggctgctgctcaagaccggcttactgatttggagaggcaaaaggatgatattatgaggtcctattcccctgctgcactactcgacaaactccaaacgtcgatggcaaagctggacgaggagtctgaggagctgcagcagaagttcctggcaaaggacatcgacttcccacacttggtacagaagtacaagaagctccgcacggcttatcacaagcaggcgttgctccatctcgccggccagacataactccactgacatccggcctgcatcatgtcaactttgctgtattcctctgcttggccctgttttattgctgcagcttcctatagggcttgccaaacactttgcacgatttgttggatgataataaagctttcgtatgcttcatgtttcgtggatgctggctctggtgagaggggaattggagggaatccatggagaaattctcttgctattcaaaattgtcccatgatctcctcttattagggtaaattcttcttagggtctgtttgtttccgttcattttgatgaattgtaatttaactaacacagtaggctattttttagaatgtgacatttcacaactttctaaagtgtatatataagcttatctcaaattcatgaggtgaaagatgaaaattaattccat

SEQ ID NO: 217548 - DNA, 1010 bp, Zea Mays
tttcctctattcggcagttcccagcagcagcaatcagatccaaatttccaggacattcctatgcagtcttggtaccctacctcggttgtagttttcatcccgtgggcaaccatctcctgctgaggctgcagagataattgcccatttgaaggacaagagtattgaggagttacagaggctattgaaagagaaagaggcatataatgcattctttaacacattcgatcaagtgaaaacccagaacaatgtgcgtggcgagcttagaaaggagacattgcaacttgcaagggaaaatttagaaaaggagcagcggattttggagcttgggaatcagtgcacaataattagaaccacacaactggctgctgctcaagaccggcttactgatttggagaggcaaaaggatgatattatgaggtcctattcccctgctgcactactcgacaaactccaaacgtcgatggcaaagctggacgaggagtctgaggagctgcagcagaagttcctggcaaaggacatcgacttcccacacttggtacagaagtacaagaagctccgcacggcttatcacaagcaggcgttgctccatctcgccggccagacataactccactgacatccggcctgcatcatgtcaactttgctgtattcctctgcttggccctgttttattgctgcagcttcctatagggcttgccaaacactttgcacgatttgttggatgataataaagctttcgtatgcttcatgtttcgtggatgctggctctggtgagaggggaattggagggaatccatggagaaattctcttgctattcaaaattgtcccatgatctcctcttattagggtaaattcttcttagggtctgtttgtttccgttcattttgatgaattgtaatttaactaacacagtaggctattttttagaatgtgacatttcacaactttctaaagtgtatatataagcttatctcaaattcatgaggtgaaagatgaaaattaattccat

SEQ ID NO: 217549 - DNA, 1014 bp, Zea Mays
ctggagatttcctctattcgggtttgtcttcatctccagccacacctacctcttctagctccagtccacatcaaagagcttcaaataatctgcagttttcatcccgtgggcaaccatctcctgctgaggctgcagagataattgcccatttgaaggacaagagtattgaggagttacagaggctattgaaagagaaagaggcatataatgcattctttaacacattcgatcaagtgaaaacccagaacaatgtgcgtggcgagcttagaaaggagacattgcaacttgcaagggaaaatttagaaaaggagcagcggattttggagcttgggaatcagtgcacaataattagaaccacacaactggctgctgctcaagaccggcttactgatttggagaggcaaaaggatgatattatgaggtcctattcccctgctgcactactcgacaaactccaaacgtcgatggcaaagctggacgaggagtctgaggagctgcagcagaagttcctggcaaaggacatcgacttcccacacttggtacagaagtacaagaagctccgcacggcttatcacaagcaggcgttgctccatctcgccggccagacataactccactgacatccggcctgcatcatgtcaactttgctgtattcctctgcttggccctgttttattgctgcagcttcctatagggcttgccaaacactttgcacgatttgttggatgataataaagctttcgtatgcttcatgtttcgtggatgctggctctggtgagaggggaattggagggaatccatggagaaattctcttgctattcaaaattgtcccatgatctcctcttattagggtaaattcttcttagggtctgtttgtttccgttcattttgatgaattgtaatttaactaacacagtaggctattttttagaatgtgacatttcacaactttctaaagtgtatatataagcttatctcaaattcatgaggtgaaagatgaaaattaattccat

SEQ ID NO: 217550 - DNA, 1287 bp, Zea Mays
cccccacacacacacactcgcgctcgacacgcaggcgacggtggcggcgatcaggcccggtatctcagcacggccgacagtcccaggctcgacggcggcgtcagcggctccccttcccgcctctagccagtggcctcgtgccctcggctccggtcctctgcacaccggccggagaccctgcatttctttatacgatgagctggagatttcctctattcggttcccagcagcagcaatcagatccaaatttccaggacattcctatgcagtcttggtaccctacctcggttgtaggtttgtcttcatctccagccacacctacctcttctagctccagtccacatcaaagagcttcaaataatctgcagttttcatcccgtgggcaaccatctcctgctgaggctgcagagataattgcccatttgaaggacaagagtattgaggagttacagaggctattgaaagagaaagaggcatataatgcattctttaacacattcgatcaagtgaaaacccagaacaatgtgcgtggcgagcttagaaaggagacattgcaacttgcaagggaaaatttagaaaaggagcagcggattttggagcttgggaatcagtgcacaataattagaaccacacaactggctgctgctcaagaccggcttactgatttggagaggcaaaaggatgatattatgaggtcctattcccctgctgcactactcgacaaactccaaacgtcgatggcaaagctggacgaggagtctgaggagctgcagcagaagttcctggcaaaggacatcgacttcccacacttggtacagaagtacaagaagctccgcacggcttatcacaagcaggcgttgctccatctcgccggccagacataactccactgacatccggcctgcatcatgtcaactttgctgtattcctctgcttggccctgttttattgctgcagcttcctatagggcttgccaaacactttgcacgatttgttggatgataataaagctttcgtatgcttcatgtttcgtggatgctggctctggtgagaggggaattggagggaatccatggagaaattctcttgctattcaaaattgtcccatgatctcctcttattagggtaaattcttcttagggtctgtttgtttccgttcattttgatgaattgtaatttaactaacacagtaggctattttttagaatgtgacatttcacaactttctaaagtgtatatataagcttatctcaaattcatgaggtgaaagatgaaaattaattccat

SEQ ID NO: 217551 - DNA, 1695 bp, Zea Mays
cccccacacacacacactcgcgctcgacacgcaggcgacggtggcggcgatcaggcccggtatctcagcacggccgacagtcccaggctcgacggcggcgtcagcggctccccttcccgcctctagccagtggcctcgtgccctcggctccggtcctctgcacaccggccggagaccctgcatttctttatacgatgagctggagatttcctctattcgggtatgttgatcttattgaaaccaatctatgctgatgtcacaatctatgttttatgagccctgacatctcatttatctgtctaattagttaggttttacatattcctaatttgctatatgcatttggtacatgtttcctttggaacctgctagttcaaatacgttgcacaatcacaacactatgatgcccagttttagttttttctccctgtataaccctgcagtccaaaagttctttagttaacaaaagagaattttacctgattgctatatgtgccatttcctgtggatgcatcttaacagttatactggatgtaggatgccatatacgaaattatgccttacaagttctgaaaattttgcttctcttggttactgttatttgctcctttgaatgcactcatagcagttcccagcagcagcaatcagatccaaatttccaggacattcctatgcagtcttggtaccctacctcggttgtaggtttgtcttcatctccagccacacctacctcttctagctccagtccacatcaaagagcttcaaataatctgcagttttcatcccgtgggcaaccatctcctgctgaggctgcagagataattgcccatttgaaggacaagagtattgaggagttacagaggctattgaaagagaaagaggcatataatgcattctttaacacattcgatcaagtgaaaacccagaacaatgtgcgtggcgagcttagaaaggagacattgcaacttgcaagggaaaatttagaaaaggagcagcggattttggagcttgggaatcagtgcacaataattagaaccacacaactggctgctgctcaagaccggcttactgatttggagaggcaaaaggatgatattatgaggtcctattcccctgctgcactactcgacaaactccaaacgtcgatggcaaagctggacgaggagtctgaggagctgcagcagaagttcctggcaaaggacatcgacttcccacacttggtacagaagtacaagaagctccgcacggcttatcacaagcaggcgttgctccatctcgccggccagacataactccactgacatccggcctgcatcatgtcaactttgctgtattcctctgcttggccctgttttattgctgcagcttcctatagggcttgccaaacactttgcacgatttgttggatgataataaagctttcgtatgcttcatgtttcgtggatgctggctctggtgagaggggaattggagggaatccatggagaaattctcttgctattcaaaattgtcccatgatctcctcttattagggtaaattcttcttagggtctgtttgtttccgttcattttgatgaattgtaatttaactaacacagtaggctattttttagaatgtgacatttcacaactttctaaagtgtatatataagcttatctcaaattcatgaggtgaaagatgaaaattaattccat

SEQ ID NO: 217552 - DNA, 2966 bp, Zea Mays
aaatcctaaaaattccaccaccaccgaaccgagcactttcgctacgcaaacacgcgcgtggaaaacaaaacggcacacaaattatttattttttttcctttttcgatcccagacacaacacaagactgaaaaagtcagcgaggaaggaaaaaaaaatctgcgaggcagcgcagccggacgaggaggaggaggtcaggactcaggaggagaggcgtcgcggactcgcggtggcagtgccgcgcacggcaacccaacccagctcagctccggcgaggacgcaaccgttgacgtcgctcttggcctcgcctcgttatttgaggtcgcgcggccgcgagccggggtccagatcgagtctcgcgcgaggtgtttcggcaccgcgaaatgccgcctccggctgcgatgctgctccttacggcggcctcggggcctcccacgctgtcgctgaccctggccgcgaggcgggcgccgctccgggccccaagccggcggaggctgcgggcgctgcggccggcgaggatccgcgccgccgcggcgatcggtggcgagttcggcggcctcggccggcgccgcgtcgtcgtgggagagttcatcgagcgcctgcgcaacgttctgcccgggggcagttggtggcgcctcgaggacggcgatgaggccggggacggggccggccgcgcagaggggagcggtaccaccgccgtgtccgcgctcaggcggatgtgggccctcgttgccggcgacagattggtcatctatgtcggcttcgcgtccctcgtcggcgctgcgctttcggagatcgccataccacatctccttgcagcgtccattttctctgcgcagaatggaggcgcggtgttctaccgaaatgccaagcttctggttgtcctatgtctggtttccggggtgtttagtggcatacgaagttgctgttttggtgttgcaaacatgatattggtaaaaccatgttaaacggatgagagaggagttatttgattccattctttcacaggatatttccttttttgatgaagaaacagtaggagatctgacaagtagacttggttcggactgccaacaagtgtctcgtgttataggcaatgaccttaacctgatttcacgcaatttacttcagggtgcaggtgcattaatttatctgctagtcttatcttggcctctcggattgtgtacaatgtttgtttgtgcaactctatcagcaattatgctagttcatggacggtttcagaaaagggcagctaaatttgcacaggagttcaccgcaaacgccaataatgttgctcaagaggtgataactttggttaggacagtgcgagtatatggaacagaaaagcaggagtttaaaaggtatgcaaactggcttgataagctgtatgatgtgagctttcggcagacagtggcttatggaggctggagcctgagcttgaactatctataccattctactcaggtcattggagtggtgattggaggcctagcaatcatgtctgggaagttaactgctgagcagttgacaaaattcacactctatgctgaatggctaattttgtccacatggtggattggggacaactggtcctccctgatgcagtctgtcggagcaagtgaaaaagtttttcgtttaatggatctccttcctagcaagcagcttagctctgaaggcctcaagttagagaagttgaaagggcaaattcagtatgctgatgtatcattttcatatccatcaagacctacggtaccaattttgggaggcttgaatttaacactgaatccaaacgaagtagttgcaattgttggtcttagtggaagtggcaagagcactataatcaatttactacttagattatacgaacctacaaatgggcaaatactaattgatggtgtcccgctcactgagcttgatatcagatggttcagggaaagaattggtttcgtcggacaggaaccacgcttattccgaatggatatcagctctaatattaaatatggttgcccaagagatgtcagtcatgaagaagtgatatgggctgcaaagcaggcctatgctcatgacttcataatggctttgcctgatggttataacaccatcgttgatgatgctcttctcagtggaggtcagaaacaacgtgttgctattgccagggcccttctgagggacccatctatcttactgcttgatgaagccactagtgcgcttgatgctgagagtgaacattatgtcaagagcgtcatcacaaaagttagtcgagattcaaaggctaaaagaactgtggtaatcatagcacacaggctatctacaattcaaacagctgatagaattattgtgatggaaaatggtaatattgtggaggatggtaaacacattgatcttattgagaagggtggtctatattcaagattagccaggcgacaaaatgacgatctcaagtagccctggatcacagaatgtggtttagtgcacgccttctttttaaatggaatggcagaagggagagtcgtctgtcattagtgtattctttgcaagaactgacctggacccaggagctcgaataagctggcattgtttttcccatgaaccagaaacggtttgtgactgatcaaaataaaccaaaacggtttcccccacgaggacgagcacattaagcatcgagagcggcagtatggagaacagacttctaagaggtccagtattgtaaaagtagcttccataacaaagtgtatatgcgtttttatcttgttatcgggaactctgaaacttatcttacactacacacggaggaaacgctccaattttgttacgagcactgtgtgccttatttcctgaattttcgtgtaaaaatgtactccctgcgtcccaaaacagttgacgttataatatttatagttaaacttgtaacttaaattattagcaacataaattattataaaaatatatttaaagatctattgaaata

SEQ ID NO: 217553 - DNA, 2906 bp, Zea Mays
aaatcctaaaaattccaccaccaccgaaccgagcactttcgctacgcaaacacgcgcgtggaaaacaaaacggcacacaaattatttattttttttcctttttcgatcccagacacaacacaagactgaaaaagtcagcgaggaaggaaaaaaaaatctgcgaggcagcgcagccggacgaggaggaggaggtcaggactcaggaggagaggcgtcgcggactcgcggtggcagtgccgcgcacggcaacccaacccagctcagctccggcgaggacgcaaccgttgacgtcgctcttggcctcgcctcgttatttgaggtcgcgcggccgcgagccggggtccagatcgagtctcgcgcgaggtgtttcggcaccgcgaaatgccgcctccggctgcgatgctgctccttacggcggcctcggggcctcccacgctgtcgctgaccctggccgcgaggcgggcgccgctccgggccccaagccggcggaggctgcgggcgctgcggccggcgaggatccgcgccgccgcggcgatcggtggcgagttcggcggcctcggccggcgccgcgtcgtcgtgggagagttcatcgagcgcctgcgcaacgttctgcccgggggcagttggtggcgcctcgaggacggcgatgaggccggggacggggccggccgcgcagaggggagcggtaccaccgccgtgtccgcgctcaggcggatgtgggccctcgttgccggcgacagattggtcatctatgtcggcttcgcgtccctcgtcggcgctgcgctttcggagatcgccataccacatctccttgcagcgtccattttctctgcgcagaatggaggcgcggtgttctaccgaaatgccaagcttctggttgtcctatgtctggtttccggggtgtttagtggcatacgaagttgctgttttggtgttgcaaacatgatattggttaaacggatgagagaggagttatttgattccattctttcacaggatatttccttttttgatgaagaaacagtaggagatctgacaagtagacttggttcggactgccaacaagtgtctcgtgttataggcaatgaccttaacctgatttcacgcaatttacttcagggtgcaggtgcattaatttatctgctagtcttatcttggcctctcggattgtgtacaatgtttgtttgtgcaactctatcagcaattatgctagttcatggacggtttcagaaaagggcagctaaatttgcacaggagttcaccgcaaacgccaataatgttgctcaagaggtgataactttggttaggacagtgcgagtatatggaacagaaaagcaggagtttaaaagtggcttatggaggctggagcctgagcttgaactatctataccattctactcaggtcattggagtggtgattggaggcctagcaatcatgtctgggaagttaactgctgagcagttgacaaaattcacactctatgctgaatggctaattttgtccacatggtggattggggacaactggtcctccctgatgcagtctgtcggagcaagtgaaaaagtttttcgtttaatggatctccttcctagcaagcagcttagctctgaaggcctcaagttagagaagttgaaagggcaaattcagtatgctgatgtatcattttcatatccatcaagacctacggtaccaattttgggaggcttgaatttaacactgaatccaaacgaagtagttgcaattgttggtcttagtggaagtggcaagagcactataatcaatttactacttagattatacgaacctacaaatgggcaaatactaattgatggtgtcccgctcactgagcttgatatcagatggttcagggaaagaattggtttcgtcggacaggaaccacgcttattccgaatggatatcagctctaatattaaatatggttgcccaagagatgtcagtcatgaagaagtgatatgggctgcaaagcaggcctatgctcatgacttcataatggctttgcctgatggttataacaccatcgttgatgatgctcttctcagtggaggtcagaaacaacgtgttgctattgccagggcccttctgagggacccatctatcttactgcttgatgaagccactagtgcgcttgatgctgagagtgaacattatgtcaagagcgtcatcacaaaagttagtcgagattcaaaggctaaaagaactgtggtaatcatagcacacaggctatctacaattcaaacagctgatagaattattgtgatggaaaatggtaatattgtggaggatggtaaacacattgatcttattgagaagggtggtctatattcaagattagccaggcgacaaaatgacgatctcaagtagccctggatcacagaatgtggtttagtgcacgccttctttttaaatggaatggcagaagggagagtcgtctgtcattagtgtattctttgcaagaactgacctggacccaggagctcgaataagctggcattgtttttcccatgaaccagaaacggtttgtgactgatcaaaataaaccaaaacggtttcccccacgaggacgagcacattaagcatcgagagcggcagtatggagaacagacttctaagaggtccagtattgtaaaagtagcttccataacaaagtgtatatgcgtttttatcttgttatcgggaactctgaaacttatcttacactacacacggaggaaacgctccaattttgttacgagcactgtgtgccttatttcctgaattttcgtgtaaaaatgtactccctgcgtcccaaaacagttgacgttataatatttatagttaaacttgtaacttaaattattagcaacataaattattataaaaatatatttaaagatctattgaaata

SEQ ID NO: 217554 - DNA, 2949 bp, Zea Mays
aaatcctaaaaattccaccaccaccgaaccgagcactttcgctacgcaaacacgcgcgtggaaaacaaaacggcacacaaattatttattttttttcctttttcgatcccagacacaacacaagactgaaaaagtcagcgaggaaggaaaaaaaaatctgcgaggcagcgcagccggacgaggaggaggaggtcaggactcaggaggagaggcgtcgcggactcgcggtggcagtgccgcgcacggcaacccaacccagctcagctccggcgaggacgcaaccgttgacgtcgctcttggcctcgcctcgttatttgaggtcgcgcggccgcgagccggggtccagatcgagtctcgcgcgaggtgtttcggcaccgcgaaatgccgcctccggctgcgatgctgctccttacggcggcctcggggcctcccacgctgtcgctgaccctggccgcgaggcgggcgccgctccgggccccaagccggcggaggctgcgggcgctgcggccggcgaggatccgcgccgccgcggcgatcggtggcgagttcggcggcctcggccggcgccgcgtcgtcgtgggagagttcatcgagcgcctgcgcaacgttctgcccgggggcagttggtggcgcctcgaggacggcgatgaggccggggacggggccggccgcgcagaggggagcggtaccaccgccgtgtccgcgctcaggcggatgtgggccctcgttgccggcgacagattggtcatctatgtcggcttcgcgtccctcgtcggcgctgcgctttcggagatcgccataccacatctccttgcagcgtccattttctctgcgcagaatggaggcgcggtgttctaccgaaatgccaagcttctggttgtcctatgtctggtttccggggtgtttagtggcatacgaagttgctgttttggtgttgcaaacatgatattggttaaacggatgagagaggagttatttgattccattctttcacaggatatttccttttttgatgaagaaacagtaggagatctgacaagtagacttggttcggactgccaacaagtgtctcgtgttataggcaatgaccttaacctgatttcacgcaatttacttcaggtgcattaatttatctgctagtcttatcttggcctctcggattgtgtacaatgtttgtttgtgcaactctatcagcaattatgctagttcatggacggtttcagaaaagggcagctaaatttgcacaggagttcaccgcaaacgccaataatgttgctcaagaggtgataactttggttaggacagtgcgagtatatggaacagaaaagcaggagtttaaaaggtatgcaaactggcttgataagctgtatgatgtgagctttcggcagacagtggcttatggaggctggagcctgagcttgaactatctataccattctactcaggtcattggagtggtgattggaggcctagcaatcatgtctgggaagttaactgctgagcagttgacaaaattcacactctatgctgaatggctaattttgtccacatggtggattggggacaactggtcctccctgatgcagtctgtcggagcaagtgaaaaagtttttcgtttaatggatctccttcctagcaagcagcttagctctgaaggcctcaagttagagaagttgaaagggcaaattcagtatgctgatgtatcattttcatatccatcaagacctacggtaccaattttgggaggcttgaatttaacactgaatccaaacgaagtagttgcaattgttggtcttagtggaagtggcaagagcactataatcaatttactacttagattatacgaacctacaaatgggcaaatactaattgatggtgtcccgctcactgagcttgatatcagatggttcagggaaagaattggtttcgtcggacaggaaccacgcttattccgaatggatatcagctctaatattaaatatggttgcccaagagatgtcagtcatgaagaagtgatatgggctgcaaagcaggcctatgctcatgacttcataatggctttgcctgatggttataacaccatcgttgatgatgctcttctcagtggaggtcagaaacaacgtgttgctattgccagggcccttctgagggacccatctatcttactgcttgatgaagccactagtgcgcttgatgctgagagtgaacattatgtcaagagcgtcatcacaaaagttagtcgagattcaaaggctaaaagaactgtggtaatcatagcacacaggctatctacaattcaaacagctgatagaattattgtgatggaaaatggtaatattgtggaggatggtaaacacattgatcttattgagaagggtggtctatattcaagattagccaggcgacaaaatgacgatctcaagtagccctggatcacagaatgtggtttagtgcacgccttctttttaaatggaatggcagaagggagagtcgtctgtcattagtgtattctttgcaagaactgacctggacccaggagctcgaataagctggcattgtttttcccatgaaccagaaacggtttgtgactgatcaaaataaaccaaaacggtttcccccacgaggacgagcacattaagcatcgagagcggcagtatggagaacagacttctaagaggtccagtattgtaaaagtagcttccataacaaagtgtatatgcgtttttatcttgttatcgggaactctgaaacttatcttacactacacacggaggaaacgctccaattttgttacgagcactgtgtgccttatttcctgaattttcgtgtaaaaatgtactccctgcgtcccaaaacagttgacgttataatatttatagttaaacttgtaacttaaattattagcaacataaattattataaaaatatatttaaagatctattgaaata

SEQ ID NO: 217555 - DNA, 2085 bp, Zea Mays
cacatttgggagttgagaagttctcattggcatacgaagttgctgttttggtgttgcaaacatgatattggttaaacggatgagagaggagttatttgattccattctttcacaggatatttccttttttgatgaagaaacagtaggagatctgacaagtagacttggttcggactgccaacaagtgtctcgtgttataggcaatgaccttaacctgatttcacgcaatttacttcagggtgcaggtgcattaatttatctgctagtcttatcttggcctctcggattgtgtacaatgtttgtttgtgcaactctatcagcaattatgctagttcatggacggtttcagaaaagggcagctaaatttgcacaggagttcaccgcaaacgccaataatgttgctcaagaggtgataactttggttaggacagtgcgagtatatggaacagaaaagcaggagtttaaaaggtatgcaaactggcttgataagctgtatgatgtgagctttcggcagacagtggcttatggaggctggagcctgagcttgaactatctataccattctactcagctttgcgtaggtcattggagtggtgattggaggcctagcaatcatgtctgggaagttaactgctgagcagttgacaaaattcacactctatgctgaatggctaattttgtccacatggtggattggggacaactggtcctccctgatgcagtctgtcggagcaagtgaaaaagtttttcgtttaatggatctccttcctagcaagcagcttagctctgaaggcctcaagttagagaagttgaaagggcaaattcagtatgctgatgtatcattttcatatccatcaagacctacggtaccaattttgggaggcttgaatttaacactgaatccaaacgaagtagttgcaattgttggtcttagtggaagtggcaagagcactataatcaatttactacttagattatacgaacctacaaatgggcaaatactaattgatggtgtcccgctcactgagcttgatatcagatggttcagggaaagaattggtttcgtcggacaggaaccacgcttattccgaatggatatcagctctaatattaaatatggttgcccaagagatgtcagtcatgaagaagtgatatgggctgcaaagcaggcctatgctcatgacttcataatggctttgcctgatggttataacaccatcgttgatgatgctcttctcagtggaggtcagaaacaacgtgttgctattgccagggcccttctgagggacccatctatcttactgcttgatgaagccactagtgcgcttgatgctgagagtgaacattatgtcaagagcgtcatcacaaaagttagtcgagattcaaaggctaaaagaactgtggtaatcatagcacacaggctatctacaattcaaacagctgatagaattattgtgatggaaaatggtaatattgtggaggatggtaaacacattgatcttattgagaagggtggtctatattcaagattagccaggcgacaaaatgacgatctcaagtagccctggatcacagaatgtggtttagtgcacgccttctttttaaatggaatggcagaagggagagtcgtctgtcattagtgtattctttgcaagaactgacctggacccaggagctcgaataagctggcattgtttttcccatgaaccagaaacggtttgtgactgatcaaaataaaccaaaacggtttcccccacgaggacgagcacattaagcatcgagagcggcagtatggagaacagacttctaagaggtccagtattgtaaaagtagcttccataacaaagtgtatatgcgtttttatcttgttatcgggaactctgaaacttatcttacactacacacggaggaaacgctccaattttgttacgagcactgtgtgccttatttcctgaattttcgtgtaaaaatgtactccctgcgtcccaaaacagttgacgttataatatttatagttaaacttgtaacttaaattattagcaacataaattattataaaaatatatttaaagatctattgaaata

SEQ ID NO: 217556 - DNA, 2771 bp, Zea Mays
gtccataactcattctagaatttcattatcagctaaatagctcctagattttgtattggtttttgccagaatttcacaatctcaaaataggttgataatagaattcgtttgaattttgcgtagtatccaactcctcaaaatatatgggaaccaaacaccagattatttgtcatttgcgacaggtagcttggatccataccgtcaatcgcatcagatcgtgaatccctttcctcctaccgcgctagggttttgcaacggcctcaatggcgtccaccgccgccactgtcacgtttggcggcaagggcgccgccctatcgccggccgccgtctacgcgctctccatcggcctcgccgccccgggcatcgacccttcggcgcacaaggcgctctccacccgcgcgccctcgccacaggagacccccgcgccccttgccgccgcgctcccggcgctggcgcccgccgagtcccgcgccgccgcggccgtgttgctgaacaagctggtcctcactgcgtccgactctgcctccgcgctcgtcaccgccgccacggccgtcggcctcgcaggctcgctcgacctcgccgccgcgctgccgctcggctcccgggacgaggtcgcggtggcagcggcttccgcgcctgtcgcggtcgggctcgcagcgctggtcgactgctgcgccgcgccgctcgcccgcgttgccgacgccgtcgccgcgctgtcgtgcgaagccgtgcgcggggacgccgcggccttcgacgtgcaggcctccggcgacgggctctcctccaaggacgaggccgacgtcgctgccgacatcaaggtgctcgtcttcgggtccaagcttgtcggcgctgccgggggcgcccccgccgccgccacgttcgccaaggtgcccgcgctgaacgggatcttccgccaggcggttcgggcgctgcacgcccaagtgcgcatcgagctcaacgcgcctgtgaaattggggaagaaggatgccggtcaaaccgatgctgtgtcagtcttgaagggggtgtacaaccacttgctcaagttcagggactttctctcctgggaagcagctatggccatggcagtaattgaaacagacagttcaattgagaagccgcaatctgctgttgacaacgaagcagctggttcaagtgaaaaggcacaggctggtggggacaaagcaaagggtgacaagaagagcaagaagaagaaaactttggggaagggtacatctgctgtgctgatgctgcttagggaccatgtgacaaatggaagtactgttgcttccgtgaattctgtgcttgttgcagagtgggcagcctctctctcattgctctttgatcctaaatgtcccggattggtgtcccttgtggagaaagtgaaggagattgttgagagcaatgaagtcaggagattgcctaaaattcctaagggtacacgtgactttgggaaagagcaaatggcgataagagagcgagcattttcaattataactagtgtattcaagatgcacggtgctactgcacttgatacccctgtatttgagctgagagaaacccttatgggaaaatatggtgaagactcaaaattgatatatgacctggctgatcagcataagcgcactgaagagataccagattgcaaaagtatataggagagataatccatcaaagggaaggcacgtatgagataaaattaaatcacagaaagttgctggatggaatgttggagatttgtggtgtgcctcctcaaaagttcagaaccgtttgctcgagtattgacaagctggacaagcaaacattcgaacaggtgaagaaagaactggtggatgagaaaggtatatcaaatgaaactgcagatgaaattggcaatttagtgaagactagaggagcccccttggaagttttgatggagttgagaaaggatagcagcaagtttatgaataatgaagggtctgttgctgcactgaatgagctggagatattattcaaggctctggataaagcaaatgcaatagacaagatagtttttgatttaagtttggccagggggcttgattactacactggtgttatatatgaagccgtttttaagggttcagctcaggttggctccattgcagctggtggtcggtacgacaaccttgtgggtatgttcagcgggaagcaaatccccgctgttggtgtgagccttggaattgagagagtctttgcaatcatggagcaacaggagaaagaaagaaatgagaagatccggcctacagagacacaggtgctggtgtcaatcctgggaaaggaccttacactagctgcagagctcgcgagcgagctgtggaatgctgggttaaaggcagaattcaagctcactactagggtggcgaaccacatcaagtatgccttgcaatcaggcattccgtggatggtgctagtcggtgagtctgagttgcagaagggaagtgttaaattgaaggatgttgaagccaaccaggaagaagaggttgataggaaggattttgttcaagagctgaagaagagattgagtaaacccaacattcatttgaggcaaaatcaattacggcagaggcggagaatgatactgcagcattgtagtttaaagtgctggggatgtttttgttagattacccgtctagggtttggtgtcttccccatgtaattaccttctcacccctttgtaatggaccagccccaattacctaagtctattaataccacacccaaccctgattagggttagggtttttattccaact

SEQ ID NO: 217557 - DNA, 3043 bp, Zea Mays
ctctcattctctgagttctctctcctctccccaccttctctctcctctccccacgaaccgcgccaccttttctgacgccgcatcatcggcgacttcatcgccgtcgacaagacgcatcaaggcagtgcctgctactcccgcctccgcattcttgccccacggagcgtgctcctgctctcggccgccgtcctggtgctgaacagctgacacagccggagagatccgcccggcctcggatccgtttcttctcctgctggtgccttggtggtcaacatcatgatggctactttggggaggaagaagcggcaagccgcaacaaccttcatcgtgctttgcatcttgtcatccttctacatctgcaaagcgcagttcacgcctgcggacagctaccttgttgactgtgggtcctccaagagcacaatggttggccagaggaccttcacagcggatggcgcatctccggtgaaggtgtccacctcccaggatatacttgcgggcacctcagcaaacggggtggcctcttttgataactcggcgctgtaccagactgcccggatcttcaccgggccatcatcctacactttccctatccagaagcagggccggcatttcgtccggttttacttcttccccttcacctaccagagctatgatctttcacttgccaaatttactgtgtccacccaagatgttctcctgcttagtgacttccagcaaccagacaagaccgcacccttgttcaaggaatactcactgaatatcacccgcgacacgctcgtgatttccttcaagccgtcaaatggaattgcatttgtcaacgcaattgaggtggtctctgtcccagatgatctcatcaccgatgatgcacaaatggtcaaccctgtccagcagtacagtggtttgtctacacagccactggagacagtatatcgggttaacatgggtggtccgaaggtcactcctgacaatgataccctctcgaggacctgggtgactgatctaaagtacttgttgaacccatctgtgaccaaacaggttaattatggcaagcgtgtcaactataagaagggtggaggtggagctactcagctgtcagcccctgatattgtctatggcacagctacagagttggcagcgacaaatacatccaatgctcttttcaacatgacatggcagtttgatgtggatgctggcttcagctatttggtaaggtttcacttctgtgatattgtcagcaaggcacttaaccagctctacttcaatgcatatgttggaggcttttatgcacagaataatcttgatctgtcagcaatgtctgatagtcagttagctacacctatatatatagatgtggttctttcatctaatgatgcatccagcaaacttagcatcagcattggcccatcggtcttgaacaatgtattgcccgacgggattctgaatgggcttgaggttatgaagataagtaccggaggttctgctttcactgtcgggtctggcagtggaaacaaaaaatggggtgtgattcttggcgcagccctcggaggtgttggactgtttataattgttgttgttcttgtacttctttgccggaggaaaaagaccctggaaaagcagcattcaaagacctggatgcctttctctatcaatgggctcacctctctcagcacaggaagcagaacgtcttatggtactactctcacatcagggctgaatggaagctatggataccgttttgccttcagtgtgctccaagaagcaacaaacaatttcgacgagaactgggtcattggagttggaggctttggaaaggtctacaagggggtgatgagggatgagagcaaggttgcagtgaagcgtggaaacccaaagtctcagcaaggtctcaacgagttccgtacagagattgagctcctctcacgtctgcgccaccgccatttggtgtctctgattgggtactgtgatgaaaggaacgaaatgatcctggtctacgagtacatggagaaaggcactctcaagagccatctctatggctccgataacccctcgctcaattggaagcagaggctggaggtttgcatcggagcagcaagggggttgcactaccttcacactggatctgcgaaggccatcatccatcgtgatgtcaagtccgcaaacatcttgctcgacgagaacctcctcgccaaggtcgctgactttgggctatccaagactgggcctgagctcgaccaaactcatgtcagcactgcagtgaagggcagcttcgggtacctcgatcctgaatatttccggaggcagcagctgaccgagaagtcggatgtctactctttcggtgttgttttgcttgaggttctttgtgcaaggccagtgatcgaccccacgctgccgagggagatggtgaacctggccgagtgggggatgaagtggcagaagagaggagagctgcaccagatcatcgatcagaggatctcgggcacaatcaggccggactctctgaggaagtttggcgagaccgtggagaagtgcctggcagactacggcgtggagcggccgtcgatgggagacgtcctctggaacctggagtacgttctgcagcttcaggacgccgattcgacggtctcggatgtgaacagcatgaaccgtatcgtggaactcccgtcacaggtccagaacgtcggggccctcgagagcatcagcgtgacgatggcagaagccggagcgtcaaacgagcctgaccacgacctctccgatgtgtccatgagccgcgtcttctctcagctgatcaaggccgaggggaggtaaatgtgcgtgacgcagcctgtagggtgtgggtggtggggaggaagccttcaaagtcatctcttgctgaagtttacgtgagagagatcatgtgtgattttttttcttcttttcgtctacaaatgtactactgaagtgaactatggtttcgagttacagttttagccattgtgagcctgtgcggctacaaatttcgtagatagcacatttcgagtttgaatttgttactgggcgttgaata

SEQ ID NO: 217558 - DNA, 1660 bp, Zea Mays
ctctctcctctccccaccttctctctcctctccccacgaaccgcgccaccttttctgacgccgcatcatcggcgacttcatcgccgtcgacaagacgcatcaaggcagtgcctgctactcccgcctccgcattcttgccccacggagcgtgctcctgctctcggccgccgtcctggtgctgaacagctgacacagccggagagatccgcccggcctcggatccgtttcttctcctgctggtgccttggtgatgctgatgcggactcgggactcctacggagagctgaggtgaccttgttgagtgtgcccttacccagcgccgcctgcctccgagccgagatctcctccgcgcaccccggcattctctctctctgtctctggtgccgacgaccgcgcggccgaccccgccctacgccaggtgctcaggtctccatcttcgggaccttcgccggcgacgagcacccgcccaggtcaacatcatgatggctactttggggaggaagaagcggcaagccgcaacaaccttcatcgtgctttgcatcttgtcatccttctacatctgcaaagcgcagttcacgcctgcggacagctaccttgttgactgtgggtcctccaagagcacaatggttggccagaggaccttcacagcggatggcgcatctccggtgaaggtgtccacctcccaggatatacttgcgggcacctcagcaaacggggtggcctcttttgataactcggcgctgtaccagactgcccggatcttcaccgggccatcatcctacactttccctatccagaagcagggccggcatttcgtccggttttacttcttccccttcacctaccagagctatgatctttcacttgccaaatttactgtgtccacccaagatgttctcctgcttagtgacttccagcaaccagacaagaccgcacccttgttcaaggaatactcactgaatatcacccgcgacacgctcgtgatttccttcaagccgtcaaatggaattgcatttgtcaacgcaattgaggtggtctctgtcccagatgatctcatcaccgatgatgcacaaatggtcaaccctgtccagcagtacagtggtttgtctacacagccactggagacagtatatcgggttaacatgggtggtccgaaggtcactcctgacaatgataccctctcgaggacctgggtgactgatctaaagtacttgttgaacccatctgtgaccaaacaggttaattatggcaagcgtgtcaactataagaagggtggaggtggagctactcagctgtcagcccctgatattgtctatggcacagctacagagttggcagcgacaaatacatccaatgctcttttcaacatgacatggcagtttgatgtggatgctggcttcagctatttggggtaagcgtgtgcagcgacagcaaggcgcacctggacgtcggactcggcgacggcgacggcggcagcatgtgcagcgagcggctcgggccggaggacaggacagcagcgtgttctggcagctttcggttgtagcatgtgcatgtccattccccccaactcatcatcttctcgaatataatggttacaggtaactgttggtgcatctttttttttggtttccctatcacaaaaattgacattggaatgctc

SEQ ID NO: 217559 - DNA, 2623 bp, Zea Mays
gcaactctcccgtaaatctgcacaggcgcagcgcggcatttaatgctctccaacctttggtctctgcctgcccccaaacgctcccccattccgtccactcccctctctccccaccaagcaccagcccacggatgcggtcgcgaccaccgcggcaaggtcgaatccatggctagagctagcagaagcagaagcagaagccgcgggctcggcgcttgagccctcgatcctcgggggtcccggttccttctccctgcattgatcgcgtcactcgacgcgagaaggcgagcaaagaggggaaaaaaaggaggatcctttcccgtgtttcttctgtcgattctgcggttctttgcaagtggcaatgaggcggcatgggtggcagctcccgtaccaccctctccaggtggtggccgtgtccgtcttcctggcgctggcgttcgcgttctacgtcttcttcgcacccttcgtcgggaggaaagtgttccagtacgtggtcatggggctatacactccgctggtattatgtgtcttctttctatacatctggtgtgccgcagcaaacccagcagatccaggggtcttcaaatcaaagaagtatctgagcttgtacggaagcggcaaacacaagcatctgaaggaatccagaaagacttcttcagatgctcggttacaaatagagggaactagagaaaaacaagagcatgaggtcgcagcatctagcgagaggtcaattactcaatacaaggacaataatccatcttgcttgagttcaaccctctctccttctctccttctattctaccctctctcttttgttttctcctgctgccaaccacatgaaagttcctctgagcagcaagccaccgaggaagggatgtttttctgcagcctatgtgaagttcaggtgttgaagtatagtaagcattgcagagtttgtgacaaatgtgttgatggttttgatcatcactgcaggtggctcaacaattgcattggaagaagaaactatagaaggttttttattctaatgtcaactgccgttatcttggtctccatggtttgtgcaatttgggccagcttatcctacaatcagcaattggagtattggtgctagtgctatgctttgttgagcgaaaggaattctctatgcaaattgtttcaaagcttggaagcagcttctctgtagtgccttttgttattgtggtggcatcatgtaccatcctagccatggtcgcttcactgcctgttgctcaacttctttttttccacattcttctgatcaagaagggaatcagtacctatgactacatcattgccctgcgagagcaagagcaagatgatctgagtgggcagcagagtccacagatgtctcgtgtaagctcctacaccggactcagcagtgctagttcctttggtccacttcgtcgtggttcatggtgcactccgccaaggctgtttcttgaggatcagtttgatgttattccatcggaggctgcttcttcgcataattctgctacgaagaggaaagaagaccaggggaagaggaaaaagggctcaggggccgtgaaaataagcccatgggcattagctcgtcttaacgctgaagaagtttcgagggttgctgcagaggcacggaataagtccaaagttttagtgccaatcagaaaagatgactattcacgaggccacgaaacagatagtagctatggaggcaccagcagtggtaggatcgatctaggacccgatagcaagaggagaacaaacagaagaggaagacagcccagtgatctctttctcaaacctgttgcaaagatatctacagatgctattgattctgccagcagcgacatgtccaatttagcaccattgcaacttgaggcacggagcgccttccatcccagcagggctgcatcctctgtgaatgttggtgggtcatctccagatagcagcttggattcgcctgacctgcatctgtacagagtctcagctgtctcatcgtctggagccgaagacttgcagctgacagctctcactgctccaggaagcacttcacatcaagggattcaactgtcgagatcgaccagcgatgggtatgaagcgtcagggggtgaagacagcgaccgcattccgtcacagatagtgcaccgctcgtcaaactgggcaagcatcatcctcaactctgaccagagtgcgtcctcgtctggcattcttgtgccgaagaacagattgtcctgaattcagataaatgaagattgtaaatgatcaaccaagaacgggaggttccagtatctgagctttgttttcaatgtcgaatcttgttgcagggatggcttgatactgcgcaaatcattaatttttttattagtttctgaatcgctaggtaggcaagtgtctgaatttcttccgtggggtgttcaggtgcttgtaattttgctgtcagacgacaatgaactgatttgtttagaggttggtaccttggatcaaatgcctgattagttggtgattgttcttgtggttgacttgtcggctctgacggcatgtacttatatgctgcaataggcaacgagcattcagaaagtactacatccatcctagaaaaaaatgccattatagaagactgtaatatttt

SEQ ID NO: 217560 - DNA, 5416 bp, Zea Mays
ggaagagttaaagctaagcgaggagaaaggctgcagtaagcagaggaagaggcgtcccaatcccacggtgcctcgacctcgacctcgaccgcctcccgggctcccacgcccacccatccccaccaccggctccttgctgctgcgctccaccctccgccgcggagccctaggcggagctgcggatcccgagatccccggcgtcgccgccccggagctcgccgccggcggcgggcgcggcccccctcatgcctttggcgccccgatcggagccgacgaccggtggccgcctgaggaggcacagcagctcggcgggcgccggccgagaggcggcggcagcgggggcggaggaggagcaggaggagggggagggcgaggaggatggcgctcttccgcaagttcttcctcaagaagaccccggatcggctgctcgagatctccgaccgcgtctacgtgttcgactgctgcttctcgactgattccatgggtgaggatgagtaccgggattacttgagcggcattgttgcgcagttgcaggaattttttccggacgcatcatttatggtatccaatttttggtctggggacaaaagaagccgaatttcagacatattatctgagtatgacatgacagtaatggactacccacaacagtatgaagggtgtccattgcttcagcttgagatgatccaccatttcttgaaatcatgtgaaaattggctatcggtggaaggtcagcataatatgcttttgatgcattgtgagagagggggttggccagttcttgcattcatgttggctggactgcttttgtatcgcaaaacatacactggtgagcagaagacactagaaatggtctataagcaggctcgaagggactttatacaacagttttttcccttgaatcctcagccttcacatttgagatatttgcactatataacaagacaaggaggtggttcagaatggcctcctattagcagacccctcatcttggattcagtagttctccatgttgttccacggtttgacgtagatggtggttgtaggccatatttgcgtgtgcatgggcaagactcaagccccggtaacaagagtgcaaaagtcctttatgagatgccaaaaacaagcaagcatcttccacattatggacaggcagaagtccctataaaactaagtgtgttttgccgtgtttatggagatgtggtccttgaattcatccatattggcgataatatagagcataaggaaacaatgttccgcatcatgttcaacactgcattcgttcaatcaaacatccttgcgctgaatcgtgatgatattgatgttgcttggaatgtgaataatcagttcccaagggacttccgggctgaggtacatttttcggaccctgattcattcaaacctgctgctaccgtcgaggagatagctgatgatggagatgagactgatgttgcttcggtagacacaggagaggagttttatgaagcagaggaggattggcatgatgctagaaaagaccaagaaactcgatcaactgatggtggaatatcattagatgacgttgcagatggtggggtggcaactgaagaaaggagcagcctagaaaagcaccaattcaatgagggtgtgaagattggtgtctcccagaatttaggtagcatgaatgagaaaggggcaagtgcacctaccccaacttttgacaaccaggaaggtttgcagcagcctcgtgaagttcttgcaaatggtaaactaagcagcactaatggccaagagaacagtgatgtgcatgatatacaggtggttgctacatctgttgattcagagggacacaagtttggatctacctgtcaggaggacatgaaaggtgtaattgcacaaactttagtcaccacagttgatccaagttgcagtgatgaaattgaatgccaggctaatgaacaaacaaaaatatcggaataccctgatttggactacactgcttttggttctcctagaagtttgtcacgtacaaatggtgatacccacttgagaactacaaaaaatgaagggttgcagaacggtgatatcaagattatcactgagaacacaataagtatggacaacgatctagtgatctatgaagagaaaactatagttgtcaatggtaacactgtacaggaagtaaagaatattgtcaatgaaaagagcattgcagccaagatagacaaaccaattattgagagtaggaactcactgaacaacaacaatggcaagattcaaatcgctaaaccttctgatacatctaatggcaaattggatgggtgtagattagaatcttgccttgaggaagccctacctacaaagaaaaccactgtccatgacaggattgttgtcttaccagccactgatgtaggaactgagataaaaaccaagcaagaggggcttggtgacaagcaggattttgcacccccacccccacccccacctcttgcttcacgtgcaggtccaccaccacctccgcctcctccaggtgctcgctctggacctccacctcctccgccccctccaggtgcacgaccaggagctccaccaccaccacctcctccaggttcacggacaggagctccaccaccaccgcctcctccaggagctccacctcccccacccccacctggaggtggtggaagaggacctccaccacctcctgcacctagagggcatcttggtggtcctcctccacctccaccaccaagtggacgtgcaccaggtgtgccacctccacctagagcaccaggtgtgccgccaccaccaggaaataatccatccttaggcagaggacgtggggctgtacgccctctgggatcagcttatggggctgctgcctcacgtaagtcaacattgaagccattacactgggttaaagtgacaagggcccttcaaggtagtctgtgggaagaattgcagcgcaacgatgactcacagagtgtttcagagtttgatatatcagaacttgagagcctttttcctgcagctgttccgaagtccgatgacagctcaaaatctgaacgtagaaaatcacttggatcaaaaccagaaaaagtgcacctaattgagttgaggagggcgaataacacagagatcatgctaacaaaagttaagatgccactctcggatttggtgagtgcagctctggcgcttgatcaatctaccttggatgttgatcaagtggagaatctcataaagttctgtcctacaaaagaagaaatggaacttctcaaggacaataatccatcttgcttgagttcaaccctctctccttctctccttctattctaccctctctcttttgttttctcctgctgccaaccacatgaaagttcctctgagcagcaagccaccgaggaagggatgtttttctgcagcctatgtgaagttcaggtgttgaagtatagtaagcattgcagagtttgtgacaaatgtgttgatggttttgatcatcactgcaggtggctcaacaattgcattggaagaagaaactatagaaggttttttattctaatgtcaactgccgttatcttgcttatcctacaatcagcaattggagtattggtgctagtgctatgctttgttgagcgaaaggaattctctatgcaaattgtttcaaagcttggaagcagcttctctgtagtgccttttgttattgtggtggcatcatgtaccatcctagccatggtcgcttcactgcctgttgctcaacttctttttttccacattcttctgatcaagaagggaatcagtacctatgactacatcattgccctgcgagagcaagagcaagatgatctgagtgggcagcagagtccacagatgtctcgtgtaagctcctacaccggactcagcagtgctagttcctttggtccacttcgtcgtggttcatggtgcactccgccaaggctgtttcttgaggatcaggtgtgaaccgtacatccttaggcttcttgaattattaaacagataatgttcattcccaggctgactctttatttatatgtcacatgggtagtatatctggcgaatggaagttaagttggtcacttttctaacagtcatgctaactctgagtttctaactgataactaacactagtgtcttgcacatctaactggtagcaatttcacatataagactcatcatgagctgtacgtacgattaaaaaaaagaaacatttcacatctgccgattaactcactactgacatgaagttactgaatcttctagtttgatgttattccatcggaggctgcttcttcgcataattctgctacgaagaggaaagaagaccaggggaagaggaaaaagggctcaggggccgtgaaaataagcccatgggcattagctcgtcttaacgctgaagaagtttcgagggttgctgcagaggcacggaataagtccaaagttttagtgccaatcagaaaagatgactattcacgaggccacgaaacagatagtagctatggaggcaccagcagtggtaggatcgatctaggacccgatagcaagaggagaacaaacagaagaggaagacagcccagtgatctctttctcaaacctgttgcaaagatatctacagatgctattgattctgccagcagcgacatgtccaatttagcaccattgcaacttgaggcacggagcgccttccatcccagcagggctgcatcctctgtgaatgttggtgggtcatctccagatagcagcttggattcgcctgacctgcatctgtacagagtctcagctgtctcatcgtctggagccgaagacttgcagctgacagctctcactgctccaggaagcacttcacatcaagggattcaactgtcgagatcgaccagcgatgggtatgaagcgtcagggggtgaagacagcgaccgcattccgtcacagatagtgcaccgctcgtcaaactgggcaagcatcatcctcaactctgaccagagtgcgtcctcgtctggcattcttgtgccgaagaacagattgtcctgaattcagataaatgaagattgtaaatgatcaaccaagaacgggaggttccagtatctgagctttgttttcaatgtcgaatcttgttgcagggatggcttgatactgcgcaaatcattaatttttttattagtttctgaatcgctaggtaggcaagtgtctgaatttcttccgtggggtgttcaggtgcttgtaattttgctgtcagacgacaatgaactgatttgtttagaggttggtaccttggatcaaatgcctgattagttggtgattgttcttgtggttgacttgtcggctctgacggcatgtacttatatgctgcaataggcaacgagcattcagaaagtactacatccatcctagaaaaaaatgccattatagaagactgtaatatttt

SEQ ID NO: 217561 - DNA, 1642 bp, Zea Mays
aaccatttccccatttttggtacccggcaggggtactcgtttcggatgatgaacccatccggagccctgatggactcatcatcataagtttgctttcacttttgaatcaaaagcccataaccaatgttacacatcgttcttttaaaaaaacaaatgatttttgagtttctaagtaggactaagcagtaataattttttttaataaaacagggatttaggaattttcaaggaatggtaatgcatcaattgtttatcacacaactcctatcacctaatgcatcatatcaggtgataaagcatttaaaacgcaaggaaggggcaaatgcaccggggcttgccttattacaggaggaaatctgagatcttctattacgataagcagttagatggaatccaccactggatcagcagaactagaacatgctcctttcttgacaaatcacttcttcttggtactctgctctaacacgcggaaagccgatgaagcgagagaaccacatagagaaagtatgccgagcacaacggcttgctgggtatcaggaacagcgagactggcagctagcagctttacaatgacaccgcgagcacgacgaggtcggaagagaggctgtgggtcaaggaaatcgacgacgcgaaggagctgcgaggttgagcatggccgacgaggagataacaaccatgagtatgttgcagctcacaacatggatggggaactgcggcaagcacaacaaacaaggctgcacgacgagtgtcggcacggcgtggaagctgcaggacgacgtcggccctcacctcaccagcgaggtcggcggacggcaaagcgtggagttggaagacggtaccaggccggtgagctggaacgtgtgcgatggagcagcgacagatggtcggtcgagcgtgtgaggaagcagctcaaggcacggaagagcagcagcagcgcccaagccagcgtgagaagggagctcgcgtccgggctcagtatctgggagttgagcacaaggtacaaggcgaaggcgagtgctatgcgctatgcgtgagagttcaattggagcacgccgagagagagagagacgtgggagatttctagagagtgtacgtgtcacgtgtgcaccagataaaagagagaacgttgagagatgcagctggaatggataggaaggagcgcttgaattatctagacgagagaaatgatgtggagataaggaagagaataaagaatttcagagagagacgtttcagagagtggacgtctgcaccaaattgtatgccccaaactgatccaagtttcagctatcagcacctgaatcccacacttcttcgacagaacccccatcttaatccccttaaatctcacgattccaaatgataacagtgaaccgatcgtaacataaattgctctctcaacatccttctacatctttgcttcagaattcctagtccaaaaccccacggatttggtactatagacctccaaaattgagcacaaattcacaaaaactcagtttgcagctaactgaaccagagtccagaccatacccaactgacggaggatgtttaggtgcagtttactctcagatttgtacagcattaagcctatctctccttagaaaacttgctcaccttactttggtctccaagtttg

SEQ ID NO: 217562 - DNA, 5792 bp, Zea Mays
caccactcgctttcgtctcttccccctcttcccccaccttaccaaggcaccaacctcgctggcatgctcgccgtctctccctctccccctcctcgccttcctctcctcaccttaacccacctctgcgctttccctctcctcccacctcgacgccgcggcctctctcgcctccgcagccaccgcagtggcacccctctcgtcctgctccgcgcgcgcgcagtgcgtcacgctggtatcgtgatcgacatcgacgagatggtcgagaatgaggaccgtgacctacccgtggacgtatcgttcacgaggaggcttcctcccgcgctcactttcggtgacggcctcgacgcactgctgcgggccgccaacgaggtcaaggccaccccgcctgctggcgccaggagcggcgtgatcaggttcgaggtacttgttccacccagtacaaaggcacttaagtggtgctctcagtttagaggatcatcattgtttccccagttttatttatcaagggaactgaggtctgctccatcatgtcaacttgaaatctgtggcattggttccacaatctgctttcatggttcctacctaataaataatgaatttgatttggtatcaagatatatttcttctgattcacacttgataaaggcttatggattcgtagacatgaattatgacaaggaactaccatcaatagaggagaaacttgactcatattacttcttcatccctcaatttgagttgaacgagtttgatagttgttccatattatcatctaccctggtttgggatgattctatttctcatacgttcgaggacgcggtttctttatttaaatcttgttttgatcagatacaaaatagctatgattcttcagctagcatttcttacaaaggcttggtaccaagtcacatttctggagacgcacatttgtcagagactggaaatgctcagttggtgtatgtggatgcagaagtactagcctcaatagatgccaaaggtagtgtgcaaaagaagtttttgatatctgatcggtcatttgttagattttcgccacagttattctattattcaaacatggagttatatttgcaacacaacacgattgaatctttcatcaaagagttgctctaacataaatttggcatgggcatcccttatagttgaagaatgtgttaggctcggtttcacgtacttctgtatagctccagggtcaagatcatccccgcttgcactttctgctacaggccatcctttgacaaaatgcatatcatgttacgatgaacgttcacttggatttcatgctcttggctatgggagaggttctcgaaagccagcagtagtaatcacatcatcaggaaccgctgtatcaaatcttctcccttcggtggttgaggctagtcaagatttcataccaattatattactcacagctgaccgtcctcctgagttgcatgatgctggagctaaccaagccatcaatcaggtcaatcattttggtacctttgtaagatatttttttaacctccctccacctggagaccgaatcaatgcaagaatggtgctcactacacttgattcagcagcctactatgcaatgcaagcaccacaaggccccgtgcatataaactgtgcttttagagaaccactagattacactaatcaacattggaatgttgattgtttgctaggtttggataagtggtttaaaaatagtgaaccatatactaaatacgtaagaatgaaaacagtttctgcattgggtaattactcttgctcagtaatggaggtcctggagatcatagagaaggcagaacaagggcttcttttagtgggtgctattcatacggatgaagatatgtgggctgtagctttactagctaggcacctatcctggccagttgctacagacattctgtctggactgcgattgcggaaagttgtaaattcattaccagggcttgataagagcattttgtttatagaccacattgatcaaattctgttgtctgagtctgctaaaaactggatacgccctgatgtcattgttcagattggtagccgcattactagcaaacgagtgggaatgtttcttgagacttccttcccatcttcctacatattgatcgataggcatccatgtcgtcatgatccttcacatgttgttactcacagaatacaagctaatgtagcagaatttgctgctaggttgtgccggtgtacttttcaaaggaagagaagcagatggacagaatttttgaccattcttaattcagtggtttgtcaggagataatgtttcagatacatgcgaagtgctcacttacagaaccatatgttgctcatgtaattggggagtcactttatggtgatgctgtcatgtttgttgggaacagcatggtcatccgagacttagacatgtttggcaacggttggatggattacactacaaatggaaataatgtgatgacacatcattttccagattttgttggcactgtagtggctgggaacagaggagcaagtggtattgatggtttaatcagcacagcagtcggatttgctgttgggtcaaacaagcatgtattttgtgtggttggtgacatatcttttcttcatgatacaaatggattggcacttctcaatcaaagggcatggcggaaacctatgacaataattgttgtcaacaaccatggtggtgcaatcttcagccttctaccagttgcaaaaactacttcaccacaaattttggagaaattcttctacacctctcatgacatatcaatttccaaactatgtgctgcacacagggtaaaacattttctagttcaaacaaaagcagagcttcatgatgcgttggtgaaatccaatatggaacaggttgattgtgtggtagaaataaacaatagtattgatagcaatgccgagtttcataggttcatatccaaagtaaatttattttatctttttttataactgtgttctccatcatgtatttacatatttgtacaagttctgcaggttcatgagcatgttctctaactattctacaagtcagtatctgggctatcttctgggagttccacgttttaagaatgaggtagatgccatgcctgttgacagaattgatgcagtggaatacatgttgtacagaatccagctttctgcaccacgtacttcaggactatctgatggtagattcattcatgaaggatttgttctgaagcttcgtgtggaggataacattgtgggatttggttgcaccaatcgaaattcatgaagaggatctgttggatgtcgaagagcaaattagatatcttctccatagggtgaaagattctgtgctagatattattcccttactgagagggtccttttccaattggatatggacaagcctcggggttcctccttcttcgatattcccaagtgttaaatgcggtttggagatggctattcttaatttacttgcatcacaacggaaatgtagtttgttcaaagttctctctggttgtgacctgttctgccgagacgagaatgtggttgaatataatcagaacagttctgcaagcatacaaatttgtgcactcgtagattgcaatggctctccaatggaagtagcacttggtgtcgccaaactggttgctgaaggttttaccacatttaaactgaaggttgggcgccgtgaaagccccattgaggatgcaactgttcttcataaaataagagaagttgtggggtaccagatcaatatccgtgttgatgcaaatcagaaatggacatatgaacaggcagttgaatttggatccagggtacaaagtcttcatttggaatacattgaggaaccagtgagctctgtatatgatctcatcaagttctgtgaaaagaatgtcttgcctgttgcacttgatgagactattgacaaccttaggggggatgtaatttgtaagcttcatcaatttgttcatccaggaataattgctcttgttataaagcctagtgttgttggaggttttgagaatgcagctcatattgccaaatgggcgcagctacatgataagatggccgtcatcagtagcacgtatgagagttctataggtttggcatcctatatacagttagcacattatgttgaccaacagagctctatagtctccagaataagaaacaaagatacatgtagagccactgcacatggacttggaacatatcagtggttaagggaagatgtatcagaacaaaagttaaagatccatgcatccccacttggtgacggaatccgagccacagtagaagatgcccatggttatcttcaccatttaaacataaacaatgagaagataaaaagtacgtatggtgaagaaaaacataggtcatattctatccaagttgatgtggacgattgttcttatctagtcaaacttcgagaggctggtgatcatacaaatgaaaaggttgtccttttacttcatggatttcttggtacaagtgaagactgggttcccacgatgaaagctcttgcccccagtgcacgggtaattgcaattgatcttcctggtcatggcgagtcacagatactgcaacgtcacaaaaattcagaacaacctgctgtaacagttcaactagttgcagatttgttgttgaagttgatataccacataactaatggtgaggtggtggtggttggctattcaatgggtgcaaggattgcactccacatggcactaaatcaagatcacaagatccgtggagctgttacaatatcaggaagtcctggactgagagatgaagcaagcagaagacgccgtattgctattgataaatcaagagcccagttcctgatgtgttgtggacttgaatgttttcttcagacatggtactctggaaaactgtggaccagtctacgagagcatcctgagtttaattctctggtgaggacacgcagtaaacacaaaaacatcaaagctctagctaaggttcttgcagactcaagcgtggggagacaaaagtcccctgtgggaagacctgaagcacttgaagaggcctttactcgtcgttgctggtgaaaaggacgcaaagttcaaagacatctcgcagaaaatgcgcacggagataatgagccacgcagaatgcggatctgatggtcctaaagggaaggaactttgtgaagtgctcattatcccagatagcggccatgctgtgcatgttgagaaccctcttcctttggtgagagccgtgaggaagttcttactgaagctgtattgaggagaacatctgagtagaaccggtaaatggagcatcatgcaggtatattggtgtcctcacatatgcaggtgaagaaaggtttcaaattcgtgccgcccaagaagaactgaaatttggtctccgtctcgtccaatttgtcgtcgttggatcgttgcagtaactttttcccgtttggccttagtgttaatagcgtggctggtagatccaactggtgatgcctcttacgagggtttttgaaccccaatggactggcttccctttggtgattgtcagggttctgcatttcctagagataaattctcagcatgttcagacctggagtgccgtgccctttgtacaaggattccttttctagagttgtatgaaataaatgctcgctctcgagaagcggatttggtcaaaatctcactccactaccgagctgcggcgattcatcaagaagaccttcgtgccgatccctttgtgtaaataaaagtagcctcatctttctttgtcttgttgggatccgggaaccggccgactgtcgatcaag

SEQ ID NO: 217563 - DNA, 5712 bp, Zea Mays
caccactcgctttcgtctcttccccctcttcccccaccttaccaaggcaccaacctcgctggcatgctcgccgtctctccctctccccctcctcgccttcctctcctcaccttaacccacctctgcgctttccctctcctcccacctcgacgccgcggcctctctcgcctccgcagccaccgcagtggcacccctctcgtcctgctccgcgcgcgcgcagtgcgtcacgctggtatcgtgatcgacatcgacgagatggtcgagaatgaggaccgtgacctacccgtggacgtatcgttcacgaggaggcttcctcccgcgctcactttcggtgacggcctcgacgcactgctgcgggccgccaacgaggtcaaggccaccccgcctgctggcgccaggagcggcgtgatcaggttcgaggtacttgttccacccagtacaaaggcacttaagtggtgctctcagtttagaggatcatcattgtttccccagttttatttatcaagggaactgaggtctgctccatcatgtcaacttgaaatctgtggcattggttccacaatctgctttcatggttcctacctaataaataatgaatttgatttggtatcaagatatatttcttctgattcacacttgataaaggcttatggattcgtagacatgaattatgacaaggaactaccatcaatagaggagaaacttgactcatattacttcttcatccctcaatttgagttgaacgagtttgatagttgttccatattatcatctaccctggtttgggatgattctatttctcatacgttcgaggacgcggtttctttatttaaatcttgttttgatcagatacaaaatagctatgattcttcagctagcatttcttacaaaggcttggtaccaagtcacatttctggagacgcacatttgtcagagactggaaatgctcagttggtgtatgtggatgcagaagtactagcctcaatagatgccaaaggtagtgtgcaaaagaagtttttgatatctgatcggtcatttgttagattttcgccacagttattctattattcaaacatggagttatatttgcaacacaacacgattgaatctttcatcaaagagttgctctaacataaatttggcatgggcatcccttatagttgaagaatgtgttaggctcggtttcacgtacttctgtatagctccagggtcaagatcatccccgcttgcactttctgctacaggccatcctttgacaaaatgcatatcatgttacgatgaacgttcacttggatttcatgctcttggctatgggagaggttctcgaaagccagcagtagtaatcacatcatcaggaaccgctgtatcaaatcttctcccttcggtggttgaggctagtcaagatttcataccaattatattactcacagctgaccgtcctcctgagttgcatgatgctggagctaaccaagccatcaatcaggtcaatcattttggtacctttgtaagatatttttttaacctccctccacctggagaccgaatcaatgcaagaatggtgctcactacacttgattcagcagcctactatgcaatgcaagcaccacaaggccccgtgcatataaactgtgcttttagagaaccactagattacactaatcaacattggaatgttgattgtttgctaggtttggataagtggtttaaaaatagtgaaccatatactaaatacgtaagaatgaaaacagtttctgcattgggtaattactcttgctcagtaatggaggtcctggagatcatagagaaggcagaacaagggcttcttttagtgggtgctattcatacggatgaagatatgtgggctgtagctttactagctaggcacctatcctggccagttgctacagacattctgtctggactgcgattgcggaaagttgtaaattcattaccagggcttgataagagcattttgtttatagaccacattgatcaaattctgttgtctgagtctgctaaaaactggatacgccctgatgtcattgttcagattggtagccgcattactagcaaacgagtgggaatgtttcttgagacttccttcccatcttcctacatattgatcgataggcatccatgtcgtcatgatccttcacatgttgttactcacagaatacaagctaatgtagcagaatttgctgctaggttgtgccggtgtacttttcaaaggaagagaagcagatggacagaatttttgaccattcttaattcagtggtttgtcaggagataatgtttcagatacatgcgaagtgctcacttacagaaccatatgttgctcatgtaattggggagtcactttatggtgatgctgtcatgtttgttgggaacagcatggtcatccgagacttagacatgtttggcaacggttggatggattacactacaaatggaaataatgtgatgacacatcattttccagattttgttggcactgtagtggctgggaacagaggagcaagtggtattgatggtttaatcagcacagcagtcggatttgctgttgggtcaaacaagcatgtattttgtgtggttggtgacatatcttttcttcatgatacaaatggattggcacttctcaatcaaagggcatggcggaaacctatgacaataattgttgtcaacaaccatggtggtgcaatcttcagccttctaccagttgcaaaaactacttcaccacaaattttggagaaattcttctacacctctcatgacatatcaatttccaaactatgtgctgcacacagggtaaaacattttctagttcaaacaaaagcagagcttcatgatgcgttggtgaaatccaatatggaacaggttgattgtgtggtagaaataaacaatagtattgatagcaatgccgagtttcataggttcatgagcatgttctctaactattctacaagtcagtatctgggctatcttctgggagttccacgttttaagaatgaggtagatgccatgcctgttgacagaattgatgcagtggaatacatgttgtacagaatccagctttctgcaccacgtacttcaggactatctgatggtagattcattcatgaaggatttgttctgaagcttcgtgtggaggataacattgtgggatttggtgaggttgcaccaatcgaaattcatgaagaggatctgttggatgtcgaagagcaaattagatatcttctccatagggtgaaagattctgtgctagatattattcccttactgagagggtccttttccaattggatatggacaagcctcggggttcctccttcttcgatattcccaagtgttaaatgcggtttggagatggctattcttaatttacttgcatcacaacggaaatgtagtttgttcaaagttctctctggttgtgacctgttctgccgagacgagaatgtggttgaatataatcagaacagttctgcaagcatacaaatttgtgcactcgtagattgcaatggctctccaatggaagtagcacttggtgtcgccaaactggttgctgaaggttttaccacatttaaactgaaggttgggcgccgtgaaagccccattgaggatgcaactgttcttcataaaataagagaagttgtggggtaccagatcaatatccgtgttgatgcaaatcagaaatggacatatgaacaggcagttgaatttggatccagggtacaaagtcttcatttggaatacattgaggaaccagtgagctctgtatatgatctcatcaagttctgtgaaaagaatgtcttgcctgttgcacttgatgagactattgacaaccttaggggggatgtaatttgtaagcttcatcaatttgttcatccaggaataattgctcttgttataaagcctagtgttgttggaggttttgagaatgcagctcatattgccaaatgggcgcagctacatgataagatggccgtcatcagtagcacgtatgagagttctataggtttggcatcctatatacagttagcacattatgttgaccaacagagctctatagtctccagaataagaaacaaagatacatgtagagccactgcacatggacttggaacatatcagtggttaagggaagatgtatcagaacaaaagttaaagatccatgcatccccacttggtgacggaatccgagccacagtagaagatgcccatggttatcttcaccatttaaacataaacaatgagaagataaaaagtacgtatggtgaagaaaaacataggtcatattctatccaagttgatgtggacgattgttcttatctagtcaaacttcgagaggctggtgatcatacaaatgaaaaggttgtccttttacttcatggatttcttggtacaagtgaagactgggttcccacgatgaaagctcttgcccccagtgcacgggtaattgcaattgatcttcctggtcatggcgagtcacagatactgcaacgtcacaaaaattcagaacaacctgctgtaacagttcaactagttgcagatttgttgttgaagttgatataccacataactaatggtgaggtggtggtggttggctattcaatgggtgcaaggattgcactccacatggcactaaatcaagatcacaagatccgtggagctgttacaatatcaggaagtcctggactgagagatgaagcaagcagaagacgccgtattgctattgataaatcaagagcccagttcctgatgtgttgtggacttgaatgttttcttcagacatggtactctggaaaactgtggaccagtctacgagagcatcctgagtttaattctctggtgaggacacgcagtaaacacaaaaacatcaaagctctagctaaggttcttgcagactcaagcgtggggagacaaaagtcccctgtgggaagacctgaagcacttgaagaggcctttactcgtcgttgctggtgaaaaggacgcaaagttcaaagacatctcgcagaaaatgcgcacggagataatgagccacgcagaatgcggatctgatggtcctaaagggaaggaactttgtgaagtgctcattatcccagatagcggccatgctgtgcatgttgagaaccctcttcctttggtgagagccgtgaggaagttcttactgaagctgtattgaggagaacatctgagtagaaccggtaaatggagcatcatgcaggtatattggtgtcctcacatatgcaggtgaagaaaggtttcaaattcgtgccgcccaagaagaactgaaatttggtctccgtctcgtccaatttgtcgtcgttggatcgttgcagtaactttttcccgtttggccttagtgttaatagcgtggctggtagatccaactggtgatgcctcttacgagggtttttgaaccccaatggactggcttccctttggtgattgtcagggttctgcatttcctagagataaattctcagcatgttcagacctggagtgccgtgccctttgtacaaggattccttttctagagttgtatgaaataaatgctcgctctcgagaagcggatttggtcaaaatctcactccactaccgagctgcggcgattcatcaagaagaccttcgtgccgatccctttgtgtaaataaaagtagcctcatctttctttgtcttgttgggatccgggaaccggccgactgtcgatcaag

SEQ ID NO: 217564 - DNA, 5700 bp, Zea Mays
ctcgctttcgtctcttccccctcttcccccaccttaccaaggcaccaacctcgctggcatgctcgccgtctctccctctccccctcctcgccttcctctcctcaccttaacccacctctgcgctttccctctcctcccacctcgacgccgcggcctctctcgcctccgcagccaccgcagtggcacccctctcgtcctgctccgcgcgcgcgcagtgcgtcacgctggtatcgtgatcgacatcgacgagatggtcgagaatgaggaccgtgacctacccgtggacgtatcgttcacgaggaggcttcctcccgcgctcactttcggtgacggcctcgacgcactgctgcgggccgccaacgaggtcaaggccaccccgcctgctggcgccaggagcggcgtgatcaggttcgaggtacttgttccacccagtacaaaggcacttaagtggtgctctcagtttagaggatcatcattgtttccccagttttatttatcaagggaactgaggtctgctccatcatgtcaacttgaaatctgtggcattggttccacaatctgctttcatggttcctacctaataaataatgaatttgatttggtatcaagatatatttcttctgattcacacttgataaaggcttatggattcgtagacatgaattatgacaaggaactaccatcaatagaggagaaacttgactcatattacttcttcatccctcaatttgagttgaacgagtttgatagttgttccatattatcatctaccctggtttgggatgattctatttctcatacgttcgaggacgcggtttctttatttaaatcttgttttgatcagatacaaaatagctatgattcttcagctagcatttcttacaaaggcttggtaccaagtcacatttctggagacgcacatttgtcagagactggaaatgctcagttggtgtatgtggatgcagaagtactagcctcaatagatgccaaaggtagtgtgcaaaagaagtttttgatatctgatcggtcatttgttagattttcgccacagttattctattattcaaacatggagttatatttgcaacacaacacgattgaatctttcatcaaagagttgctctaacataaatttggcatgggcatcccttatagttgaagaatgtgttaggctcggtttcacgtacttctgtatagctccagggtcaagatcatccccgcttgcactttctgctacaggccatcctttgacaaaatgcatatcatgttacgatgaacgttcacttggatttcatgctcttggctatgggagaggttctcgaaagccagcagtagtaatcacatcatcaggaaccgctgtatcaaatcttctcccttcggtggttgaggctagtcaagatttcataccaattatattactcacagctgaccgtcctcctgagttgcatgatgctggagctaaccaagccatcaatcaggtcaatcattttggtacctttgtaagatatttttttaacctccctccacctggagaccgaatcaatgcaagaatggtgctcactacacttgattcagcagcctactatgcaatgcaagcaccacaaggccccgtgcatataaactgtgcttttagagaaccactagattacactaatcaacattggaatgttgattgtttgctaggtttggataagtggtttaaaaatagtgaaccatatactaaatacgtaagaatgaaaacagtttctgcattgggtaattactcttgctcagtaatggaggtcctggagatcatagagaaggcagaacaagggcttcttttagtgggtgctattcatacggatgaagatatgtgggctgtagctttactagctaggcacctatcctggccagttgctacagacattctgtctggactgcgattgcggaaagttgtaaattcattaccagggcttgataagagcattttgtttatagaccacattgatcaaattctgttgtctgagtctgctaaaaactggatacgccctgatgtcattgttcagattggtagccgcattactagcaaacgagtgggaatgtttcttgagacttccttcccatcttcctacatattgatcgataggcatccatgtcgtcatgatccttcacatgttgttactcacagaatacaagctaatgtagcagaatttgctgctaggttgtgccggtgtacttttcaaaggaagagaagcagatggacagaatttttgaccattcttaattcagtggtttgtcaggagataatgtttcagatacatgcgaagtgctcacttacagaaccatatgttgctcatgtaattggggagtcactttatggtgatgctgtcatgtttgttgggaacagcatggtcatccgagacttagacatgtttggcaacggttggatggattacactacaaatggaaataatgtgatgacacatcattttccagattttgttggcactgtagtggctgggaacagaggagcaagtggtattgatggtttaatcagcacagcagtcggatttgctgttgggtcaaacaagcatgtattttgtgtggttggtgacatatcttttcttcatgatacaaatggattggcacttctcaatcaaagggcatggcggaaacctatgacaataattgttgtcaacaaccatggtggtgcaatcttcagccttctaccagttgcaaaaactacttcaccacaaattttggagaaattcttctacacctctcatgacatatcaatttccaaactatgtgctgcacacagggtaaaacattttctagttcaaacaaaagcagagcttcatgatgcgttggtgaaatccaatatggaacaggttgattgtgtggtagaaataaacaatagtattgatagcaatgccgagtttcataggttcatgagcatgttctctaactattctacaagtcagtatctgggctatcttctgggagttccacgttttaagaatgaggtagatgccatgcctgttgacagaattgatgcagtggaatacatgttgtacagctttctgcaccacgtacttcaggactatctgatggtagattcattcatgaaggatttgttctgaagcttcgtgtggaggataacattgtgggatttggtgaggttgcaccaatcgaaattcatgaagaggatctgttggatgtcgaagagcaaattagatatcttctccatagggtgaaagattctgtgctagatattattcccttactgagagggtccttttccaattggatatggacaagcctcggggttcctccttcttcgatattcccaagtgttaaatgcggtttggagatggctattcttaatttacttgcatcacaacggaaatgtagtttgttcaaagttctctctggttgtgacctgttctgccgagacgagaatgtggttgaatataatcagaacagttctgcaagcatacaaatttgtgcactcgtagattgcaatggctctccaatggaagtagcacttggtgtcgccaaactggttgctgaaggttttaccacatttaaactgaaggttgggcgccgtgaaagccccattgaggatgcaactgttcttcataaaataagagaagttgtggggtaccagatcaatatccgtgttgatgcaaatcagaaatggacatatgaacaggcagttgaatttggatccagggtacaaagtcttcatttggaatacattgaggaaccagtgagctctgtatatgatctcatcaagttctgtgaaaagaatgtcttgcctgttgcacttgatgagactattgacaaccttaggggggatgtaatttgtaagcttcatcaatttgttcatccaggaataattgctcttgttataaagcctagtgttgttggaggttttgagaatgcagctcatattgccaaatgggcgcagctacatgataagatggccgtcatcagtagcacgtatgagagttctataggtttggcatcctatatacagttagcacattatgttgaccaacagagctctatagtctccagaataagaaacaaagatacatgtagagccactgcacatggacttggaacatatcagtggttaagggaagatgtatcagaacaaaagttaaagatccatgcatccccacttggtgacggaatccgagccacagtagaagatgcccatggttatcttcaccatttaaacataaacaatgagaagataaaaagtacgtatggtgaagaaaaacataggtcatattctatccaagttgatgtggacgattgttcttatctagtcaaacttcgagaggctggtgatcatacaaatgaaaaggttgtccttttacttcatggatttcttggtacaagtgaagactgggttcccacgatgaaagctcttgcccccagtgcacgggtaattgcaattgatcttcctggtcatggcgagtcacagatactgcaacgtcacaaaaattcagaacaacctgctgtaacagttcaactagttgcagatttgttgttgaagttgatataccacataactaatggtgaggtggtggtggttggctattcaatgggtgcaaggattgcactccacatggcactaaatcaagatcacaagatccgtggagctgttacaatatcaggaagtcctggactgagagatgaagcaagcagaagacgccgtattgctattgataaatcaagagcccagttcctgatgtgttgtggacttgaatgttttcttcagacatggtactctggaaaactgtggaccagtctacgagagcatcctgagtttaattctctggtgaggacacgcagtaaacacaaaaacatcaaagctctagctaaggttcttgcagactcaagcgtggggagacaaaagtcccctgtgggaagacctgaagcacttgaagaggcctttactcgtcgttgctggtgaaaaggacgcaaagttcaaagacatctcgcagaaaatgcgcacggagataatgagccacgcagaatgcggatctgatggtcctaaagggaaggaactttgtgaagtgctcattatcccagatagcggccatgctgtgcatgttgagaaccctcttcctttggtgagagccgtgaggaagttcttactgaagctgtattgaggagaacatctgagtagaaccggtaaatggagcatcatgcaggtatattggtgtcctcacatatgcaggtgaagaaaggtttcaaattcgtgccgcccaagaagaactgaaatttggtctccgtctcgtccaatttgtcgtcgttggatcgttgcagtaactttttcccgtttggccttagtgttaatagcgtggctggtagatccaactggtgatgcctcttacgagggtttttgaaccccaatggactggcttccctttggtgattgtcagggttctgcatttcctagagataaattctcagcatgttcagacctggagtgccgtgccctttgtacaaggattccttttctagagttgtatgaaataaatgctcgctctcgagaagcggatttggtcaaaatctcactccactaccgagctgcggcgattcatcaagaagaccttcgtgccgatccctttgtgtaaataaaagtagcctcatctttctttgtcttgttgggatccgggaaccggccgactgtcgatcaag

SEQ ID NO: 217565 - DNA, 5652 bp, Zea Mays
ctcgctttcgtctcttccccctcttcccccaccttaccaaggcaccaacctcgctggcatgctcgccgtctctccctctccccctcctcgccttcctctcctcaccttaacccacctctgcgctttccctctcctcccacctcgacgccgcggcctctctcgcctccgcagccaccgcagtggcacccctctcgtcctgctccgcgcgcgcgcagtgcgtcacgctggtatcgtgatcgacatcgacgagatggtcgagaatgaggaccgtgacctacccgtggacgtatcgttcacgaggaggcttcctcccgcgctcactttcggtgacggcctcgacgcactgctgcgggccgccaacgaggtcaaggccaccccgcctgctggcgccaggagcggcgtgatcaggttcgaggtacttgttccacccagtacaaaggcacttaagtggtgctctcagtttagaggatcatcattgtttccccagttttatttatcaagggaactgaggtctgctccatcatgtcaacttgaaatctgtggcattggttccacaatctgctttcatggttcctacctaataaataatgaatttgatttggtatcaagatatatttcttctgattcacacttgataaaggcttatggattcgtagacatgaattatgacaaggaactaccatcaatagaggagaaacttgactcatattacttcttcatccctcaatttgagttgaacgagtttgatagttgttccatattatcatctaccctggtttgggatgattctatttctcatacgttcgaggacgcggtttctttatttaaatcttgttttgatcagatacaaaatagctatgattcttcagctagcatttcttacaaaggcttggtaccaagtcacatttctggagacgcacatttgtcagagactggaaatgctcagttggtgtatgtggatgcagaagtactagcctcaatagatgccaaaggtagtgtgcaaaagaagtttttgatatctgatcggtcatttgttagattttcgccacagttattctattattcaaacatggagttatatttgcaacacaacacgattgaatctttcatcaaagagttgctctaacataaatttggcatgggcatcccttatagttgaagaatgtgttaggctcggtttcacggccatcctttgacaaaatgcatatcatgttacgatgaacgttcacttggatttcatgctcttggctatgggagaggttctcgaaagccagcagtagtaatcacatcatcaggaaccgctgtatcaaatcttctcccttcggtggttgaggctagtcaagatttcataccaattatattactcacagctgaccgtcctcctgagttgcatgatgctggagctaaccaagccatcaatcaggtcaatcattttggtacctttgtaagatatttttttaacctccctccacctggagaccgaatcaatgcaagaatggtgctcactacacttgattcagcagcctactatgcaatgcaagcaccacaaggccccgtgcatataaactgtgcttttagagaaccactagattacactaatcaacattggaatgttgattgtttgctaggtttggataagtggtttaaaaatagtgaaccatatactaaatacgtaagaatgaaaacagtttctgcattgggtaattactcttgctcagtaatggaggtcctggagatcatagagaaggcagaacaagggcttcttttagtgggtgctattcatacggatgaagatatgtgggctgtagctttactagctaggcacctatcctggccagttgctacagacattctgtctggactgcgattgcggaaagttgtaaattcattaccagggcttgataagagcattttgtttatagaccacattgatcaaattctgttgtctgagtctgctaaaaactggatacgccctgatgtcattgttcagattggtagccgcattactagcaaacgagtgggaatgtttcttgagacttccttcccatcttcctacatattgatcgataggcatccatgtcgtcatgatccttcacatgttgttactcacagaatacaagctaatgtagcagaatttgctgctaggttgtgccggtgtacttttcaaaggaagagaagcagatggacagaatttttgaccattcttaattcagtggtttgtcaggagataatgtttcagatacatgcgaagtgctcacttacagaaccatatgttgctcatgtaattggggagtcactttatggtgatgctgtcatgtttgttgggaacagcatggtcatccgagacttagacatgtttggcaacggttggatggattacactacaaatggaaataatgtgatgacacatcattttccagattttgttggcactgtagtggctgggaacagaggagcaagtggtattgatggtttaatcagcacagcagtcggatttgctgttgggtcaaacaagcatgtattttgtgtggttggtgacatatcttttcttcatgatacaaatggattggcacttctcaatcaaagggcatggcggaaacctatgacaataattgttgtcaacaaccatggtggtgcaatcttcagccttctaccagttgcaaaaactacttcaccacaaattttggagaaattcttctacacctctcatgacatatcaatttccaaactatgtgctgcacacagggtaaaacattttctagttcaaacaaaagcagagcttcatgatgcgttggtgaaatccaatatggaacaggttgattgtgtggtagaaataaacaatagtattgatagcaatgccgagtttcataggttcatgagcatgttctctaactattctacaagtcagtatctgggctatcttctgggagttccacgttttaagaatgaggtagatgccatgcctgttgacagaattgatgcagtggaatacatgttgtacagaatccagctttctgcaccacgtacttcaggactatctgatggtagattcattcatgaaggatttgttctgaagcttcgtgtggaggataacattgtgggatttggtgaggttgcaccaatcgaaattcatgaagaggatctgttggatgtcgaagagcaaattagatatcttctccatagggtgaaagattctgtgctagatattattcccttactgagagggtccttttccaattggatatggacaagcctcggggttcctccttcttcgatattcccaagtgttaaatgcggtttggagatggctattcttaatttacttgcatcacaacggaaatgtagtttgttcaaagttctctctggttgtgacctgttctgccgagacgagaatgtggttgaatataatcagaacagttctgcaagcatacaaatttgtgcactcgtagattgcaatggctctccaatggaagtagcacttggtgtcgccaaactggttgctgaaggttttaccacatttaaactgaaggttgggcgccgtgaaagccccattgaggatgcaactgttcttcataaaataagagaagttgtggggtaccagatcaatatccgtgttgatgcaaatcagaaatggacatatgaacaggcagttgaatttggatccagggtacaaagtcttcatttggaatacattgaggaaccagtgagctctgtatatgatctcatcaagttctgtgaaaagaatgtcttgcctgttgcacttgatgagactattgacaaccttaggggggatgtaatttgtaagcttcatcaatttgttcatccaggaataattgctcttgttataaagcctagtgttgttggaggttttgagaatgcagctcatattgccaaatgggcgcagctacatgataagatggccgtcatcagtagcacgtatgagagttctataggtttggcatcctatatacagttagcacattatgttgaccaacagagctctatagtctccagaataagaaacaaagatacatgtagagccactgcacatggacttggaacatatcagtggttaagggaagatgtatcagaacaaaagttaaagatccatgcatccccacttggtgacggaatccgagccacagtagaagatgcccatggttatcttcaccatttaaacataaacaatgagaagataaaaagtacgtatggtgaagaaaaacataggtcatattctatccaagttgatgtggacgattgttcttatctagtcaaacttcgagaggctggtgatcatacaaatgaaaaggttgtccttttacttcatggatttcttggtacaagtgaagactgggttcccacgatgaaagctcttgcccccagtgcacgggtaattgcaattgatcttcctggtcatggcgagtcacagatactgcaacgtcacaaaaattcagaacaacctgctgtaacagttcaactagttgcagatttgttgttgaagttgatataccacataactaatggtgaggtggtggtggttggctattcaatgggtgcaaggattgcactccacatggcactaaatcaagatcacaagatccgtggagctgttacaatatcaggaagtcctggactgagagatgaagcaagcagaagacgccgtattgctattgataaatcaagagcccagttcctgatgtgttgtggacttgaatgttttcttcagacatggtactctggaaaactgtggaccagtctacgagagcatcctgagtttaattctctggtgaggacacgcagtaaacacaaaaacatcaaagctctagctaaggttcttgcagactcaagcgtggggagacaaaagtcccctgtgggaagacctgaagcacttgaagaggcctttactcgtcgttgctggtgaaaaggacgcaaagttcaaagacatctcgcagaaaatgcgcacggagataatgagccacgcagaatgcggatctgatggtcctaaagggaaggaactttgtgaagtgctcattatcccagatagcggccatgctgtgcatgttgagaaccctcttcctttggtgagagccgtgaggaagttcttactgaagctgtattgaggagaacatctgagtagaaccggtaaatggagcatcatgcaggtatattggtgtcctcacatatgcaggtgaagaaaggtttcaaattcgtgccgcccaagaagaactgaaatttggtctccgtctcgtccaatttgtcgtcgttggatcgttgcagtaactttttcccgtttggccttagtgttaatagcgtggctggtagatccaactggtgatgcctcttacgagggtttttgaaccccaatggactggcttccctttggtgattgtcagggttctgcatttcctagagataaattctcagcatgttcagacctggagtgccgtgccctttgtacaaggattccttttctagagttgtatgaaataaatgctcgctctcgagaagcggatttggtcaaaatctcactccactaccgagctgcggcgattcatcaagaagaccttcgtgccgatccctttgtgtaaataaaagtagcctcatctttctttgtcttgttgggatccgggaaccggccgactgtcgatcaag

SEQ ID NO: 217566 - DNA, 5664 bp, Zea Mays
ctcgctttcgtctcttccccctcttcccccaccttaccaaggcaccaacctcgctggcatgctcgccgtctctccctctccccctcctcgccttcctctcctcaccttaacccacctctgcgctttccctctcctcccacctcgacgccgcggcctctctcgcctccgcagccaccgcagtggcacccctctcgtcctgctccgcgcgcgcgcagtgcgtcacgctggtatcgtgatcgacatcgacgagatggtcgagaatgaggaccgtgacctacccgtggacgtatcgttcacgaggaggcttcctcccgcgctcactttcggtgacggcctcgacgcactgctgcgggccgccaacgaggtcaaggccaccccgcctgctggcgccaggagcggcgtgatcaggttcgaggtacttgttccacccagtacaaaggcacttaagtggtgctctcagtttagaggatcatcattgtttccccagttttatttatcaagggaactgaggtctgctccatcatgtcaacttgaaatctgtggcattggttccacaatctgctttcatggttcctacctaataaataatgaatttgatttggtatcaagatatatttcttctgattcacacttgataaaggcttatggattcgtagacatgaattatgacaaggaactaccatcaatagaggagaaacttgactcatattacttcttcatccctcaatttgagttgaacgagtttgatagttgttccatattatcatctaccctggtttgggatgattctatttctcatacgttcgaggacgcggtttctttatttaaatcttgttttgatcagatacaaaatagctatgattcttcagctagcatttcttacaaaggcttggtaccaagtcacatttctggagacgcacatttgtcagagactggaaatgctcagttggtgtatgtggatgcagaagtactagcctcaatagatgccaaaggtagtgtgcaaaaggtatccccttaaccttgaagtttttgatatctgatcggtcatttgttagattttcgccacagttattctattattcaaacatggagttatatttgcaacacaacacgattgaatctttcatcaaagagttgctctaacataaatttggcatgggcatcccttatagttgaagaatgtgttaggctcggtttcacggccatcctttgacaaaatgcatatcatgttacgatgaacgttcacttggatttcatgctcttggctatgggagaggttctcgaaagccagcagtagtaatcacatcatcaggaaccgctgtatcaaatcttctcccttcggtggttgaggctagtcaagatttcataccaattatattactcacagctgaccgtcctcctgagttgcatgatgctggagctaaccaagccatcaatcaggtcaatcattttggtacctttgtaagatatttttttaacctccctccacctggagaccgaatcaatgcaagaatggtgctcactacacttgattcagcagcctactatgcaatgcaagcaccacaaggccccgtgcatataaactgtgcttttagagaaccactagattacactaatcaacattggaatgttgattgtttgctaggtttggataagtggtttaaaaatagtgaaccatatactaaatacgtaagaatgaaaacagtttctgcattgggtaattactcttgctcagtaatggaggtcctggagatcatagagaaggcagaacaagggcttcttttagtgggtgctattcatacggatgaagatatgtgggctgtagctttactagctaggcacctatcctggccagttgctacagacattctgtctggactgcgattgcggaaagttgtaaattcattaccagggcttgataagagcattttgtttatagaccacattgatcaaattctgttgtctgagtctgctaaaaactggatacgccctgatgtcattgttcagattggtagccgcattactagcaaacgagtgggaatgtttcttgagacttccttcccatcttcctacatattgatcgataggcatccatgtcgtcatgatccttcacatgttgttactcacagaatacaagctaatgtagcagaatttgctgctaggttgtgccggtgtacttttcaaaggaagagaagcagatggacagaatttttgaccattcttaattcagtggtttgtcaggagataatgtttcagatacatgcgaagtgctcacttacagaaccatatgttgctcatgtaattggggagtcactttatggtgatgctgtcatgtttgttgggaacagcatggtcatccgagacttagacatgtttggcaacggttggatggattacactacaaatggaaataatgtgatgacacatcattttccagattttgttggcactgtagtggctgggaacagaggagcaagtggtattgatggtttaatcagcacagcagtcggatttgctgttgggtcaaacaagcatgtattttgtgtggttggtgacatatcttttcttcatgatacaaatggattggcacttctcaatcaaagggcatggcggaaacctatgacaataattgttgtcaacaaccatggtggtgcaatcttcagccttctaccagttgcaaaaactacttcaccacaaattttggagaaattcttctacacctctcatgacatatcaatttccaaactatgtgctgcacacagggtaaaacattttctagttcaaacaaaagcagagcttcatgatgcgttggtgaaatccaatatggaacaggttgattgtgtggtagaaataaacaatagtattgatagcaatgccgagtttcataggttcatgagcatgttctctaactattctacaagtcagtatctgggctatcttctgggagttccacgttttaagaatgaggtagatgccatgcctgttgacagaattgatgcagtggaatacatgttgtacagaatccagctttctgcaccacgtacttcaggactatctgatggtagattcattcatgaaggatttgttctgaagcttcgtgtggaggataacattgtgggatttggttgcaccaatcgaaattcatgaagaggatctgttggatgtcgaagagcaaattagatatcttctccatagggtgaaagattctgtgctagatattattcccttactgagagggtccttttccaattggatatggacaagcctcggggttcctccttcttcgatattcccaagtgttaaatgcggtttggagatggctattcttaatttacttgcatcacaacggaaatgtagtttgttcaaagttctctctggttgtgacctgttctgccgagacgagaatgtggttgaatataatcagaacagttctgcaagcatacaaatttgtgcactcgtagattgcaatggctctccaatggaagtagcacttggtgtcgccaaactggttgctgaaggttttaccacatttaaactgaaggttgggcgccgtgaaagccccattgaggatgcaactgttcttcataaaataagagaagttgtggggtaccagatcaatatccgtgttgatgcaaatcagaaatggacatatgaacaggcagttgaatttggatccagggtacaaagtcttcatttggaatacattgaggaaccagtgagctctgtatatgatctcatcaagttctgtgaaaagaatgtcttgcctgttgcacttgatgagactattgacaaccttaggggggatgtaatttgtaagcttcatcaatttgttcatccaggaataattgctcttgttataaagcctagtgttgttggaggttttgagaatgcagctcatattgccaaatgggcgcagctacatgataagatggccgtcatcagtagcacgtatgagagttctataggtttggcatcctatatacagttagcacattatgttgaccaacagagctctatagtctccagaataagaaacaaagatacatgtagagccactgcacatggacttggaacatatcagtggttaagggaagatgtatcagaacaaaagttaaagatccatgcatccccacttggtgacggaatccgagccacagtagaagatgcccatggttatcttcaccatttaaacataaacaatgagaagataaaaagtacgtatggtgaagaaaaacataggtcatattctatccaagttgatgtggacgattgttcttatctagtcaaacttcgagaggctggtgatcatacaaatgaaaaggttgtccttttacttcatggatttcttggtacaagtgaagactgggttcccacgatgaaagctcttgcccccagtgcacgggtaattgcaattgatcttcctggtcatggcgagtcacagatactgcaacgtcacaaaaattcagaacaacctgctgtaacagttcaactagttgcagatttgttgttgaagttgatataccacataactaatggtgaggtggtggtggttggctattcaatgggtgcaaggattgcactccacatggcactaaatcaagatcacaagatccgtggagctgttacaatatcaggaagtcctggactgagagatgaagcaagcagaagacgccgtattgctattgataaatcaagagcccagttcctgatgtgttgtggacttgaatgttttcttcagacatggtactctggaaaactgtggaccagtctacgagagcatcctgagtttaattctctggtgaggacacgcagtaaacacaaaaacatcaaagctctagctaaggttcttgcagactcaagcgtggggagacaaaagtcccctgtgggaagacctgaagcacttgaagaggcctttactcgtcgttgctggtgaaaaggacgcaaagttcaaagacatctcgcagaaaatgcgcacggagataatgagccacgcagaatgcggatctgatggtcctaaagggaaggaactttgtgaagtgctcattatcccagatagcggccatgctgtgcatgttgagaaccctcttcctttggtgagagccgtgaggaagttcttactgaagctgtattgaggagaacatctgagtagaaccggtaaatggagcatcatgcaggtatattggtgtcctcacatatgcaggtgaagaaaggtttcaaattcgtgccgcccaagaagaactgaaatttggtctccgtctcgtccaatttgtcgtcgttggatcgttgcagtaactttttcccgtttggccttagtgttaatagcgtggctggtagatccaactggtgatgcctcttacgagggtttttgaaccccaatggactggcttccctttggtgattgtcagggttctgcatttcctagagataaattctcagcatgttcagacctggagtgccgtgccctttgtacaaggattccttttctagagttgtatgaaataaatgctcgctctcgagaagcggatttggtcaaaatctcactccactaccgagctgcggcgattcatcaagaagaccttcgtgccgatccctttgtgtaaataaaagtagcctcatctttctttgtcttgttgggatccgggaaccggccgactgtcgatcaag

SEQ ID NO: 217567 - DNA, 1375 bp, Zea Mays
atctcgggcgctactgatggaatatggatgggcaggcgaaagagcaggaggagcagaagaagcgcggtttgctgacgtctccatcccatcatgtattatcctcagcctaccgtctccttggcggcggcggttgccctcctccgcccctcactccgccgccactctcaaagggcgtcatcccttctccgctcctccacgccgcctccatgggttagtgcgaggaggaggacggccgtctccgacgacttcttcaccgtcgagttggacgctactggagtggaaccggaaccggattccatcgacgacgggctcccctctccatgggagggagctgtcgtctaccgccgcgacgctgccgtccagcacctcgagtacgccagcacgctggagcgcctcggcctaggggacctctcctcccccgactcccgcgcgcgcgccgctgacctgggcctggctggagggaccctggacagcactggcgcgcagcctcggacccccgtgctcgtctccgtcgacgtgaccaggcgccgcggccgcctgcgcctggacggcatcgtgcgcaccgtcatcaccctcggctgcttcaggtgtgctgagccagctcctcaaggtatatttgccaatttctccctgctgttgacagaagacccagtagaggaggaaccagacctcggcacgatttttcaagaggacgacgacaaaggtggtgcttcgctagcctgcgccatggatggagatcaagatatcgactgggatgaccggctgcatttcccagcagctgacaaggaaatcgatatatccaagcacatccgggacatgattcatctggagatcaccttggatgcagtgtgcaaccccaactgcaagggtctatgccttacctgcggcgcaaacctcaacaccaccagcagctgcacatgcaagcccaggaacgtccaaggactttctcctctcaaaggggttttcaagtgatgatgcggataccaaaattgatgacgatggaagaacctatttttggatgtcctgcgatgcaagtgaaattgtctgctgctctgctgcttaacaactccctaaacatatctgggtagcttgggactgcattggttggtgctatttcaattggtttatttgtgcctgagttattgtacccattaataaattgatgattattttgacattggtgataagttacagtaaactaaccaaaacagaaacaactgatttccccctaatgtacacagcttttcaaatatgtgatggatgtttcctattaaaagtattgaattccttgatgattcttttgacatcggtgataagtcacaggaaacaaaccaaaacagaaacaatagattttccccctaattttatgtttcag

SEQ ID NO: 217568 - DNA, 1251 bp, Zea Mays
atctcgggcgctactgatggaatatggatgggcaggcgaaagagcaggaggagcagaagaagcgcggtttgctgacgtctccatcccatcatgtattatcctcagcctaccgtctccttggcggcggcggttgccctcctccgcccctcactccgccgccactctcaaagggcgtcatcccttctccgctcctccacgccgcctccatgggttagtgcgaggaggaggacggccgtctccgacgacttcttcaccgtcgagttggacgctactggagtggaaccggaaccggattccatcgacgacgggctcccctctccatgggagggagctgtcgtctaccgccgcgacgctgccgtccagcacctcgagtacgccagcacgctggagcgcctcggcctaggggacctctcctcccccgactcccgcgcgcgcgccgctgacctgggcctggctggagggaccctggacagcactggcgcgcagcctcggacccccgtgctcgtctccgtcgacgtgaccaggcgccgcggccgcctgcgcctggacggcatcgtgcgcaccgtcatcaccctcggctgcttcagacccagtagaggaggaaccagacctcggcacgatttttcaagaggacgacgacaaaggtggtgcttcgctagcctgcgccatggatggagatcaagatatcgactgggatgaccggctgcatttcccagcagctgacaaggaaatcgatatatccaagcacatccgggacatgattcatctggagatcaccttggatgcagtgtgcaaccccaactgcaagggtctatgccttacctgcggcgcaaacctcaacaccaccagcagctgcacatgcaagcccaggaacgtccaaggactttctcctctcaaaggggttttcaagtgatgatgcggataccaaagtttgtacaaccagcccaacttcatgtcatgctgtgagcctgtgacttctagattcatataatcgcaaatatgcattgaaacttcacatttatagattcacatccgcagatgacaaaataccaaatcgacttcatatatcttatgttcttcattgtaacaaaccaccaaagatgaaaaatcttaacaaccattttataaatattatcactcatcaatgttagattattctgtgtttctgatgtaatggccttgtgaaagggcctctagccgagttggttaggtggtctgagtagcactccttgggtcctcaggctgtggtta

SEQ ID NO: 217569 - DNA, 1254 bp, Zea Mays
atctcgggcgctactgatggaatatggatgggcaggcgaaagagcaggaggagcagaagaagcgcggtttgctgacgtctccatcccatcatgtattatcctcagcctaccgtctccttggcggcggcggttgccctcctccgcccctcactccgccgccactctcaaagggcgtcatcccttctccgctcctccacgccgcctccatgggttagtgcgaggaggaggacggccgtctccgacgacttcttcaccgtcgagttggacgctactggagtggaaccggaaccggattccatcgacgacgggctcccctctccatgggagggagctgtcgtctaccgccgcgacgctgccgtccagcacctcgagtacgccagcacgctggagcgcctcggcctaggggacctctcctcccccgactcccgcgcgcgcgccgctgacctgggcctggctggagggaccctggacagcactggcgcgcagcctcggacccccgtgctcgtctccgtcgacgtgaccaggcgccgcggccgcctgcgcctggacggcatcgtgcgcaccgtcatcaccctcggctgcttcagaagacccagtagaggaggaaccagacctcggcacgatttttcaagaggacgacgacaaaggtggtgcttcgctagcctgcgccatggatggagatcaagatatcgactgggatgaccggctgcatttcccagcagctgacaaggaaatcgatatatccaagcacatccgggacatgattcatctggagatcaccttggatgcagtgtgcaaccccaactgcaagggtctatgccttacctgcggcgcaaacctcaacaccaccagcagctgcacatgcaagcccaggaacgtccaaggactttctcctctcaaaggggttttcaagtgatgatgcggataccaaagtttgtacaaccagcccaacttcatgtcatgctgtgagcctgtgacttctagattcatataatcgcaaatatgcattgaaacttcacatttatagattcacatccgcagatgacaaaataccaaatcgacttcatatatcttatgttcttcattgtaacaaaccaccaaagatgaaaaatcttaacaaccattttataaatattatcactcatcaatgttagattattctgtgtttctgatgtaatggccttgtgaaagggcctctagccgagttggttaggtggtctgagtagcactccttgggtcctcaggctgtggtta

SEQ ID NO: 217570 - DNA, 1322 bp, Zea Mays
atctcgggcgctactgatggaatatggatgggcaggcgaaagagcaggaggagcagaagaagcgcggtttgctgacgtctccatcccatcatgtattatcctcagcctaccgtctccttggcggcggcggttgccctcctccgcccctcactccgccgccactctcaaagggcgtcatcccttctccgctcctccacgccgcctccatgggttagtgcgaggaggaggacggccgtctccgacgacttcttcaccgtcgagttggacgctactggagtggaaccggaaccggattccatcgacgacgggctcccctctccatgggagggagctgtcgtctaccgccgcgacgctgccgtccagcacctcgagtacgccagcacgctggagcgcctcggcctaggggacctctcctcccccgactcccgcgcgcgcgccgctgacctgggcctggctggagggaccctggacagcactggcgcgcagcctcggacccccgtgctcgtctccgtcgacgtgaccaggcgccgcggccgcctgcgcctggacggcatcgtgcgcaccgtcatcaccctcggctgcttcaggctgtctttcaggtgtgctgagccagctcctcaaggtatatttgccaatttctccctgctgttgacagaagacccagtagaggaggaaccagacctcggcacgatttttcaagaggacgacgacaaaggtggtgcttcgctagcctgcgccatggatggagatcaagatatcgactgggatgaccggctgcatttcccagcagctgacaaggaaatcgatatatccaagcacatccgggacatgattcatctggagatcaccttggatgcagtgtgcaaccccaactgcaagggtctatgccttacctgcggcgcaaacctcaacaccaccagcagctgcacatgcaagcccaggaacgtccaaggactttctcctctcaaaggggttttcaagtgatgatgcggataccaaagtttgtacaaccagcccaacttcatgtcatgctgtgagcctgtgacttctagattcatataatcgcaaatatgcattgaaacttcacatttatagattcacatccgcagatgacaaaataccaaatcgacttcatatatcttatgttcttcattgtaacaaaccaccaaagatgaaaaatcttaacaaccattttataaatattatcactcatcaatgttagattattctgtgtttctgatgtaatggccttgtgaaagggcctctagccgagttggttaggtggtctgagtagcactccttgggtcctcaggctgtggtta

SEQ ID NO: 217571 - DNA, 4173 bp, Zea Mays
aactgtgaaggatgctttaaagaatttcaaggttatagatgttagtggtaaagaattcaaattcacctgggcatctgaacgaggcgaattgtgtgatatttatgaagaacgtcggagtggagaggatggaaatgggttgcttctggagtgtggctctgcttggcgcaagatcaatcgtgctggaccctgccaatccatctgtcaagagtcaggccaagtcaatggctgctgcagctgtagaaggtaatccacggaggatgcactggaagcagaagagcgaatttcttaagaagaataaagctgctgttatcaccccaaccaaatcagttttgaaggtgaagttatctaacaacatccccaaagggaatatctcaagttcacctgcaccttctcctgaacaacctggagaaagcaatccttcgtttcctgttggatcagatgcaaataatgaagtcataacaccttttgattttaacaaagaggaaaacagtaaatatgagaaatcagttagaaataagatgtctaacaaagatataaatcgccgagcaagttctcatgctgcaaatgtggatgataatacaaatgaagtgcgaagctacttgatatccgtgctctcaaaaaatccaaaaggaatgggcctaaaggccttggagaaagctgttgcagatgcatttccaaatgcatcaaagaaaatacagagcatcatcaagaatattgcaaattaccaaggacctgagaggtatgttctgaaatcagggttggaggtagaaagctcaaaaagtcatgtatctgaaggagtaagatccatcagtaagaaaattgaggaatcggctccaagcctgacgattgatgatcctgatatatgtgagaggattgacattgtgggctccctagttgctccaactgatggaaaactcagtaatgacagtgaaggtaaggctggaacttccagtgacagtggaagcgatagcgatagtgacagcagtaacagtggaagtgatagtgggagccaaagcagaagtgctgcagaaactggtagtggaagcagcagcaatagtgacagtgatggctcatcaagcagcaaggaaggatctgatgcagctgttgatattacgagtgatgatgacaaagcaaatatagcacacacaaaagtagtggatgaccttaatttgtcttcatcgccaagagatttgaaaagactcgatgttgatgatgaacaaattgacattgaaacaaatcttgactacaggagtacatcacctcatattggtctgaataagtttaataccggtaatgatgatgcagcagcagagggctttagtgccggcaaccttagtaagccatctgaaatgtcaggaagcaagaacatgacgagcaccagaatggattctattggagttgataccaaatataatgaaatgtcttttctggacaacctttttgatgactccatgagaatagccagtgaaaactcacccaagggggaagctggtcaattgacagtgcagcatgtcaacaagagaaaatcaacatcaaaggatgaatcaaaatttggcccagtgagtattgctaaacctaaattaaaaaggtcttctggcagcgagaactctacagcaaagcctgagagtgctaaaaaggtcaaagctgacatagcatcgtcaataggttctttatcagagcacaaaagaagtttaccacctgaaaaatatagcaatgataggtttaacaaggggacatgggatgttagccgccatgcttcacaagatagcagtcctgccatgaaaggaagacctttggctcctggaaatttacagaggatagatcagagcccaaatttacctgtcccaacaatgcactctgagagaacaaaagaaaatactgtgaaatcaagtttgaagaaaaaatcagataagtcgcagaaaccatggcatggtatggatggtgactttgggccaggttattcacatggtgtagatcaccacgctaattttgatggctctgatgatttttccacaagaaaaaggagtagacatgggaatcttcttattgatgataaaatgtttaagcgttcgaaggacgctaatgccaatgtagattccatgaatttaaccaaaagttccagagaaactgttgtgcctgatgaaataactgcttttcctgaatctaatgaatgtaatggtgagcagtcaaattctcaaagagataatgttgagagatcaccttacggtaaaaaaaagctccagagggagttttctgatcttgagttggctgaacttcgcaagacttctttggaaaatgacgatggaaggataaggaagcaatttgagagtagttcctccaagtcgcttgatgctaaattaaatgtaattaactcctaccccagtatgaatgacagaaaggttcctgttaccgtctttaatgatactaagaggaaaccttcacctcaagaatatggaattggaggccatataaaccaggaagggtttcccaggaaggcagcagggtatgagtttgatgataataggcctcagcaaaatattccagacagtcagcatttgccaaggatttataatacagattttgagaatttaatatatccagatagttcaggaaaaacaagcaaaagggaaactaggatgacacatggtggaatgctagagtatgctgatatccagaagaagaaaacaacctcaaggcttccacagaatggtactaataatgtcagagtgtctcgaatgcagaaatcaatatccccatcagataatgatgaaagaagtaggaacgactctttgattgagacaaagacaggtaggaagagaaggggcagttcttcagatgatgataatttgtttttctccaagtatgataaagatgctccggagcttaaagatccaataaaagatttctcacaatacaaggattatgtgcaggagtacaatgagaagtatggggtttattcttatttgaatagtcagatagacaaaactatgtcagaatttttaaagattcaggatgatctcaatgttggaaaagaaagaggcaaggaacagtattataacaccttagaaagactcagagacatgtatcatgaatcaggaacaagacataaattgatgaagaaggtcttcgttttgcttcatgaggaactgcagattattaaggaaagaatcaacgattttacggacgcctattcaaatgagtagctgttttactctcataacatgtgactgcttcttgtcaaggctgataatatctgggcatcagcattatgctttgcctttgtagaaatttacttggcttggaaatattcagtcgaaggcacgtatcacaggaaacctgagagacttagggtgtgtttggttgaatgtacatgaagggatggaaaaaggtggccacagatttaatagtgtttggatgagagtcgcgtaggggcgaggtgaacaccggagtagttttaggtggcggcgtgttgccctgcctcatcccactttgtcctcaaaccaaatcagcgtgatgaatttgatagtaatcacggtgaagtggaatcaaagacagttcaaatatcaatggcgtcgctggatacctgcgcggttccgcacaggagagcagaagaaatgattcattactcagggaagaggtgaggttatctctgaggaaacgagtaggccttacatcagcagttttgcagctagtttggcactgtgaccgggcggttctctttgtagatgttctgtgtttttttaaccccctgtgaagggcgagatctctcctctcttggcatttgtacatcgctttgtattagtgtgatccatgtcaaactgaaataaattgctaactgtgtacatatctgtagagccgatagagaagaagttttggagggagagaaaagtctgggacatttttttttgtcgcaaacacccacacaccaattcctaaatcttgcaactggtaacgaagatattggttcgatttttcttcttttacgtcattgacctctttatgtctatgaaactgcgacccatttctcgtctcttgcgaattacgatgtcttcggttggtggtgatgctcctttctatccagcgctcggctttgacgacacctcatgctcttttctatcctgcaatcggctttgacgacccttccctcgggccttcttggaactgatgatgacc

SEQ ID NO: 217572 - DNA, 3580 bp, Zea Mays
atgtacaagctccgcggccgtggcggcgggcgcggcggcagcggcgtagcaaagcgaccgatgccctccaacgcccgcggccgtggcgttgcctcctctatcggcgggatggccgggcctcctcgcagtcgcgccgccgccgccgccttgaaacagccggtgggacgcgaggaggcgttctgcctcgagtccagcgggctgcctgcctttgcggctataatacggctgacgcccgacctcgtcgacgagatacggcggacggaggaggccggtggaggcgcccgcatcaagttcaaccctaacatgtacaactcatcggagaacgttatagatgttagtggtaaagaattcaaattcacctgggcatctgaacgaggcgaattgtgtgatatttatgaagaacgtcggagtggagaggatggaaatgggttgcttctggagtgtggctctgcttggcgcaaggtgaatgtgcaacgcattttggatgaatcaacaaagaaccttgtgaaaatgcgctcagaagaggctgaacgtctctcaaaatctcgaaaatcaatcgtgctggaccctgccaatccatctgtcaagagtcaggccaagtcaatggctgctgcagctgtagaaggtaatccacggaggatgcactggaagcagaagagcgaatttcttaagaagaataaagctgctgttatcaccccaaccaaatcagttttgaaggtgaagttatctaacaacatccccaaagggaatatctcaagttcacctgcaccttctcctgaacaacctggagaaagcaatccttcgtttcctgttggatcagatgcaaataatgaagtcataacaccttttgattttaacaaagaggaaaacagtaaatatgagaaatcagttagaaataagatgtctaacaaagatataaatcgccgagcaagttctcatgctgcaaatgtggatgataatacaaatgaagtgcgaagctacttgatatccgtgctctcaaaaaatccaaaaggaatgggcctaaaggccttggagaaagctgttgcagatgcatttccaaatgcatcaaagaaaatacagagcatcatcaagaatattgcaaattaccaaggacctgagaggtatgttctgaaatcagggttggaggtagaaagctcaaaaagtcatgtatctgaaggagtaagatccatcagtaagaaaattgaggaatcggctccaagcctgacgattgatgatcctgatatatgtgagaggattgacattgtgggctccctagttgctccaactgatggaaaactcagtaatgacagtgaaggtaaggctggaacttccagtgacagtggaagcgatagcgatagtgacagcagtaacagtggaagtgatagtgggagccaaagcagaagtgctgcagaaactggtagtggaagcagcagcaatagtgacagtgatggctcatcaagcagcaaggaaggatctgatgcagctgttgatattacgagtgatgatgacaaagcaaatatagcacacacaaaagtagtggatgaccttaatttgtcttcatcgccaagagatttgaaaagactcgatgttgatgatgaacaaattgacattgaaacaaatcttgactacaggagtacatcacctcatattggtctgaataagtttaataccggtaatgatgatgcagcagcagagggctttagtgccggcaaccttagtaagccatctgaaatgtcaggaagcaagaacatgacgagcaccagaatggattctattggagttgataccaaatataatgaaatgtcttttctggacaacctttttgatgactccatgagaatagccagtgaaaactcacccaagggggaagctggtcaattgacagtgcagcatgtcaacaagagaaaatcaacatcaaaggatgaatcaaaatttggcccagtgagtattgctaaacctaaattaaaaaggtcttctggcagcgagaactctacagcaaagcctgagagtgctaaaaaggtcaaagctgacatagcatcgtcaataggttctttatcagagcacaaaagaagtttaccacctgaaaaatatagcaatgataggtttaacaaggggacatgggatgttagccgccatgcttcacaagatagcagtcctgccatgaaaggaagacctttggctcctggaaatttacagaggatagatcagagcccaaatttacctgtcccaacaatgcactctgagagaacaaaagaaaatactgtgaaatcaagtttgaagaaaaaatcagataagtcgcagaaaccatggcatggtatggatggtgactttgggccaggttattcacatggtgtagatcaccacgctaattttgatggctctgatgatttttccacaagaaaaaggagtagacatgggaatcttcttattgatgataaaatgtttaagcgttcgaaggacgctaatgccaatgtagattccatgaatttaaccaaaagttccagagaaactgttgtgcctgatgaaataactgcttttcctgaatctaatgaatgtaatggtgagcagtcaaattctcaaagagataatgttgagagatcaccttacggtaaaaaaaagctccagagggagttttctgatcttgagttggctgaacttcgcaagacttctttggaaaatgacgatggaaggataaggaagcaatttgagagtagttcctccaagtcgcttgatgctaaattaaatgtaattaactcctaccccagtatgaatgacagaaaggttcctgttaccgtctttaatgatactaagaggaaaccttcacctcaagaatatggaattggaggccatataaaccaggaagggtttcccaggaaggcagcagggtatgagtttgatgataataggcctcagcaaaatattccagacagtcagcatttgccaaggatttataatacagattttgagaatttaatatatccagatagttcaggaaaaacaagcaaaagggaaactaggatgacacatggtggaatgctagagtatgctgatatccagaagaagaaaacaacctcaaggcttccacagaatggtactaataatgtcagagtgtctcgaatgcagaaatcaatatccccatcagataatgatgaaagaagtaggaacgactctttgattgagacaaagacaggtaggaagagaaggggcagttcttcagatgatgataatttgtttttctccaagtatgataaagatgctccggagcttaaagatccaataaaagatttctcacaatacaaggattatgtgcaggagtacaatgagaagtatggggtttattcttatttgaatagtcagatagacaaaactatgtcagaatttttaaagattcaggatgatctcaatgttggaaaagaaagaggcaaggaacagtattataacaccttagaaagactcagagacatgtatcatgaatcaggaacaagacataaattgatgaagaaggtcttcgttttgcttcatgaggaactgcagaacaacagccaactgaggtctgacgacgaactacattattgatctg

SEQ ID NO: 217573 - DNA, 5534 bp, Zea Mays
agaaaacacaaacaccttagaatcggcgattcagtcccccttgagtccccgactccccactcctgtctcgactctttacctaagcttctgctcggccccatccccgtgcgtctcctcccggctttcgtctcgctctgagctcgcctctaccatggcgactagggtttagtagcgccgcagcctccatcactgccatcctcaactccgtaccggatccggaagaggcgtcggttcgtcctcaacgtcgccaacctccgctccccgtcgtcctcaccccctctatctcgtcaaggcttgatatttaacgggctctgggcagagtttaacaagtttcagcaatggggtttgataatgaatgtatcttgaatattcaatcccttcctggtgaatatttctgccctgtttgccggacacttgtgtatcccaatgaggccctacaaactcaatgcacacatctctactgcaaatcctgcttggcatatgtagtggcaaccacacaagcttgtccttatgatggataccttgtaacagaagctgattcgaagcctcttatggaatcaaataaaactcttgctgagactattggcaaagttgcggtctattgcctgtataataagagtggctgccaatggcatggagagctatccgcctgtaccacacatggtactacttgtgcatatgggaactctcctgttgtttgcaatcgttgtgggacacaaattgtgcatcgtcaagtacaagaacatgctcaactctgccatggcttacaatctcaaacccaacaagctgatggtagtcaggtgcagctagcggcggcaacaactcagccagtcacccaagacccatcacttgcttcagctggatctgctgcacctgcagttacaaccctaccaaagccatctttaactacagccacagctgtaacaagttctgcaacagcaacaggaggggcagctggtgcaaccacagcagcagtgccttcttcagccgcatctatttctgcttcccaaactccaacagctgagcaatggtaccagcagcagcagcagctccaatactcacaatattatcagcagcagcatcctggatccaacccttacatgcagcaatatcaacagtataaccaataccagcaggcgtatcagcattacatgcaaccttcaatgcaagtaccatcccaaaatgtggtgcaaggatctgcacaacctgcttcttatgttcagcctcaagtgcaatcctcccaactgatgatgcaagctcaaagtcaaccccaggtccatccattgacaagtcaaccgcagcttcagcagcatccagttcaacctcatccccaaagtcaccctcatctttcccatgttcaactacctgcagatcagtcacagcttcatcaatcaattcagtcagcccaagttccacagttccaaccaagtcatgttcctctccaaccatctggtctccaagtacaacctgcagcacatccatctgctcttactcaagttggtaaccagcaagttgctactcaagcaacggctcatcaggtgcagccacatgtacgagttcaacctccgcagcagcaacatattgttgcacagcaacaacatccacatctgcaagctttacctccacatcaaaatattcaacctcagatgcagttaaactctcaagttcagctgcagcctccacatgcccagcagcaagcttacccacaaccacaggcctatcctcaacaaacacatcatatgcacccccagaatgcttcatatacacagcagcaaacacaaggtgctcttttgcaacctgtacctgtgtcccatcaacaagcacatgtttctcatcatcctgcaccaatgcgtcctccgttgccaagtcaacagccagctttgcagccttttcagggaattcaacgtacaacacaacatggaaaacatattggatttcatgctcagtggccaccaatgggttccaacatttcttcccaggcaccaccacagggattccctgcaaactcatctgtttcttcacaatcagttcaaccataccagcaaggaatgtcttcatcacaacaggtgcattcccaacctggtcagccttatacacagcatcatgttactggcaatactggacatgttcaaacttcagctggcagatctatgactcatcttgcaccaacacagcagtttcagcaccaacaatcagcagtgcttagaactgagtcacctgctgctgcgcaccctattgggcagggttctttagatcttgaaaaacatacttcaaaatcagggaagtcagaaaatgcaattaatgctgctgtcagtgaaaataaaattagcggtgctgactcagctgccatgagacctacaaagcctcaatcaggtgaggaaaacatgaacagtgaacaaaatggttttgttggtgttagaaaagatgcagtgcaaactggcattgtatcacacggtttagatggttcaattaggagggatgggaatactgaccaggcaggtaattcacatggtctagttgtgcagggaggcaaagaccataaggcttcagatgttactaatcgtgagaaagaacaatcatttcagcaggcatcactgcaaaatgcaggggcactgggctcttatgtgcccccaggtgtggtaccacaacatccatctggaccagataaaatgcttcctcagcatattatgaatcctggtcataagcatggttcctctgaaaatatccgtcctccgttgcaacaaccatatggtttgtttcattctggaaagatatcaaggccatttggagagaaccagattcagatgcctatgtcacagcctgggggtatcagacctggtgatggtatgatccgacctcctgtggttggcccattacctggacatcatggtgcagtgttgtctccttttgatcttgaacatttgggccagccacattctctcggaatgttgaacagcaatgactttggtggtgaggggttcaatacttcaaggggtgctgcatatcccggaagacatgataatatcgaagacgatcggaaacattttccagcaccagcccttctggatggtcaaggcttgcaaagggaccctagacattttgagagagctttagttagacctgatggtttccttgattcagtacctggaaggcctccttttccaaaccatagaagtgtaggtttgcatgagggttttccaagaaaacaaaacacaactgccagtcaccctgacgtcctgtcacatggagcagaatttgatcatcacagggctattggaatgcctaatttcagaaatccaggcccatttgctcaagggacaagtggtggtcctggtgcgccccctaaaaaccagcttggctctggtaaccttcctggaaacatacaacatgcttttgcaggcccagacatccctccagctccttttaaccttggtgacatgcatccaggtgaccctcatcttgttgctgactattctcagcatggatttcctaaaactgcagcacactttggtttgggtggattctcgagaaatgggaattctggttggtgccgaatatgcatgtttaactgtgggaccgcagagaatctggatctgcatgtacaaacaagggaacatcagcaatgtgcaatggacattatcctgaaaatgaagcaagatgttgcaaagaggaaaaaactgaattatggaggccccaagtcggtcaacaacaaaaaggtttctgggaagggccattttcgtgggaataggcgctagtgttacctgattcagcttgatgtgaatttgaaggttgctactggtgcttttggacgtttcataggcaattgagagttgagatctcttcagacatcatgttcacgcggttcagagtatttgaagtggaacttgtaatgttcccaaacttttgttgccatgttgatctgcagagttcacatggctatgtttactttacgtatttttgctgaagttctgggattgcttaacatgctagtacccttcttctgtatgcgatgatttatgactactgtttgtttcaactaggctcatgctttgtctaatgcgacctaataatagaccacactgaaacttttacaaagagacatgtaattgtgtcatcagacatccagaacatggtaattttttgttggaatcttttggtaaggggctgatgggaacatgtaaaaggtactttcagtgcctgaaaattatgctagtttttcatagtttaattcaaaaaaaaaaatctaagggtgtggtgtctaaatagagttcctttacaccactaagcccaatttgcttaatgatatattttaaaattattgaatgctgattccatgatatgttcccattcaaaacaagggaggacaaaagtgctgcattctggaataaacacatgggctagagttgttgacatatcattgcatgacaacaacaaagccatccaaatcaacaaaaataatctcattaaagtggtgcctattttgtgcctgagggatccattagtgttaaagggaggtttggaagcctggaaggaaacacaaaagtatgaagaggtttgaattgggacatgtactttgaatgttagcatgagatgggagggaattgatggtaaaccttgtttggaaccaaagtatgtaggttgtgctcaaatatagaagaaaaagaaagatatcttgattttcatatgaatactagtacgtgcatcatgtatgcagagctttttgatactgatactggagttttattattcacttctagttagttagttagttattcgaggtagtgatggttttattatcatgggtttgatgttcagaataggacatcattgaaccctacaagcactaaatgttgtgggtaaaatacctaagtttctaattcactgctgctgggcagatggcttgttcagttatgtttgatatgatttttcgcatgtgatatattttgctgatggtggtgtttctctagatgtctgttttaaatcatctgtatttgctgtttgtttgctaagcagaaactggaaagtgtaggataatttccagcagagggctcctgtcatacttgcttgtttccctaacgatgatggtggatgtgcctgggtgccgactactgtttgaacgaactgatcgtgccttgctcattttctaccggcatcggatgtttttgaccgactccagggcacctcatatctaccgttgctgaggtttaaattgtaaaattcccgtcctgtagttctttaattacaactaatgcaccaggcgaacgaaaattcttgtaatgtattcacaaatatttctagagaagtttgcagtgtaaatataacaatgttcgtttcaatggagtgcacctactaattaatgtaccttttaaagtctatttaatataggagtgttagtgtaagaaaccgattttccattcagtggtgtatgactaattaacctacctcccggtgtatgtaaattattgtaatatatttttaagggcactgatgaagttccttgtgtttaaacatttctatatgaaaaattctacttt

SEQ ID NO: 217574 - DNA, 5561 bp, Zea Mays
agaaaacacaaacaccttagaatcggcgattcagtcccccttgagtccccgactccccactcctgtctcgactctttacctaagcttctgctcggccccatccccgtgcgtctcctcccggctttcgtctcgctctgagctcgcctctaccatggcgactagggtttagtagcgccgcagcctccatcactgccatcctcaactccgtaccggatccggaagaggcgtcggttcgtcctcaacgtcgccaacctccgctccccgtcgtcctcaccccctctatctcgtcaaggcttgatatttaacgggctctgggcagagtttaacaagtttcagcaatggggtttgataatgaatgtatcttgaatattcaatcccttcctggtgaatatttctgccctgtttgccggacacttgtgtatcccaatgaggccctacaaactcaatgcacacatctctactgcaaatcctgcttggcatatgtagtggcaaccacacaagcttgtccttatgatggataccttgtaacagaagctgattcgaagcctcttatggaatcaaataaaactcttgctgagactattggcaaagttgcggtctattgcctgtataataagagtggctgccaatggcatggagagctatccgcctgtaccacacatggtactacttgtgcatatgggaactctcctgttgtttgcaatcgttgtgggacacaaattgtgcatcgtcaagtacaagaacatgctcaactctgccatggcttacaatctcaaacccaacaagctgatggtagtcaggtgcagctagcggcggcaacaactcagccagtcacccaagacccatcacttgcttcagctggatctgctgcacctgcagttacaaccctaccaaagccatctttaactacagccacagctgtaacaagttctgcaacagcaacaggaggggcagctggtgcaaccacagcagcagtgccttcttcagccgcatctatttctgcttcccaaactccaacagctgagcaatggtaccagcagcagcagcagctccaatactcacaatattatcagcagcagcatcctggatccaacccttacatgcagcaatatcaacagtataaccaataccagcaggcgtatcagcattacatgcaaccttcaatgcaagtaccatcccaaaatgtggtgcaaggatctgcacaacctgcttcttatgttcagcctcaagtgcaatcctcccaactgatgatgcaagctcaaagtcaaccccaggtccatccattgacaagtcaaccgcagcttcagcagcatccagttcaacctcatccccaaagtcaccctcatctttcccatgttcaactacctgcagatcagtcacagcttcatcaatcaattcagtcagcccaagttccacagttccaaccaagtcatgttcctctccaaccatctggtctccaagtacaacctgcagcacatccatctgctcttactcaagttggtaaccagcaagttgctactcaagcaacggctcatcaggtgcagccacatgtacgagttcaacctccgcagcagcaacatattgttgcacagcaacaacatccacatctgcaagctttacctccacatcaaaatattcaacctcagatgcagttaaactctcaagttcagctgcagcctccacatgcccagcagcaagcttacccacaaccacaggcctatcctcaacaaacacatcatatgcacccccagaatgcttcatatacacagcagcaaacacaaggtgctcttttgcaacctgtacctgtgtcccatcaacaagcacatgtttctcatcatcctgcaccaatgcgtcctccgttgccaagtcaacagccagctttgcagccttttcagggaattcaacgtacaacacaacatggaaaacatattggatttcatgctcagtggccaccaatgggttccaacatttcttcccaggcaccaccacagggattccctgcaaactcatctgtttcttcacaatcagttcaaccataccagcaaggaatgtcttcatcacaacaggtgcattcccaacctggtcagccttatacacagcatcatgttactggcaatactggacatgttcaaacttcagctggcagatctatgactcatcttgcaccaacacagcagtttcagcaccaacaatcagcagtgcttagaactgagtcacctgctgctgcgcaccctattgggcagggttctttagatcttgaaaaacatacttcaaaatcagggaagtcagaaaatgcaattaatgctgctgtcagtgaaaataaaattagcggtgctgactcagctgccatgagacctacaaagcctcaatcaggtgaggaaaacatgaacagtgaacaaaatggttttgttggtgttagaaaagatgcagtgcaaactggcattgtatcacacggtttagatggttcaattaggagggatgggaatactgaccaggcaggtaattcacatggtctagttgtgcagggaggcaaagaccataaggcttcagatgttactaatcgtgagaaagaacaatcatttcagcaggcatcactgcaaaatgcaggggcactgggctcttatgtgcccccaggtgtggtaccacaacatccatctggaccagataaaatgcttcctcagcatattatgaatcctggtcataagcatggttcctctgaaaatatccgtcctccgttgcaacaaccatatggtttgtttcattctggaaagatatcaaggccatttggagagaaccagattcagatgcctatgtcacagcctgggggtatcagacctggtgatggtatgatccgacctcctgtggttggcccattacctggacatcatggtgcagtgttgtctccttttgatcttgaacatttgggccagccacattctctcggaatgttgaacagcaatgactttggtggtgaggggttcaatacttcaaggggtgctgcatatcccggaagacatgataatatcgaagacgatcggaaacattttccagcaccagcccttctggatggtcaaggcttgcaaagggaccctagacattttgagagagctttagttagacctgatggtttccttgattcagtacctggaaggcctccttttccaaaccatagaagtgtaggtttgcatgagggttttccaagaaaacaaaacacaactgccagtcaccctgacgtcctgtcacatggagcagaatttgatcatcacagggctattggaatgcctaatttcagaaatccaggcccatttgctcaagggacaagtggtggtcctggtgcgccccctaaaaaccagcttggctctggtaaccttcctggaaacatacaacatgcttttgcaggcccagacatccctccagctccttttaaccttggtgacatgcatccaggtgaccctcatcttgttgctgactattctcagcatggatttcctaaaactgcagcacactttggtttgggtggattctcgagaaatgggaattctggttggtgccgaatatgcatgtttaactgtgggaccgcagagaatctggatctgcatgtacaaacaagggaacatcagcaatgtgcaatggacattatcctgaaaatgaagcaagatgttgcaaagaggaaaaaactgaattatggaggccccaagtcggtcaacaacaaaaaggtttctgggaagggccattttcgtgggaataggcgctagtgttacctgattcagcttgatgtgaatttgaaggttgctactggtgcttttggacgtttcataggcaattgagagttgagatctcttcagacatcatgttcacgcggttcagagtatttgaagtggaacttgtaatgttcccaaacttttgttgccatgttgatctgcagagttcacatggctatgtttactttacgtatttttgctgaagttctgggattgcttaacatgctagtacccttcttctgtatgcgatgatttatgactactgtttgtttcaactaggctcatgctttgtctaatgcgacctaataatagaccacactgaaacttttacaaagagacatgtaattgtgtcatcagacatccagaacatggtaattttttgttggaatcttttggtaaggggctgatgggaacatgtaaaaggtactttcagtgcctgaaaattatgctagtttttcatagtttaattcaaaaaaaaaaatctaagggtgtggtgtctaaatagagttcctttacaccactaagcccaatttgcttaatgatatattttaaaattattgaatgctgattccatgatatgttcccattcaaaacaagggaggacaaaagtgctgcattctggaataaacacatgggctagagttgttgacatatcattgcatgacaacaacaaagccatccaaatcaacaaaaataatctcattaaagtggtgcctattttgtgcctgagggatccattagtgttaaagggaggtttggaagcctggaaggaaacacaaaagtatgaagaggtttgaattgggacatgtactttgaatgttagcatgagatgggagggaattgatggtaaaccttgtttggaaccaaagtatgtaggttgtgctcaaatatagaagaaaaagaaagatatcttgattttcatatgaatactagtacgtgcatcatgtatgcagagctttttgatactgatactggagttttattattcacttctagttagttagttagttattcgaggtagtgatggttttattatcatgggtttgatgttcagaataggacatcattgaaccctacaagcactaaatgttgtgggtaaaatacctaagtttctaattcactgctgctgggcagatggcttgttcagttatgtttgatatgatttttcgcatgtgatatattttgctgatggtggtgtttctctagatgtctgttttaaatcatctgtatttgctgtttgtttgctaagcagaaactggaaagtgtaggataatttccagcagagggctcctgtcatacttgcttgtttccctaacgatggtaaggatgacatgctttgatatgctgatggtggatgtgcctgggtgccgactactgtttgaacgaactgatcgtgccttgctcattttctaccggcatcggatgtttttgaccgactccagggcacctcatatctaccgttgctgaggtttaaattgtaaaattcccgtcctgtagttctttaattacaactaatgcaccaggcgaacgaaaattcttgtaatgtattcacaaatatttctagagaagtttgcagtgtaaatataacaatgttcgtttcaatggagtgcacctactaattaatgtaccttttaaagtctatttaatataggagtgttagtgtaagaaaccgattttccattcagtggtgtatgactaattaacctacctcccggtgtatgtaaattattgtaatatatttttaagggcactgatgaagttccttgtgtttaaacatttctatatgaaaaattctacttt

SEQ ID NO: 217575 - DNA, 6005 bp, Zea Mays
aacacaaacaccttagaatcggcgattcagtcccccttgagtccccgactccccactcctgtctcgactctttacctaagcttctgctcggccccatccccgtgcgtctcctcccggctttcgtctcgctctgagctcgcctctaccatggcgactagggtttagtagcgccgcagcctccatcactgccatcctcaactccgtaccggatccggaagaggcgtcggttcgtcctcaacgtcgccaacctccgctccccgtcgtcctcaccccctctatctcgtcaaggcttgatatttaacgggctctgggcagagtttaacaagtttcagcaatggggtttgataatgaatgtatcttgaatattcaatcccttcctggtgaatatttctgccctgtttgccggacacttgtgtatcccaatgaggccctacaaactcaatgcacacatctctactgcaaatcctgcttggcatatgtagtggcaaccacacaagcttgtccttatgatggataccttgtaacagaagctgattcgaagcctcttatggaatcaaataaaactcttgctgagactattggcaaagttgcggtctattgcctgtataataagagtggctgccaatggcatggagagctatccgcctgtaccacacatggtactacttgtgcatatgggaactctcctgttgtttgcaatcgttgtgggacacaaattgtgcatcgtcaagtacaagaacatgctcaactctgccatggcttacaatctcaaacccaacaagctgatggtagtcaggtgcagctagcggcggcaacaactcagccagtcacccaagacccatcacttgcttcagctggatctgctgcacctgcagttacaaccctaccaaagccatctttaactacagccacagctgtaacaagttctgcaacagcaacaggaggggcagctggtgcaaccacagcagcagtgccttcttcagccgcatctatttctgcttcccaaactccaacagctgagcaatggtaccagcagcagcagcagctccaatactcacaatattatcagcagcagcatcctggatccaacccttacatgcagcaatatcaacagtataaccaataccagcaggcgtatcagcattacatgcaaccttcaatgcaagtaccatcccaaaatgtggtgcaaggatctgcacaacctgcttcttatgttcagcctcaagtgcaatcctcccaactgatgatgcaagctcaaagtcaaccccaggtccatccattgacaagtcaaccgcagcttcagcagcatccagttcaacctcatccccaaagtcaccctcatctttcccatgttcaactacctgcagatcagtcacagcttcatcaatcaattcagtcagcccaagttccacagttccaaccaagtcatgttcctctccaaccatctggtctccaagtacaacctgcagcacatccatctgctcttactcaagttggtaaccagcaagttgctactcaagcaacggctcatcaggtgcagccacatgtacgagttcaacctccgcagcagcaacatattgttgcacagcaacaacatccacatctgcaagctttacctccacatcaaaatattcaacctcagatgcagttaaactctcaagttcagctgcagcctccacatgcccagcagcaagcttacccacaaccacaggcctatcctcaacaaacacatcatatgcacccccagaatgcttcatatacacagcagcaaacacaaggtgctcttttgcaacctgtacctgtgtcccatcaacaagcacatgtttctcatcatcctgcaccaatgcgtcctccgttgccaagtcaacagccagctttgcagccttttcagggaattcaacgtacaacacaacatggaaaacatattggatttcatgctcagtggccaccaatgggttccaacatttcttcccaggcaccaccacagggattccctgcaaactcatctgtttcttcacaatcagttcaaccataccagcaaggaatgtcttcatcacaacaggtgcattcccaacctggtcagccttatacacagcatcatgttactggcaatactggacatgttcaaacttcagctggcagatctatgactcatcttgcaccaacacagcagtttcagcaccaacaatcagcagtgcttagaactgagtcacctgctgctgcgcaccctattgggcagggttctttagatcttgaaaaacatacttcaaaatcagggaagtcagaaaatgcaattaatgctgctgtcagtgaaaataaaattagcggtgctgactcagctgccatgagacctacaaagcctcaatcaggtgaggaaaacatgaacagtgaacaaaatggttttgttggtgttagaaaagatgcagtgcaaactggcattgtatcacacggtttagatggttcaattaggagggatgggaatactgaccaggcaggtaattcacatggtctagttgtgcagggaggcaaagaccataaggcttcagatgttactaatcgtgagaaagaacaatcatttcagcaggcatcactgcaaaatgcaggggcactgggctcttatgtgcccccaggtgtggtaccacaacatccatctggaccagataaaatgcttcctcagcatattatgaatcctggtcataagcatggttcctctgaaaatatccgtcctccgttgcaacaaccatatggtttgtttcattctggaaagatatcaaggccatttggagagaaccagattcagatgcctatgtcacagcctgggggtatcagacctggtgatggtatgatccgacctcctgtggttggcccattacctggacatcatggtgcagtgttgtctccttttgatcttgaacatttgggccagccacattctctcggaatgttgaacagcaatgactttggtggtgaggggttcaatacttcaaggggtgctgcatatcccggaagacatgataatatcgaagacgatcggaaacattttccagcaccagcccttctggatggtcaaggcttgcaaagggaccctagacattttgagagagctttagttagacctgatggtttccttgattcagtacctggaaggcctccttttccaaaccatagaagtgtaggtttgcatgagggttttccaagaaaacaaaacacaactgccagtcaccctgacgtcctgtcacatggagcagaatttgatcatcacagggctattggaatgcctaatttcagaaatccaggcccatttgctcaagggacaagtggtggtcctggtgcgccccctaaaaaccagcttggctctggtaaccttcctggaaacatacaacatgcttttgcaggcccagacatccctccagctccttttaaccttggtgacatgcatccaggtgaccctcatcttgttgctgactattctcagcatggatttcctaaaactgcagcacactttggtttgggtggattctcgagaaatgggaattctggttggtgccgaatatgcatgtttaactgtgggaccgcagagaatctggatctgcatgtacaaacaagggaacatcagcaatgtgcaatggacattatcctgaaaatgaagcaagatgttgcaaagaggaaaaaactgaattatggaggccccaagtcggtcaacaacaaaaaggtttctgggaagggccattttcgtgggaataggcgctagtgttacctgattcagcttgatgtgaatttgaaggttgctactggtgcttttggacgtttcataggcaattgagagttgagatctcttcagacatcatgttcacgcggttcagagtatttgaagtggaacttaaactggaaagtgtaggataatttccagcagagggctcctgtcatacttgcttgtttccctaacgatggtaaggatgacatgctttgatatgctgtgctgaaggccgaagccaatctgtgacctgtcaattacttggacactaatgacctgtttggttcgctgcctaacttaccacagtttgccacacataaggttaggcaagtttgatcaacttaggcgcgtgtttggtttgtagtcacagttgtggcaagatttgtctcttgctgcgttggtcccactcatcaatgacttataaaagtgtagcatgattctcttaggcattgccaaaatgcggcaaagaatttgagcgcctaacctttggcatgtgtggcagaaaatatatggcaatttatgacaccttagccgtacaaccaaacagacgctaaaggtcccagtttgtataattgtgaggccatcatgaactgctatgcttttgttcgtaggaaacaacataagatatatttatgtgtaaattaatagattgttcatatctatgttcattcggggtaaggagtgacattacaatgtcttggttgaactcaatttatgtgatcgccaagtggttcaagtgtgccccaatgttatgtttgttcactttccagtgcttagtttgccggatgctgttgcccacagaagatgcccccccaaacaaacaaaattggttgggcatcacttgtaatatatttctcccaaatgcaggttgtttggggttagacttgttacatacattcttcacctgctcatggattttgtccaaactactcatagggttatcgttcacatgtgtaacttattcagcacactactgtgatttttttatagaactaggtaggatggttatttagcaagatgatggtatgattcaaaacaacttggtgctttctgctactacccttgacttgtagcccgctattagtttggatataaccaatcaattaaaaggcaccctttggatgtaagcacaattcggttggctgcttccaattgatttggctacagatcaaatcctcttcaaaattgcatggtgtattttgcgttgctcaaagacaagaaatcattcaagatgcttacactgcccctatttattttctctgactggaacggggttggctaccatgacgacttagcaattggaatgccaaactctaggttcatcaatggttttgtaattttgaggtcaccagtgatttgttatacagaattgtgggtgaaaatgaaaacatctctggcaagttccagtcagtttctgaccagtttttgacacagactggtctgatgttgattgtcacatttttgtagcacatactcttaaggatcgggccaaaaagtctgttttcttgaatggttccttcctatttaggtttgaattgtagaatcactggtgctggtgcccctttgtcactcgtgtcaaatagtaaaaggaaatgtgccgttatcgatcggaattgtagaatcacattactgtacgattatcgatcgaattactgttacaatagtaacttgcagtgcagtatattcaatttggtagtaattagcaacttggtgacattgttgttcgtgcttggcataatgtagacgatctatgtttcttctgtctcttttcttttgtgtttctttgggattcttgtagatggtggatgtgcctgggtgccgactactgtttgaacgaactgatcgtgccttgctcattttctaccggcatcggatgtttttgaccgactccagggcacctcatatctaccgttgctgaggtttaaattgtaaaattcccgtcctgtagttctttaattacaactaatgcaccaggcgaacgaaaattcttgtaatgtattcacaaatatttctagagaagtttgcagtgtaaatataacaatgttcgtttcaatggagtgcacctactaattaatgtaccttttaaagtctatttaatataggagtgttagtgtaagaaaccgattttccattcagtggtgtatgactaattaacctacctcccggtgtatgtaaattattgtaatatatttttaagggcactgatgaagttccttgtgtttaaacatttctatatgaaaaattctacttt

SEQ ID NO: 217576 - DNA, 4463 bp, Zea Mays
attcagtcccccttgagtccccgactccccactcctgtctcgactctttacctaagcttctgctcggccccatccccgtgcgtctcctcccggctttcgtctcgctctgagctcgcctctaccatggcgactagggtttagtagcgccgcagcctccatcactgccatcctcaactccgtaccggatccggaagaggcgtcggttcgtcctcaacgtcgccaacctccgctccccgtcgtcctcaccccctctatctcgtcaaggcttgatatttaacgggctctgggcagagtttaacaagtttcagcaatggggtttgataatgaatgtatcttgaatattcaatcccttcctggtgaatatttctgccctgtttgccggacacttgtgtatcccaatgaggccctacaaactcaatgcacacatctctactgcaaatcctgcttggcatatgtagtggcaaccacacaagcttgtccttatgatggataccttgtaacagaagctgattcgaagcctcttatggaatcaaataaaactcttgctgagactattggcaaagttgcggtctattgcctgtataataagagtggctgccaatggcatggagagctatccgcctgtaccacacatggtactacttgtgcatatgggaactctcctgttgtttgcaatcgttgtgggacacaaattgtgcatcgtcaagtacaagaacatgctcaactctgccatggcttacaatctcaaacccaacaagctgatggtagtcaggtgcagctagcggcggcaacaactcagccagtcacccaagacccatcacttgcttcagctggatctgctgcacctgcagttacaaccctaccaaagccatctttaactacagccacagctgtaacaagttctgcaacagcaacaggaggggcagctggtgcaaccacagcagcagtgccttcttcagccgcatctatttctgcttcccaaactccaacagctgagcaatggtaccagcagcagcagcagctccaatactcacaatattatcagcagcagcatcctggatccaacccttacatgcagcaatatcaacagtataaccaataccagcaggcgtatcagcattacatgcaaccttcaatgcaagtaccatcccaaaatgtggtgcaaggatctgcacaacctgcttcttatgttcagcctcaagtgcaatcctcccaactgatgatgcaagctcaaagtcaaccccaggtccatccattgacaagtcaaccgcagcttcagcagcatccagttcaacctcatccccaaagtcaccctcatctttcccatgttcaactacctgcagatcagtcacagcttcatcaatcaattcagtcagcccaagttccacagttccaaccaagtcatgttcctctccaaccatctggtctccaagtacaacctgcagcacatccatctgctcttactcaagttggtaaccagcaagttgctactcaagcaacggctcatcaggtgcagccacatgtacgagttcaacctccgcagcagcaacatattgttgcacagcaacaacatccacatctgcaagctttacctccacatcaaaatattcaacctcagatgcagttaaactctcaagttcagctgcagcctccacatgcccagcagcaagcttacccacaaccacaggcctatcctcaacaaacacatcatatgcacccccagaatgcttcatatacacagcagcaaacacaaggtgctcttttgcaacctgtacctgtgtcccatcaacaagcacatgtttctcatcatcctgcaccaatgcgtcctccgttgccaagtcaacagccagctttgcagccttttcagggaattcaacgtacaacacaacatggaaaacatattggatttcatgctcagtggccaccaatgggttccaacatttcttcccaggcaccaccacagggattccctgcaaactcatctgtttcttcacaatcagttcaaccataccagcaaggaatgtcttcatcacaacaggtgcattcccaacctggtcagccttatacacagcatcatgttactggcaatactggacatgttcaaacttcagctggcagatctatgactcatcttgcaccaacacagcagtttcagcaccaacaatcagcagtgcttagaactgagtcacctgctgctgcgcaccctattgggcagggttctttagatcttgaaaaacatacttcaaaatcagggaagtcagaaaatgcaattaatgctgctgtcagtgaaaataaaattagcggtgctgactcagctgccatgagacctacaaagcctcaatcaggtgaggaaaacatgaacagtgaacaaaatggttttgttggtgttagaaaagatgcagtgcaaactggcattgtatcacacggtttagatggttcaattaggagggatgggaatactgaccaggcaggtaattcacatggtctagttgtgcagggaggcaaagaccataaggcttcagatgttactaatcgtgagaaagaacaatcatttcagcaggcatcactgcaaaatgcaggggcactgggctcttatgtgcccccaggtgtggtaccacaacatccatctggaccagataaaatgcttcctcagcatattatgaatcctggtcataagcatggttcctctgaaaatatccgtcctccgttgcaacaaccatatggtttgtttcattctggaaagatatcaaggccatttggagagaaccagattcagatgcctatgtcacagcctgggggtatcagacctggtgatggtatgatccgacctcctgtggttggcccattacctggacatcatggtgcagtgttgtctccttttgatcttgaacatttgggccagccacattctctcggtaatactgtggattgtaggcaaattcttcctgtttttttgttgtttcaagtatgctgacctaactttcattccatttatttaggaatgttgaacagcaatgactttggtggtgaggggttcaatacttcaaggggtgctgcatatcccggaagacatgataatatcgaagacgatcggaaacattttccagcaccagcccttctggatggtcaaggcttgcaaagggaccctagacattttgagagagctttagttagacctgatggtttccttgattcagtacctggaaggcctccttttccaaaccatagaagtgtaggtttgcatgagggttttccaagaaaacaaaacacaactgccagtcaccctgacgtcctgtcacatggagcagaatttgatcatcacagggctattggaatgcctaatttcagaaatccaggcccatttgctcaagggacaagtggtggtcctggtgcgccccctaaaaaccagcttggctctggtaaccttcctggaaacatacaacatgcttttgcaggcccagacatccctccagctccttttaaccttggtgacatgcatccaggtgaccctcatcttgttgctgactattctcagcatggatttcctaaaactgcagcacactttggtttgggtggattctcgagaaatgggaattctggttggtgccgaatatgcatgtttaactgtgggaccgcagagaatctggatctgcatgtacaaacaagggaacatcagcaatgtgcaatggacattatcctgaaaatgaagcaagatgttgcaaagaggaaaaaactgaattatggaggccccaagtcggtcaacaacaaaaaggtttctgggaagggccattttcgtgggaataggcgctagtgttacctgattcagcttgatgtgaatttgaaggttgctactggtgcttttggacgtttcataggcaattgagagttgagatctcttcagacatcatgttcacgcggttcagagtatttgaagtggaacttaaactggaaagtgtaggataatttccagcagagggctcctgtcatacttgcttgtttccctaacgatgatggtggatgtgcctgggtgccgactactgtttgaacgaactgatcgtgccttgctcattttctaccggcatcggatgtttttgaccgactccagggcacctcatatctaccgttgctgaggtttaaattgtaaaattcccgtcctgtagttctttaattacaactaatgcaccaggcgaacgaaaattcttgtaatgtattcacaaatatttctagagaagtttgcagtgtaaatataacaatgttcgtttcaatggagtgcacctactaattaatgtaccttttaaagtctatttaatataggagtgttagtgtaagaaaccgattttccattcagtggtgtatgactaattaacctacctcccggtgtatgtaaattattgtaatatatttttaagggcactgatgaagttccttgtgtttaaacatttctatatgaaaaattctacttt

SEQ ID NO: 217577 - DNA, 4384 bp, Zea Mays
cttgagtccccgactccccactcctgtctcgactctttacctaagcttctgctcggccccatccccgtgcgtctcctcccggctttcgtctcgctctgagctcgcctctaccatggcgactagggtttagtagcgccgcagcctccatcactgccatcctcaactccgtaccggatccggaagaggcgtcggttcgtcctcaacgtcgccaacctccgctccccgtcgtcctcaccccctctatctcgtcaaggcttgatatttaacgggctctgggcagagtttaacaagtttcagcaatggggtttgataatgaatgtatcttgaatattcaatcccttcctggtgaatatttctgccctgtttgccggacacttgtgtatcccaatgaggccctacaaactcaatgcacacatctctactgcaaatcctgcttggcatatgtagtggcaaccacacaagcttgtccttatgatggataccttgtaacagaagctgattcgaagcctcttatggaatcaaataaaactcttgctgagactattggcaaagttgcggtctattgcctgtataataagagtggctgccaatggcatggagagctatccgcctgtaccacacatggtactacttgtgcatatgggaactctcctgttgtttgcaatcgttgtgggacacaaattgtgcatcgtcaagtacaagaacatgctcaactctgccatggcttacaatctcaaacccaacaagctgatggtagtcaggtgcagctagcggcggcaacaactcagccagtcacccaagacccatcacttgcttcagctggatctgctgcacctgcagttacaaccctaccaaagccatctttaactacagccacagctgtaacaagttctgcaacagcaacaggaggggcagctggtgcaaccacagcagcagtgccttcttcagccgcatctatttctgcttcccaaactccaacagctgagcaatggtaccagcagcagcagcagctccaatactcacaatattatcagcagcagcatcctggatccaacccttacatgcagcaatatcaacagtataaccaataccagcaggcgtatcagcattacatgcaaccttcaatgcaagtaccatcccaaaatgtggtgcaaggatctgcacaacctgcttcttatgttcagcctcaagtgcaatcctcccaactgatgatgcaagctcaaagtcaaccccaggtccatccattgacaagtcaaccgcagcttcagcagcatccagttcaacctcatccccaaagtcaccctcatctttcccatgttcaactacctgcagatcagtcacagcttcatcaatcaattcagtcagcccaagttccacagttccaaccaagtcatgttcctctccaaccatctggtctccaagtacaacctgcagcacatccatctgctcttactcaagttggtaaccagcaagttgctactcaagcaacggctcatcaggtgcagccacatgtacgagttcaacctccgcagcagcaacatattgttgcacagcaacaacatccacatctgcaagctttacctccacatcaaaatattcaacctcagatgcagttaaactctcaagttcagctgcagcctccacatgcccagcagcaagcttacccacaaccacaggcctatcctcaacaaacacatcatatgcacccccagaatgcttcatatacacagcagcaaacacaaggtgctcttttgcaacctgtacctgtgtcccatcaacaagcacatgtttctcatcatcctgcaccaatgcgtcctccgttgccaagtcaacagccagctttgcagccttttcagggaattcaacgtacaacacaacatggaaaacatattggatttcatgctcagtggccaccaatgggttccaacatttcttcccaggcaccaccacagggattccctgcaaactcatctgtttcttcacaatcagttcaaccataccagcaaggaatgtcttcatcacaacaggtgcattcccaacctggtcagccttatacacagcatcatgttactggcaatactggacatgttcaaacttcagctggcagatctatgactcatcttgcaccaacacagcagtttcagcaccaacaatcagcagtgcttagaactgagtcacctgctgctgcgcaccctattgggcagggttctttagatcttgaaaaacatacttcaaaatcagggaagtcagaaaatgcaattaatgctgctgtcagtgaaaataaaattagcggtgctgactcagctgccatgagacctacaaagcctcaatcaggtgaggaaaacatgaacagtgaacaaaatggttttgttggtgttagaaaagatgcagtgcaaactggcattgtatcacacggtttagatggttcaattaggagggatgggaatactgaccaggcaggtaattcacatggtctagttgtgcagggaggcaaagaccataaggcttcagatgttactaatcgtgagaaagaacaatcatttcagcaggcatcactgcaaaatgcaggggcactgggctcttatgtgcccccaggtgtggtaccacaacatccatctggaccagataaaatgcttcctcagcatattatgaatcctggtcataagcatggttcctctgaaaatatccgtcctccgttgcaacaaccatatggtttgtttcattctggaaagatatcaaggccatttggagagaaccagattcagatgcctatgtcacagcctgggggtatcagacctggtgatggtatgatccgacctcctgtggttggcccattacctggacatcatggtgcagtgttgtctccttttgatcttgaacatttgggccagccacattctctcggtaatactgtggattgtaggcaaattcttcctgtttttttgttgtttcaagtatgctgacctaactttcattccatttatttaggaatgttgaacagcaatgactttggtggtgaggggttcaatacttcaaggggtgctgcatatcccggaagacatgataatatcgaagacgatcggaaacattttccagcaccagcccttctggatggtcaaggcttgcaaagggaccctagacattttgagagagctttagttagacctgatggtttccttgattcagtacctggaaggcctccttttccaaaccatagaagtgtaggtttgcatgagggttttccaagaaaacaaaacacaactgccagtcaccctgacgtcctgtcacatggagcagaatttgatcatcacagggctattggaatgcctaatttcagaaatccaggcccatttgctcaagggacaagtggtggtcctggtgcgccccctaaaaaccagcttggctctggtaaccttcctggaaacatacaacatgcttttgcaggcccagacatccctccagctccttttaaccttggtgacatgcatccaggtgaccctcatcttgttgctgactattctcagcatggatttcctaaaactgcagcacactttggtttgggtggattctcgagaaatgggaattctggttggtgccgaatatgcatgtttaactgtgggaccgcagagaatctggatctgcatgtacaaacaagggaacatcagcaatgtgcaatggacattatcctgaaaatgaagcaagatgttgcaaagaggaaaaaactgaattatggaggccccaagtcggtcaacaacaaaaaggtttctgggaagggccattttcgtgggaataggcgctagtgttacctgattcagcttgatgtgaatttgaaggttgctactggtgcttttggacgtttcataggcaattgagagttgagatctcttcagacatcatgttcacgcggttcagagtatttgaagtggaacttaaactggaaagtgtaggataatttccagcagagggctcctgtcatacttgcttgtttccctaacgatggtaaggatgacatgctttgatatgctgggcacctcatatctaccgttgctgaggtttaaattgtaaaattcccgtcctgtagttctttaattacaactaatgcaccaggcgaacgaaaattcttgtaatgtattcacaaatatttctagagaagtttgcagtgtaaatataacaatgttcgtttcaatggagtgcacctactaattaatgtaccttttaaagtctatttaatataggagtgttagtgtaagaaaccgattttccattcagtggtgtatgactaattaacctacctcccggtgtatgtaaattattgtaatatatttttaagggcactgatgaagttccttgtgtttaaacatttctatatgaaaaattctacttt

SEQ ID NO: 217578 - DNA, 4469 bp, Zea Mays
cgactccccactcctgtctcgactctttacctaagcttctgctcggccccatccccgtgcgtctcctcccggctttcgtctcgctctgagctcgcctctaccatggcgactagggtttagtagcgccgcagcctccatcactgccatcctcaactccgtaccggatccggaagaggcgtcggttcgtcctcaacgtcgccaacctccgctccccgtcgtcctcaccccctctatctcgtcaaggcttgatatttaacgggctctgggcagagtttaacaagtttcagcaatggggtttgataatgaatgtatcttgaatattcaatcccttcctggtgaatatttctgccctgtttgccggacacttgtgtatcccaatgaggccctacaaactcaatgcacacatctctactgcaaatcctgcttggcatatgtagtggcaaccacacaagcttgtccttatgatggataccttgtaacagaagctgattcgaagcctcttatggaatcaaataaaactcttgctgagactattggcaaagttgcggtctattgcctgtataataagagtggctgccaatggcatggagagctatccgcctgtaccacacatggtactacttgtgcatatgggaactctcctgttgtttgcaatcgttgtgggacacaaattgtgcatcgtcaagtacaagaacatgctcaactctgccatggcttacaatctcaaacccaacaagctgatggtagtcaggtgcagctagcggcggcaacaactcagccagtcacccaagacccatcacttgcttcagctggatctgctgcacctgcagttacaaccctaccaaagccatctttaactacagccacagctgtaacaagttctgcaacagcaacaggaggggcagctggtgcaaccacagcagcagtgccttcttcagccgcatctatttctgcttcccaaactccaacagctgagcaatggtaccagcagcagcagcagctccaatactcacaatattatcagcagcagcatcctggatccaacccttacatgcagcaatatcaacagtataaccaataccagcaggcgtatcagcattacatgcaaccttcaatgcaagtaccatcccaaaatgtggtgcaaggatctgcacaacctgcttcttatgttcagcctcaagtgcaatcctcccaactgatgatgcaagctcaaagtcaaccccaggtccatccattgacaagtcaaccgcagcttcagcagcatccagttcaacctcatccccaaagtcaccctcatctttcccatgttcaactacctgcagatcagtcacagcttcatcaatcaattcagtcagcccaagttccacagttccaaccaagtcatgttcctctccaaccatctggtctccaagtacaacctgcagcacatccatctgctcttactcaagttggtaaccagcaagttgctactcaagcaacggctcatcaggtgcagccacatgtacgagttcaacctccgcagcagcaacatattgttgcacagcaacaacatccacatctgcaagctttacctccacatcaaaatattcaacctcagatgcagttaaactctcaagttcagctgcagcctccacatgcccagcagcaagcttacccacaaccacaggcctatcctcaacaaacacatcatatgcacccccagaatgcttcatatacacagcagcaaacacaaggtgctcttttgcaacctgtacctgtgtcccatcaacaagcacatgtttctcatcatcctgcaccaatgcgtcctccgttgccaagtcaacagccagctttgcagccttttcagggaattcaacgtacaacacaacatggaaaacatattggatttcatgctcagtggccaccaatgggttccaacatttcttcccaggcaccaccacagggattccctgcaaactcatctgtttcttcacaatcagttcaaccataccagcaaggaatgtcttcatcacaacaggtgcattcccaacctggtcagccttatacacagcatcatgttactggcaatactggacatgttcaaacttcagctggcagatctatgactcatcttgcaccaacacagcagtttcagcaccaacaatcagcagtgcttagaactgagtcacctgctgctgcgcaccctattgggcagggttctttagatcttgaaaaacatacttcaaaatcagggaagtcagaaaatgcaattaatgctgctgtcagtgaaaataaaattagcggtgctgactcagctgccatgagacctacaaagcctcaatcaggtgaggaaaacatgaacagtgaacaaaatggttttgttggtgttagaaaagatgcagtgcaaactggcattgtatcacacggtttagatggttcaattaggagggatgggaatactgaccaggcaggtaattcacatggtctagttgtgcagggaggcaaagaccataaggcttcagatgttactaatcgtgagaaagaacaatcatttcagcaggcatcactgcaaaatgcaggggcactgggctcttatgtgcccccaggtgtggtaccacaacatccatctggaccagataaaatgcttcctcagcatattatgaatcctggtcataagcatggttcctctgaaaatatccgtcctccgttgcaacaaccatatggtttgtttcattctggaaagatatcaaggccatttggagagaaccagattcagatgcctatgtcacagcctgggggtatcagacctggtgatggtatgatccgacctcctgtggttggcccattacctggacatcatggtgcagtgttgtctccttttgatcttgaacatttgggccagccacattctctcggtaatactgtggattgtaggcaaattcttcctgtttttttgttgtttcaagtatgctgacctaactttcattccatttatttaggaatgttgaacagcaatgactttggtggtgaggggttcaatacttcaaggggtgctgcatatcccggaagacatgataatatcgaagacgatcggaaacattttccagcaccagcccttctggatggtcaaggcttgcaaagggaccctagacattttgagagagctttagttagacctgatggtttccttgattcagtacctggaaggcctccttttccaaaccatagaagtgtaggtttgcatgagggttttccaagaaaacaaaacacaactgccagtcaccctgacgtcctgtcacatggagcagaatttgatcatcacagggctattggaatgcctaatttcagaaatccaggcccatttgctcaagggacaagtggtggtcctggtgcgccccctaaaaaccagcttggctctggtaaccttcctggaaacatacaacatgcttttgcaggcccagacatccctccagctccttttaaccttggtgacatgcatccaggtgaccctcatcttgttgctgactattctcagcatggatttcctaaaactgcagcacactttggtttgggtggattctcgagaaatgggaattctggttggtgccgaatatgcatgtttaactgtgggaccgcagagaatctggatctgcatgtacaaacaagggaacatcagcaatgtgcaatggacattatcctgaaaatgaagcaagatgttgcaaagaggaaaaaactgaattatggaggccccaagtcggtcaacaacaaaaaggtttctgggaagggccattttcgtgggaataggcgctagtgttacctgattcagcttgatgtgaatttgaaggttgctactggtgcttttggacgtttcataggcaattgagagttgagatctcttcagacatcatgttcacgcggttcagagtatttgaagtggaacttaaactggaaagtgtaggataatttccagcagagggctcctgtcatacttgcttgtttccctaacgatggtaaggatgacatgctttgatatgctgatggtggatgtgcctgggtgccgactactgtttgaacgaactgatcgtgccttgctcattttctaccggcatcggatgtttttgaccgactccagggcacctcatatctaccgttgctgaggtttaaattgtaaaattcccgtcctgtagttctttaattacaactaatgcaccaggcgaacgaaaattcttgtaatgtattcacaaatatttctagagaagtttgcagtgtaaatataacaatgttcgtttcaatggagtgcacctactaattaatgtaccttttaaagtctatttaatataggagtgttagtgtaagaaaccgattttccattcagtggtgtatgactaattaacctacctcccggtgtatgtaaattattgtaatatatttttaagggcactgatgaagttccttgtgtttaaacatttctatatgaaaaattctacttt

SEQ ID NO: 217579 - DNA, 514 bp, Zea Mays
atatgtcccgaaaaacgaaaaactatgaggagaaggtgaagaacttcttctgtgagcacatgcacgctgacgaagagatccgctattgcttggagggcagcgggtactttgacgtccgtgacaaagatgacaagtggattcgaattcggataagggaaggagacatgatcatcctaccagcaggaatttatcatcggttcaccctcgacagcgctaaatacacgaagctcatgaggcttttcattggggaaccagtctggaccgcattaaaccgccctcaggaggaccaccccgcgaggcaagagtatgtcaagaatgtgagtgcgggcactggatttgctcttgcagcacactgaatctgtcccccccccttcccgtgtataagaatatatggtcacttggattcatgtaccactgcatagtatcatcatatggtatgacgcaaccgtatgttatcatcaggagtcatgaaaccttgctgcatgttcagttaaatctgtgcacataaaactgc

SEQ ID NO: 217580 - DNA, 2355 bp, Zea Mays
ccgacatgcggtgcagaaagtgaaaacgcgagaaaagcgcccgtcctttctcgttcccttccgtgcagttgcaagtgttgccacgccgcgccgcgacacaccacgcaggaggcagcgagcgcaataatgcgcacgcagaggagcacagcggcgtcactgctgcggcagtaatggccgcctggttccacttccaccacggtgtgcactagcgctacaccgaggccaccttttcttggttccttcaacacgcctactccggcctccggatcgggcaccacgtctgccccctgctcccggaatctttgccaagcggcgccgctactgtccggcaaggcgaccccgtctctcggccggcgttgatctgtttgcgtctttatgttactgtggttgaggcgggcggagtggcggcgcgatgggcatctcggcgaggtggctcaagtcgttagttgggttgaggaaggtggggcggcagcagcagcagcggcgaaaggatgatgcagatgttggtcgaatgaaaaccgatgtcgccgaccagtttcattttcagattcagcactctcaagatgacaatagcattgctgcacaagaaattccagaggtttcttatggaaatgatccacctgaagatgattctaatgtaccttcatgcttcgagcctgctcgtagttcagctcatatgccattttgtcaaactgaagaagcccagaaagagatctgggctgctacaattattcagacagcatttagagctttcctggcaaggagagcccgccgagctttaaaagggttggttaggcttcaagcccttgtaagaggtcatatagtaagaaagcgagcagctacgacactccgttgtatgcaagctttggtcagggttcaggcccgtgttagagcaaggcgagttcgcatggctttggaaaaccagactgatcggcaaaatacttcaccagagcacacgatcgaggcacgtgtcagagaaatcgaggatggctggtgtgatagtatcggttctgtgggagatatccaagcaaaacttctaaagaggcaggaagcggcagctaaacgtgagcgagccatggcctatgctctagctcatcagtggcaggcaagttcaagacaacctacagcatttgaacctgacaagaacagctggggctggaattggctagagagatggatggctgttcggccttgggagagtcggttccttggcacttacgggacagatgggatttttgtagttaatgaaaccagacaacctgacagaagtgcaaccaagaccccatacagaaaacctgttaaaaagcatgattcaacccttcaatcaaacatgttgaaccagaaggtcttcccatcaaactcagagggtggtggctcctcgacaaatcgatcaagtggtttggtatcaactaaatctagactgaaggttttacccagagaaggttctgaggaagcctcatctcatccttcagtaattgtgcggtccactagtaatccgaaggagaggatttccagtattaattcaaaggagaggactggggacttggattttcaagttcataaaagatcctccttgcctggcattggtccagaagctggcaaacacctgacaaagaaaggcatggttaaccgatccctgaaggccacaaaagattcccaaatactggggtcaaggcatcatcttgccagttccattgatccagttcccaccagagttgaactggagacttgagaaggcatgttatgctcgaacatcgccatggattgcacctagcagcttggatgccgttcatgcctcaatggctgcatgaatgtgtcgcaacatctatgttatactggtggtggcggttttcgagtttcgacaccatatatgtaggctcatttcatgagataaaatcagatgcatgtgagcatgtccatatatgttaagaggattaccattggttttattgttgtatttgtaagttgccgttaggaggtgtaaatttgtgtcgtcgagtggtacttattatgtgttgtcgtatagttgtgactcgaaggttaaaggtggttttggttctactgcgaagtgtgaactgtagtgagctgtgttctgtaaaaaaataaagttgttgtgatttgtctactgtaaaaaaaatggaagtaacttggttcaagctgccgtgaaaatgtagattttatatgattttttttttttttttgcaatgctcctgagagtctgatagattttttatatgcaaaacgatactaacacaacattttttgagatgactaacgtaatttccattgctataatattccatacatacagataattaaaatatatagacgttcatagttcatctcaaagtttgc

SEQ ID NO: 217581 - DNA, 3656 bp, Zea Mays
atgatcgagttcgagtttatagtagacttagggtccttcaccaagttgtggatttgtaatcttgagaagcaatcagatgttctggatatcggtagtcaacaagtggaggttggcgatgatggaggcctcatggatcgttgctgcctcaatgttagagaaggagatggcagggggttaggccagcttgagagcggcatggtcgtatactctagggtggtgattattgatcaatctatcaaccgagacctttgtgagatcgatctatctattatagccataaagagaaggtctatttacgcggagaacacgtttgatgcagctagagaaatactctatcaagtggagtatggatataagcatgcaaatgtgttctactttgatggctgggatggaattggtgcatctgctgctctcaaggaagcagcaaaacgcctaaaatcttcagcatcaaagtttgacagcgttctccatttggattgctcattatggaaaagtaggagggccctacagaaggctatcgccgaggagataaagctcccccattcagtgatggccatcttgagccagcatgacaaggaggatgatttcaacggtgtagaagaaggcgctagaaatgaggtacgggaaatcattaagcatacctacacaaagctagccaccgtcaaaagattagttgtggtcttccataatggaagtggtagcttcattgacctgagcgagtttggtatcccactgaaccgaaacttcaaaggtgatgtgttgttgtggacaatgcaagggaggtttagaccctatgttagctacactataaaagaaaaggatcctaatatggtgtacctttatgtggatcctgatacggtgcaattagatgacacttcattatggggcattgtgaatgaggaagctaaggaggttgctcagtacacaggtaccattgaccacatggcagtggtggcgtgcatcctgtacacgtggaagctaaaagacatgggtaacatagattgggatactcatgcttcaaactactgggtttgtgatggcattatacaaggcagtagtagctcggaagcatgggattggaaggttggtgatgcactacagagaaacatgcatttgggctggattagtaggtcttatatggattatttcttttcatcctcagctattgagatgcagatgcagcattatttaccacgacctccagcgatttgctgcacttccgagattattagtgtgcctgctgaagcaacatccttttttctacaaccaaaatatggagatgaagaatctcaattacttgcttctatgttcaaacattcagccagtaatctgcgtgtgctgcatctctctggatgcacctttagatttgcatctccaccattcctctgttgcagcaacctaaggttcctcctccttcaccgttgcaaggacgatggcacaagtatcacaccaacagagggcaaggaacttgacgaccagagtggagcatggagggcttgcttcgggaagctgcaagtaatggatttgagctacaccaaatggtggtggttgctgtcacaaaggatgaacataatggccaacctcagagagttgaatgcaaagggaatcaagaatttgagcacaagtcatctacgtggttgtggcaggcttgtcaagcttcgagtagaagacggcagcgttgacggacaaagattaatacttgagaactctgttgcactggaactagccgtcctcgttaaccatgctaaagatgaaggcgctacatacatctcctttcgtggttgtgctcagttgaggagtatattgctgggaggattattttgttgcctccatgagttggacctctcttgcacatctgtggaaaccgtcgacttgcgagaggtagaagcccagagattgaagcggctcatcctacttgggtgccagaagctccgtgcaatactatggccaccgagatcctcgtctattcttgagaccttggatgtgttttgtgtgagcaccaccccatccacagcatcaggacaggaatggccacatctatgtaaatgggaagaaaagaggaaggaggctacctctgcttctactgcagaatcatcatccttggatagaaactggtacatttgtgtaagggatgcgaggctcctacggtcgctagatgtcttttatacctatgaaaacaatcgttgttccattggctggcctgcacgtgtggagttcactacaccaccagcatcaggtgatcttgttgctgctcaaggagtcaatatcttgcagcagtctatacatgttgtagatgtatatgcaagagatatgatcacccataaccaacttattcatgatgaggatgcaactgcgggtgatgaggacggtgaaggagcgatccactggatgtgggattgcccaacgacccggacgatgcatggtcatggcttgtatattcacgtacaagcagaggatgatgagcaggagggagagttgaacataggtggaacatggtctatgccccctagatttatatgcacaagtgctgatgttatgcatgtgcatgattgcctgtccatcacctccggcatttctctgtcatacattacctcatgggatctacttaattggtgccgagttgaaaggtgccccatgttgcgatctgtcttcactgccttttctgaaggaaaagaaaatgatatttctagtgattcatggctgatatttcaaaacctgacaacattctgggcatcacacctcccgatggcaaagcacatctggaactggagtccaagagcttatccatctgcatactcctttcaacagctccagttcttgcacctggactactgcccgagggtcatcttcgtgctccccttggactcgaatatgtcgctgcctcagcttgagaccctagagatcatttgttgcggtgatcttagggagatcttccgcccacaggatcccaggctcgagaaccaagaggaggttgtcaagcatttccccaagctacgacgcatccaccttcacaacctcccgacgctgcgcagcatttgtggccgcatgatgtcttcaccaatgctcgagactatcaatgtcacgggctgcctagcactcagacgtttgccggcagtcggcggccgtctcgggcagccacccacagtggtgtgcgagaaggactggtggaacgccctcgagtgggatgggttggaggccaagcaccacccttccctcttccgccccaagcactcatgccactacaggaagcccaagcttcttagaggcagcgtcctcaggtaatcaacaacagctgccattggaggcggatggatccctccactccatatatatgttgcgggttgcacagtgtcgacgtccattcctgacagcagtcgatgaaataagactcctattaattattggtatctccctcttcaagtcgtggtgtgtggttggttccctccgcttcaactacgttgttcttctgcctttctctgcatccacatcaccaccaccagtttattgtctacgcttgtgtgtgttgtttcatcgctgagcaacattaaatatgtgttttatgtgttgtgtttatctatttggtaccctggttgctatataattatgtgtgttttatatgttgtatttatctatttggtaccctggttgctatataa

SEQ ID NO: 217582 - DNA, 3234 bp, Zea Mays
gcagcccatccatatccatgccagcctatatataccggacgccctcgggcccgacgtgctcgtgctcgtcctcgcccagcaccgtaaccaccggacagagcacgcaccatgaaacccaccaccagcagcacgctgctgctggcagcggcggtgctctgcctcgcgctgccgctgctccccggcgccacggccaaggcggcgcgggcgcggcagggcgactacctggcgcgcctgcgcgggtcgtcgccgtggccggccgagtcggcgtcgctggcggtcgcggcgacggacagagcgtcccggcacgcggcgtcgccgggcgtggggcgcaaagaggacgaccgcgtggacaggctgcccggccagccgtcgggcgtggacttcgagcagtacgccgggtacgtgacggtggacgccgcggccgggcgcgcgctcttctactacctcgccgaggccgtgggcggcgggtcggcgtcggcggccaagccactcctgctctggctcaacggaggccccgggtgctcgtcgctggggtacggcgccatggaggagctgggcccgttccgggtgaagagcgacggcaagacgctgtaccgcaacccgtacgcgtggaacaacgcggcaaacgtgctgttcctggagagccccgccggcgtgggcttctcttactccaacacgacggctgactacagccggagcggcgacaacaagacggccgaggacgcgctccggttcctgctcaactggatggagaagttccccgagtacaagggccgcgacctgtacctggccggagagagctacgccggccactacgtcccgcagctcgcccacgccatcctcgggcacgccgccgccggcaagccgtcgtcgtcgtcgcccctcaacctcaggggcatcatgatcgggaacgcggtgatcaacgactggacggacaccaagggcatgtacgacttcttctggacgcacgcgctcatctccgacgcgacggccgacgcgatcggcaggcactgcaacttcagcgccgccgccgacgccgacgccgcggcctccaacgacaagtgcaacgaagcgacgtcggaggccgacgaggccctgcaggacatcgacatctacaacatctacgcgcccaactgccagtcccccggcctcgtctcgccgcccatcaccccctcgatggacaggtttgacccgtgctcggattattacgtgaacgcgtacctcaacgacccggacgtgcagagggcgctccacgccaacgtcacccgcctcgaccacccctggtccgcctgcagcgatgtcttgagacgctggactgacagcgccacgaccgtcctgcctattctcacggagctcctcaacaacgacatcagggtctgggtgtacagtggagacaccgatgggagagtgccggtcacttccagcaggtactccgtgaaccagctccagctcccagttgccgcaaaatggagggcatggttcagcagcactcagggcgccggagaggtgggcggctacaccgtgcagtacaagggcaaggagaagggcagcctcagcctggtcaccgtcagaggagccggccacgaggtgcccagctaccagccaaggcgagcgctcgtgcttgtccagggtttccttgcaggcaaaacgcttcctggctgcaaaacgtgcgagtcggcttagcggttggcagcactacagcaacatgtatctgagagcgagggagagaaagcgaaagggaatcaagccattggaaacacacgcaccttgcggatcatgtaactgcaggtctgcaaaaaaaaaaggcaattatacagtcatagtcacaggcagagaaatctgtacacgaaataagtaagtaggttatgttccatggtgtatttagtgtgctaatttgatgccataaatctcagtcgtgcaggtgcatcagtgctagcgaatcattagaaacaaagaattttcacttccccgccaattcctttctttcttcgaacaataacggggcgtttggatcccttcattttaaaggaattggaattcactcaataaaatgatacagaaaagaaagaaagaaaaaggacagctcttgcgcaaagcattgactcccggattcttgcaacttttacaagatcagttagatatgcaatggcacgcttctacatttggatggccacaacaatggtggaaacgtatctgatcttgtatataaatcataacaatccactaatcttgtgggaggtgaaatcagcctatttgtttattcttccccttgcctctctatgtggtttacagttggggaacctgtgcctgttaatccctgcatcttcttgcagacatagacataatgggagtcaggatcctctgggacaaatccatcagggagtctacccctctcggtcagtggaacaggatccagtacacgcctcgttatctttccagtgaacacaggtcttgctgcaatacattaaaacagcactgatgaagccagcataaaaaatattcacttttttttactcagcaggcttttacacagctatctgtttccatcttatcgtaccatcatttatcctcatttttgtatcgctctgtggggtactatggaccactaattctactaacagatgacattcttttgaagtaaatttcttgcagcaccccagagttaagtgaaatgaattacacatattagtcattttatgtaacagaacagacaatatattcatgagaaaacagaaagaacaactcagttctcacttcaactgcattgcacatgaaaaaaaggcaatattgtactgttatatcacaatacaaaaggaaaaggaaacataccacattgtacaaattttactgtcagttggacaacatatatgtctccaaagcaaggggtaaaaactcaaactaaagtttgatacgtacgtagaatataaagtacaactttccagtcacatgctgattgattcaaatgaggcattcgtaccgatggatcaccatatgttatctacaagttcacacacgaaaattgggtcaaaatgcataccagggtttcaacattgttgatgctgggctgtgtatgtgactaaggcccataggcccatgactaagaagaggaatggagaaataatctagaactcagacccaaaattgtcctcaacagcactactttcagagcaaatgtacaaaagtgcgtaccaaaataaaggttcctcctggtttaagaagcctgcaataaaaaag

SEQ ID NO: 217583 - DNA, 601 bp, Zea Mays
atcacggcgaccaaggcacacgattctaccgagagggaaccagatggcttaggttcagtggcctgtccctcgtcgctaccgcttggcacaacttgatcagccgacaaagaagcaaacattcgccgcctcctgctgccgcaacctctcaaccatgaccaggcagcgctgtacgggatcctcagcttgtaaaaaacacgcacacacacgcatggctcatccatccatccatccatgctacatttgcagtcatttgctgttattttccaatcctggttagttcttgtaagctaaccccgcatccgataagctaatcctgtaaatggcgcaaggagcatcagctctggactgctcctgttgtagagaaaaaaaaatactacagcttagagttggggaaggagggcaatctggaaattcatccaaagctttgtggcgtaacttgattatatatgtacttttgtaaaacctaccagttgtggttcaaatccaccggctactaactaactagcctatgcaaaaccaaaacaaaaaaaagaggagtaacatgatcacaggatgtcacttgactgcacctactgcgtttctccctttgcttctgaactgc

SEQ ID NO: 217584 - DNA, 1422 bp, Zea Mays
ccattcccattcccattcccatccggtaacggcatcccgcgtccctcggctcggatcgccgccgcccaacggagcaggagcaggagcagcgatccatcctatcctaggagccaaaccctagccagctatggagccgcccgccgcctcctcctcgtctgatccccactccccgtctccgtctccttctccctccgcctccccggccaagcgctccgcctggaagcaccccgcccccaacgacaccgccgtcatggacgccaacaactggcccgcgctctccgacgccgccaagggcaacaagctcccggactcctcggctccatcacctgcgcccgtagccgcaccatcgcaaggagaacctatgctcagatgtgtacctgaggcagcagatggatggtcagggctgggttgatttatctcttatagctggcttcaaaaaggtccaagggctgaagaaggacctacaatatataaaagagacggtgcagtcctcatctgtactggaaatgaaggataataaaatcaggaagcacggagactgggagaaatgggtgatccctcgcgagagcaatcctgatgccccgtcaagattagcatctgtatcaagacctaatgtcaataacctgacatcacatctaggaggcatgggtctgcatgaatccgctagctctactggcgcagaggagctgaaccatcatgatgtcgtccagaacggatcgccttctggtaaggaaccggcagctgaagacagttctggtcagcaggagttgcaataagacagtggctcgccttcacaccatgactgcaggggttttgtgccagagcacaaatgatagtttcttcttttttttcgggtttttggggttggttggggggggggggtttggacgaggtgtgataatgactcatgaggggcgtgttagactgacaggcgaatgtgtttaccgggggtcaggtagataagattttgctttaccttgtggtattcaggcggaggggtagggcagctggtgaagcagcagagaaggaaggcggtggttacatctggaggcgcctcagatgacatggaagactgaaaaaacaagtctattgaagactgaaaaagaagtcaattgaagactagcgtagcggccctgggcggctttgttttcacaggatggtattctggtgttgcgatgaactagtcttcatcgggatggatgttgtaggaccttcaggttttttttttattttttttatggaggagctgaaagtttctgacttgggagagtgagggagtttgacttgttttgtttttgtggtggcgttaagttaaagtaagaagaagatgttagataatgtttgctccctgttcattctgctgtgctggccttgtatggtattatggtggctgtgaatgatggagactgagattgcgtggtc

SEQ ID NO: 217585 - DNA, 1893 bp, Zea Mays
ctcgtctcgtcactaggaagtggtactaggaatagagaggcgccgccgcatcccattcccattcccattcccatccggtaacggcatcccgcgtccctcggctcggatcgccgccgcccaacggagcaggagcaggagcagcgatccatcctatcctaggagccaaaccctagccagctatggagccgcccgccgcctcctcctcgtctgatccccactccccgtctccgtctccttctccctccgcctccccggccaagcgctccgcctggaagcaccccgcccccaacgacaccgccgtcatggacgccaacaactggcccgcgctctccgacgccgccaagggcaacaagctcccggactcctcggctccatcacctgcgcccgtagccgcaccatcggccgttgccaactcctccagttcgcaaaagcacggcgcccatcacggccgccacaagtccgccaggcgcattggcggtggtggcgaccactctccacgagaccatcctgaccggaacgttgccgctggttgggaccatgctgccggcggtggcgggggcaggggtgcccagaggaaccataataacggaggtggcaggaggggcaatggcgcacctgcctctgccactgggccttctcatcacggttctggtgccggtggcggcagcggcggaggctttggtgctaggcgaagaggggcatacgagccaccattctatcgtggccctccaccaccgatgggcatgggccactacatgagaggtgcgccgccgccaccgcccatgactgtcgcaccaccgttcatgggccctccaccgccaccagtttcgtccatgcgcccgtatgctggaccaatgatgttccatgacatgccatctcccatgtctcctgtatcccccatatacttttatgggccaccaccaccagaggctcttaggggactgcctcttgcgcctcctatggttggcccacctgcttatccatactttcaagcccagcctgaacctgaacctcagcctgatcctgagcctgatgcggaagaggaacgtgtcaagctgctcaagcagatagagttctacttcagcaaggagaacctatgctcagatgtgtacctgaggcagcagatggatggtcagggctgggttgatttatctcttatagctggcttcaaaaaggtccaagggctgaagaaggacctacaatatataaaagagacggtgcagtcctcatctgtactggaaatgaaggataataaaatcaggaagcacggagactgggagaaatgggtgatccctcgcgagagcaatcctgatgccccgtcaagattagcatctgtatcaagacctaatgtcaataacctgacatcacatctaggaggcatgggtctgcatgaatccgctagctctactggcgcagaggagctgaaccatcatgatgtcgtccagaacggatcgccttctggcggaggggtagggcagctggtgaagcagcagagaaggaaggcggtggttacatctggaggcgcctcagatgacatggaagactgaaaaaacaagtctattgaagactgaaaaagaagtcaattgaagactagcgtagcggccctgggcggctttgttttcacaggatggtattctggtgttgcgatgaactagtcttcatcgggatggatgttgtaggaccttcaggttttttttttattttttttatggaggagctgaaagtttctgacttgggagagtgagggagtttgacttgttttgtttttgtggtggcgttaagttaaagtaagaagaagatgttagataatgtttgctccctgttcattctgctgtgctggccttgtatggtattatggtggctgtgaatgatggagactgagattgcgtggtc

SEQ ID NO: 217586 - DNA, 2094 bp, Zea Mays
gtgcctccctccccacgaaacccccttccccaaactaccttcgccgctctccttgatccgcaattttctcccacatctctcttctgcccacttgcctccatcttggcctccccctccactccccacccccgaacatccggcgccgtccacacccttgcaccccgactcccctcgtccttcgtggccacgatgggggcgtccatggcatcgccttaggggcgatcgatctgggagaaagtgctggagcacgtggcgtcgtaccaccagcagcaacggaggcagaagctacgcaagagcctcacctacaccggcagtgagttctcgttcgctgtccggggtcgtggggacgaccccgcctccacgtccgttggggcacagaacgaggacatgcctcttgagcacgtctttaaaatcattaggtaacttccagatctgcctagccccttgacgtttaacttgatgcccaatcggtagtttgttcattcagaccagcaaacacaactcatttgtttcttgtgaggctaggccaaagtttgtgcgaccgttgatgtgaatttcctctgggcccaactttgatccgatggcaaaagtgtgtgtttatggttcctgagtcagatgatctttcttcagttttaggtacttttatgctttaatatagctcatgcaatatgatttattttaacacatatttggaatagaactggattgtgcatattttgtaaagtgtatgttctacattttgtaattcgtattattcattttttcctttagtttttctctttctacaactcctatatctttacaatcaaatttcagatgtgatagatattagtatgaaagataaaactagaatgctatgtctgtcaaaggagctttcttcagtttcaggtactgctctgctttattagccatccagccgatggataatttctatacgtgtatcgccctgcactttcaaacacttatgttcattgtttccaatcacatattttttcttcttctcttagatttactatgtggttgtggtctcagtttggcttgtaggttaatttgtatactcatgtcattttagtttttctgtgtattttatgttgatttagtatgtcttaatttagttactttcaattcttgatgctaataatatggatagattgtgacactactttctggcttgagcagaaatgagtttgttgcatatagcagaatatagtttttgtagctggcaacaatgaccgctctttggatgatctaaaaactattctgtagtcaggtagttaaatatagctgaatatacattattatgttttattaatcttatttgttttttctgtcaaaagaacacacctctccatctttcggtgctaggtggatcaccgtctaaacaatccaccaccagaaccgccctaccccaagatagccgtagtctcctccatccaacatttcctacgcatgcagctccatctcagtcgttgtacccattcaatggcgagctggtggcagcgatgtaggagatgatccatgacgaggtgcacaagtacatgttagtggacgacacctgccaaagatacacaatttctactggtacacattttattttttcatgtttttcagttggagaaaacatttaagacaatattttctcgtttgttctccatatggggcttgttccacgccacttgaaggaagaagggaatggtggtgttaagttcggacaatacatctacacatcttggagcatcggcatcaatgttttcaatcttctcaaatttcaaattattctggtctcttcgtgcaaccataaaagtttattaagtcacttatctgagtggtctaaaagtctagcatatttttgttcctctgcctgtcgagacggatcaactgacatgaataatatccagtgaatactgcaagagctattcatgatctgccgtgaactagctagtatgatataactcagtttgtggagtgctaatgcacaaacaggaaataggatgatacttcatgtatatttttttatttcatgaaaatgaactataggatactgttcacaatccataccaagcttctgcagttatcaacatgttttctatgttc

SEQ ID NO: 217587 - DNA, 2216 bp, Zea Mays
gtgcctccctccccacgaaacccccttccccaaactaccttcgccgctctccttgatccgcaattttctcccacatctctcttctgcccacttgcctccatcttggcctccccctccactccccacccccgaacatccggcgccgtccacacccttgcaccccgactcccctcgtccttcgtggccacgatgggggcgtccatggcatcgccttaggggcgatcgatctgggagaaagtgctggagcacgtggcgtcgtaccaccagcagcaacggaggcagaagctacgcaagagcctcacctacaccggcagtgagttctcgttcgctgtccggggtcgtggggacgaccccgcctccacgtccgttggggcacagaacgaggacatgcctcttgagcacgtctttaaaatcattaggtaacttccagatctgcctagccccttgacgtttaacttgatgcccaatcggtagtttgttcattcagaccagcaaacacaactcatttgtttcttgtgaggctaggccaaagtttgtgcgaccgttgatgtgaatttcctctgggcccaactttggtatacataaattccattattgcctttaatttttttgtattctggtagatttgggcatgctaagagctaaggttgtttcatcttgcaacatattgacgtgctctatagctataaatgatatcaagttatttcatcttgcaacagatccgatggcaaaagtgtgtgtttatggttcctgagtcagatgatctttcttcagttttaggtacttttatgctttaatatagctcatgcaatatgatttattttaacacatatttggaatagaactggattgtgcatattttgtaaagtgtatgttctacattttgtaattcgtattattcattttttcctttagtttttctctttctacaactcctatatctttacaatcaaatttcagatgtgatagatattagtatgaaagataaaactagaatgctatgtctgtcaaaggagctttcttcagtttcaggtactgctctgctttattagccatccagccgatggataatttctatacgtgtatcgccctgcactttcaaacacttatgttcattgtttccaatcacatattttttcttcttctcttagatttactatgtggttgtggtctcagtttggcttgtaggttaatttgtatactcatgtcattttagtttttctgtgtattttatgttgatttagtatgtcttaatttagttactttcaattcttgatgctaataatatggatagattgtgacactactttctggcttgagcagaaatgagtttgttgcatatagcagaatatagtttttgtagctggcaacaatgaccgctctttggatgatctaaaaactattctgtagtcaggtagttaaatatagctgaatatacattattatgttttattaatcttatttgttttttctgtcaaaagaacacacctctccatctttcggtgctaggtggatcaccgtctaaacaatccaccaccagaaccgccctaccccaagatagccgtagtctcctccatccaacatttcctacgcatgcagctccatctcagtcgttgtacccattcaatggcgagctggtggcagcgatgtaggagatgatccatgacgaggtgcacaagtacatgttagtggacgacacctgccaaagatacacaatttctactgtttttcagttggagaaaacatttaagacaatattttctcgtttgttctccatatggggcttgttccacgccacttgaaggaagaagggaatggtggtgttaagttcggacaatacatctacacatcttggagcatcggcatcaatgttttcaatcttctcaaatttcaaattattctggtctcttcgtgcaaccataaaagtttattaagtcacttatctgagtggtctaaaagtctagcatatttttgttcctctgcctgtcgagacggatcaactgacatgaataatatccagtgaatactgcaagagctattcatgatctgccgtgaactagctagtatgatataactcagtttgtggagtgctaatgcacaaacaggaaataggatgatacttcatgtatatttttttatttcatgaaaatgaactataggatactgttcacaatccataccaagcttctgcagttatcaacatgttttctatgttc

SEQ ID NO: 217588 - DNA, 1481 bp, Zea Mays
gtgcctccctccccacgaaacccccttccccaaactaccttcgccgctctccttgatccgcaattttctcccacatctctcttctgcccacttgcctccatcttggcctccccctccactccccacccccgaacatccggcgccgtccacacccttgcaccccgactcccctcgtccttcgtggccacgatgggggcgtccatggcatcgccttaggggcgatcgatctgggagaaagtgctggagcacgtggcgtcgtaccaccagcagcaacggaggcagaagctacgcaagagcctcacctacaccggcagtgagttctcgttcgctgtccggggtcgtggggacgaccccgcctccacgtccgttggggcacagaacgaggacatgcctcttgagcacgtctttaaaatcattagatccgatggcaaaagtgtgtgtttatggttcctgagtcagatgatctttcttcagttttagatgtgatagatattagtatgaaagataaaactagaatgctatgtctgtcaaaggagctttcttcagtttcagaacacacctctccatctttcggtgctaggtggatcaccgtctaaacaatccaccaccagaaccgccctaccccaagatagccgtagtctcctccatccaacatttcctacgcatgcagctccatctcagtcgttgtacccattcaatggcgagctggtggcagcgatgtaggagatgatccatgacgaggtgcacaagtacatgttagtggacgacacctgccaaagatacacaatttctactggtacacattttattttttcatggtgagaattaatttcttagcttgcgcaaaaccaaaggtttagtgatttgtcaaggcagaaatcagtataatgataggtgtgcttgagcttttgataattggtttatttgaacttttatctttttatgatcatgatatattgagacataaatatcttacatgtacctttgcagtttttcagttggagaaaacatttaagacaatattttctcgtttgttctccatatggggcttgttccacgccacttgaaggaagaagggaatggtggtgttaagttcggacaatacatctacacatcttggagcatcggcatcaatgttttcaatcttctcaaatttcaaattattctggtctcttcgtgcaaccataaaagtttattaagtcacttatctgagtggtctaaaagtctagcatatttttgttcctctgcctgtcgagacggatcaactgacatgaataatatccagtgaatactgcaagagctattcatgatctgccgtgaactagctagtatgatataactcagtttgtggagtgctaatgcacaaacaggaaataggatgatacttcatgtatatttttttatttcatgaaaatgaactataggatactgttcacaatccataccaagcttctgcagttatcaacatgttttctatgttc

SEQ ID NO: 217589 - DNA, 2189 bp, Zea Mays
tctaccactcacaatgcagagatttttcctttcagctaaccaactaagtggtagccttccaagtacattgtcatcccttacacttttgacaagcatgtcactcaatagcaatcatttgactggagcgataccagatgtattttcagcactcactggacttgcaaatttacatattcagaacaatcaaatatctggaactcttaatgtgttgcaagatctccctttccaagatttgaacgttgaaaacaaccttttctctggtcccgtgcctgtgaaattactgaacttgccaaacttcaagaaggatgggaacccattcaatacaagcatagctccatctgcgcagcctcccatcgcgccaacaccattaccgtctatcccaccttcgtcagggcatgtcccctcaaaagaacctgcacattcttctagtgttccaggtggtagtacttcaggatcaggaaaacatactacactcaaattagttggatatattcttattggagtggtattagcagtagttcttgtgctaattgcaatgtactgtttatccaagtacaaagaaaaaaggtcgagagatgatatttatatgaaaaacaagataggaagggtacctcagaagcttggagagcctaaaatcaaggagccaccattaaaactcaagaatgatgctgagaaagaaacttcaaatgtggtttatgatccaagtccaagggatggggcagaacttagattcatcaccgacagctgtacctttggctgttacaatgaataaaaaagagcatgtgattgatatggaaaaggctgataattttgttgaggaccaactgcatcctccgcagccgatggcactgcggactgaaaaagtcactgtcaatcccagtgtacgtacaagaaggggaagagtaccttcagttgaaaaggtggaatcgacgactactgtcaagtccttttccattgcatcccttcaacaatataccaatagtttcagtgaggaaaatatcataagagacagcaggtttggtaaggtgtatctggcaaagcttcctgatggagagctactggaaattttgaagattgactcttctaactcaaaagtgccagtagatgcctttcttgagctagttgtgaggatttctgaactgaggcatcctaacatacttggtcttgttggatactgtgcggagtttgagcagcgattacttgtctatgagtactgtagcaagatgaccctacatgatgaacttcgtcatgtggatgactcaagcaagccattatcgtggaatgctcgcctccaagttgcttcagaggcagcaaaagcattgcaacatcttcatgacggttgccaaccaccagttgtacaccagaattttgaaccctctgttgttctgctcaacagcaccttagttgtgcatatttctgaatgtggccttgcatcactagcatcaaaatcagtttctcagttgtctggacacaccttattccattatgaagcacctgaagtgcatgaatctggatcagtaagcgatcgaagtgatgtttacagcttcggtgtagttatgttggagcttctaacaggacgtaaaccttatgacagttcgtatccacgagctgaacaacatctagtacgatgggccacttctcaactctatgatattgatgccataacgaagatggttgatccttccattcgaggacaatgttctgataaggcattatcccgttttgctgacattattagccgctgcattcagcatgaaccagaattcaggccaccaatgtctgaagttgtccaagacttaactcgcatgatgcctttgacgaccattgatgcggtagtaggatattttggccaatgcaaaatgggtggaacacagtggcaggatgcagagactgcaccacgttttgtccactgccagtaatgctcctctgaatctctggtcaatttatagttcaaagctattgttgtaattctgtagtctgcactctgcacaatatatttcttagtgcccagttccagatcacgtggtgtgattatgcgtggttatctagaccatatgtaaataccaagaagttaaacaaatgtattatagcgtgcttgtttgaggaatgagaaagtacatcttcttactcctcactttattatttgatttgttaaatgaaatgagttggtccatcatatttcattcttt

SEQ ID NO: 217590 - DNA, 2977 bp, Zea Mays
caaagactcaacacaagcgcccccctcgtcgcagtcccgccgttacatggcccgctctgttcccctttccggcgcccgcgacggactgcgacgagcggatagatagatctgtgccccgtccctgtctcgccatcctcctttctcctcctccactccctatcgactatcgagcagagcgaatccttagcggggaagtctttccgagctcagggagtggggtttaaaacgcggctcgacgaaaggaaggccgcactcgctgctgctgctggtcgcttgctttcggtggcgagcgtctcggtaaagcggcgtcggcgtcggaggcggcggcagagactggacttgcttgctccttgctgcgcagtgtagtgctgtgctaccttggagacaggatcctgccgcagggactcataattgatcagtgtgccccaacataagagcgaaacgtgactgagtttgccagctcccccttcatccactgtggtcgctcgtctgctaatgcccgcatcggaggattgctcacggatatgcttctggtgatgggcaacccggggcgctcgcggcagttgtcagcgctggttgcttccgccgccatcttgctgtcactgtccgcgttgccaatttgtcggccctacacctacgagcaagatgtgtttgcgataaacggcttgtacacggcacttggagcaccacagctgcctaattggacttcaaatggtggtgacccctgcaatgaaggctggcaaggtgtttcatgtgtagcgtcaaatataacctccataattctcagcggtgcaaatttaggtggacagctgggcaacactttggggaattttacatcattaatcaccttggatctcagcaacaacaatattggagggaccataccagatggtctaccactcacaatgcagagatttttcctttcagctaaccaactaagtggtagccttccaagtacattgtcatcccttacacttttgacaagcatgtcactcaatagcaatcatttgactggagcgataccagatgtattttcagcactcactggacttgcaaatttagatttttctgataacaatttgaccggtccgttgccaccttcaatgggaaatttgacatcattgactagcctacatattcagaacaatcaaatatctggaactcttaatgtgttgcaagatctccctttccaagatttgaacgttgaaaacaaccttttctctggtcccgtgcctgtgaaattactgaacttgccaaacttcaagaaggatgggaacccattcaatacaagcatagctccatctgcgcagcctcccatcgcgccaacaccattaccgtctatcccaccttcgtcagggcatgtcccctcaaaagaacctgcacattcttctagtgttccaggtggtagtacttcaggatcaggaaaacatactacactcaaattagttggatatattcttattggagtggtattagcagtagttcttgtgctaattgcaatgtactgtttatccaagtacaaagaaaaaaggtcgagagatgatatttatatgaaaaacaagataggaagggtacctcagaagcttggagagcctaaaatcaaggagccaccattaaaactcaagaatgatgctgagaaagctccgaatgttgtttctgatggaagagaggagcataagttaaaagtgccaacatcagaaacttcaaatgtggtttatgatccaagtccaagggatggggcagaacttagattcatcaccgacagccgatggcactgcggactgaaaaagtcactgtcaatcccagtgtacgtacaagaaggggaagagtaccttcagttgaaaaggtggaatcgacgactactgtcaagtccttttccattgcatcccttcaacaatataccaatagtttcagtgaggaaaatatcataagagacagcaggtttggtaaggtgtatctggcaaagcttcctgatggagagcgattacttgtctatgagtactgtagcaagatgaccctacatgatgaacttcgtcatgtggatgactcaagcaagccattatcgtggaatgctcgcctccaagttgcttcagaggcagcaaaagcattgcaacatcttcatgacggttgccaaccaccagttgtacaccagaattttgaaccctctgttgttctgctcaacagcaccttagttgtgcatatttctgaatgtggccttgcatcactagcatcaaaatcagtttctcagttgtctggacacaccttattccattatgaagcacctgaagtgcatgaatctggatcagtaagcgatcgaagtgatgtttacagcttcggtgtagttatgttggagcttctaacaggacgtaaaccttatgacagttcgtatccacgagctgaacaacatctagtacgatgggccacttctcaactctatgatattgatgccataacgaagatggttgatccttccattcgaggacaatgttctgataaggcattatcccgttttgctgacattattagccgctgcattcagcatgaaccagaattcaggccaccaatgtctgaagttgtccaagacttaactcgcatgatgcctttgacgaccattgatgcggtagtaggatattttggccaatgcaaaatgggtggaacacagtggcaggatgcagagactgcaccacgttttgtccactgccagtaatgctcctctgaatctctggtcaatttatagttcaaagctattgttgtaattctgtagtctgcactctgcacaatatatttcttagtgcccagttccagatcacgtggtgtgattatgcgtggttatctagaccatatgtaaataccaagaagttaaacaaatgtattatagcgtgcttgtttgaggaatgagaaagtacatcttcttactcctcactttattatttgatttgttaaatgaaatgagttggtccatcatatttcattcttt

SEQ ID NO: 217591 - DNA, 3011 bp, Zea Mays
caaagactcaacacaagcgcccccctcgtcgcagtcccgccgttacatggcccgctctgttcccctttccggcgcccgcgacggactgcgacgagcggatagatagatctgtgccccgtccctgtctcgccatcctcctttctcctcctccactccctatcgactatcgagcagagcgaatccttagcggggaagtctttccgagctcagggagtggggtttaaaacgcggctcgacgaaaggaaggccgcactcgctgctgctgctggtcgcttgctttcggtggcgagcgtctcggtaaagcggcgtcggcgtcggaggcggcggcagagactggacttgcttgctccttgctgcgcagtgtagtgctgtgctaccttggagacaggatcctgccgcagggactcataattgatcagtgtgccccaacataagagcgaaacgtgactgagtttgccagctcccccttcatccactgtggtcgctcgtctgctaatgcccgcatcggaggattgctcacggatatgcttctggtgatgggcaacccggggcgctcgcggcagttgtcagcgctggttgcttccgccgccatcttgctgtcactgtccgcgttgccaatttgtcggccctacacctacgagcaagatgtgtttgcgataaacggcttgtacacggcacttggagcaccacagctgcctaattggacttcaaatggtggtgacccctgcaatgaaggctggcaaggtgtttcatgtgtagcgtcaaatataacctccataattctcagcggtgcaaatttaggtggacagctgggcaacactttggggaattttacatcattaatcacctttttcctttcagctaaccaactaagtggtagccttccaagtacattgtcatcccttacacttttgacaagcatgtcactcaatagcaatcatttgactggagcgataccagatgtattttcagcactcactggacttgcaaatttacatattcagaacaatcaaatatctggaactcttaatgtgttgcaagatctccctttccaagatttgaacgttgaaaacaaccttttctctggtcccgtgcctgtgaaattactgaacttgccaaacttcaagatgggaacccattcaatacaagcatagctccatctgcgcagcctcccatcgcgccaacaccattaccgtctatcccaccttcgtcagggcatgtcccctcaaaagaacctgcacattcttctagtgttccaggtggtagtacttcaggatcaggaaaacatactacactcaaattagttggatatattcttattggagtggtattagcagtagttcttgtgctaattgcaatgtactgtttatccaagtacaaagaaaaaaggtcgagagatgatatttatatgaaaaacaagataggaagggtacctcagaagcttggagagcctaaaatcaaggagccaccattaaaactcaagaatgatgctgagaaagaaacttcaaatgtggtttatgatccaagtccaagggatggggcagaacttagattcatcaccgacagctgtacctttggctgttacaatgaataaaaaagagcatgtgattgatatggaaaaggctgataattttgttgaggaccaactgcatcctccgcagccgatggcactgcggactgaaaaagtcactgtcaatcccagtgtacgtacaagaaggggaagagtaccttcagttgaaaaggtggaatcgacgactactgtcaagtccttttccattgcatcccttcaacaatataccaatagtttcagtgaggaaaatatcataagagacagcaggtttggtaaggtgtatctggcaaagcttcctgatggagagctactggaaattttgaagattgactcttctaactcaaaagtgccagtagatgcctttcttgagctagttgtgaggatttctgaactgaggcatcctaacatacttggtcttgttggatactgtgcggagtttgagcagcgattacttgtctatgagtactgtagcaagatgaccctacatgatgaacttcgtcatgtggatgactcaagcaagccattatcgtggaatgctcgcctccaagttgcttcagaggcagcaaaagcattgcaacatcttcatgacggttgccaaccaccagttgtacaccagaattttgaaccctctgttgttctgctcaacagcaccttagttgtgcatatttctgaatgtggccttgcatcactagcatcaaaatcagtttctcagttgtctggacacaccttattccattatgaagcacctgaagtgcatgaatctggatcagtaagcgatcgaagtgatgtttacagcttcggtgtagttatgttggagcttctaacaggacgtaaaccttatgacagttcgtatccacgagctgaacaacatctagtacgatgggccacttctcaactctatgatattgatgccataacgaagatggttgatccttccattcgaggacaatgttctgataaggcattatcccgttttgctgacattattagccgctgcattcagcatgaaccagaattcaggccaccaatgtctgaagttgtccaagacttaactcgcatgatgcctttgacgaccattgatgcggtagtaggatattttggccaatgcaaaatgggtggaacacagtggcaggatgcagagactgcaccacgttttgtccactgccagtaatgctcctctgaatctctggtcaatttatagttcaaagctattgttgtaattctgtagtctgcactctgcacaatatatttcttagtgcccagttccagatcacgtggtgtgattatgcgtggttatctagaccatatgtaaataccaagaagttaaacaaatgtattatagcgtgcttgtttgaggaatgagaaagtacatcttcttactcctcactttattatttgatttgttaaatgaaatgagttggtccatcatatttcattcttt

SEQ ID NO: 217592 - DNA, 2998 bp, Zea Mays
cgcgcacaaagactcaacacaagcgcccccctcgtcgcagtcccgccgttacatggcccgctctgttcccctttccggcgcccgcgacggactgcgacgagcggatagatagatctgtgccccgtccctgtctcgccatcctcctttctcctcctccactccctatcgactatcgagcagagcgaatccttagcggggaagtctttccgagctcagggagtggggtttaaaacgcggctcgacgaaaggaaggccgcactcgctgctgctgctggtcgcttgctttcggtggcgagcgtctcggtaaagcggcgtcggcgtcggaggcggcggcagagactggacttgcttgctccttgctgcgcagtgtagtgctgtgctaccttggagacaggatcctgccgcagggactcataattgatcagtgtgccccaacataagagcgaaacgtgactgagtttgccagctcccccttcatccactgtggtcgctcgtctgctaatgcccgcatcggaggattgctcacggatatgcttctggtgatgggcaacccggggcgctcgcggcagttgtcagcgctggttgcttccgccgccatcttgctgtcactgtccgcgttgccaatttgtcggccctacacctacgagcaagatgtgtttgcgataaacggcttgtacacggcacttggagcaccacagctgcctaattggacttcaaatggtggtgacccctgcaatgaaggctggcaaggtgtttcatgtgtagcgtcaaatataacctccataattctcagcggtgcaaatttaggtggacagctgggcaacactttggggaattttacatcattaatcaccttggatctcagcaacaacaatattggagggaccataccagatggtctaccactcacaatgcagagatttttcctttcagctaaccaactaagtggtagccttccaagtacattgtcatcccttacacttttgacaagcatgtcactcaatagcaatcatttgactggagcgataccagatgtattttcagcactcactggacttgcaaatttagatttttctgataacaatttgaccggtccgttgccaccttcaatgggaaatttgacatcattgactagcctacatattcagaacaatcaaatatctggaactcttaatgtgttgcaagatctccctttccaagatttgaacgttgaaaacaaccttttctctggtcccgtgcctgtgaaattactgaacttgccaaacttcaagaaggatgggaacccattcaatacaagcatagctccatctgcgcagcctcccatcgcgccaacaccattaccgtctatcccaccttcgtcagggcatgtcccctcaaaagaacctgcacattcttctagtgttccagaaaaaaggtcgagagatgatatttatatgaaaaacaagataggaagggtacctcagaagcttggagagcctaaaatcaaggagccaccattaaaactcaagaatgatgctgagaaagctccgaatgttgtttctgatggaagagaggagcataagttaaaagtgccaacatcagaaacttcaaatgtggtttatgatccaagtccaagggatggggcagaacttagattcatcaccgacagccgatggcactgcggactgaaaaagtcactgtcaatcccagtgtacgtacaagaaggggaagagtaccttcagttgaaaaggtggaatcgacgactactgtcaagtccttttccattgcatcccttcaacaatataccaatagtttcagtgaggaaaatatcataagagacagcaggtttggtaaggtgtatctggcaaagcttcctgatggagagctactggaaattttgaagattgactcttctaactcaaaagtgccagtagatgcctttcttgagctagttgtgaggatttctgaactgaggcatcctaacatacttggtcttgttggatactgtgcggagtttgagcagcgattacttgtctatgagtactgtagcaagatgaccctacatgatgaacttcgtcatgtggatgactcaagcaagccattatcgtggaatgctcgcctccaagttgcttcagaggcagcaaaagcattgcaacatcttcatgacggttgccaaccaccagttgtacaccagaattttgaaccctctgttgttctgctcaacagcaccttagttgtgcatatttctgaatgtggccttgcatcactagcatcaaaatcagtttctcagttgtctggacacaccttattccattatgaagcacctgaagtgcatgaatctggatcagtaagcgatcgaagtgatgtttacagcttcggtgtagttatgttggagcttctaacaggacgtaaaccttatgacagttcgtatccacgagctgaacaacatctagtacgatgggccacttctcaactctatgatattgatgccataacgaagatggttgatccttccattcgaggacaatgttctgataaggcattatcccgttttgctgacattattagccgctgcattcagcatgaaccagaattcaggccaccaatgtctgaagttgtccaagacttaactcgcatgatgcctttgacgaccattgatgcggtagtaggatattttggccaatgcaaaatgggtggaacacagtggcaggatgcagagactgcaccacgttttgtccactgccagtaatgctcctctgaatctctggtcaatttatagttcaaagctattgttgtaattctgtagtctgcactctgcacaatatatttcttagtgcccagttccagatcacgtggtgtgattatgcgtggttatctagaccatatgtaaataccaagaagttaaacaaatgtattatagcgtgcttgtttgaggaatgagaaagtacatcttcttactcctcactttattatttgatttgttaaatgaaatgagttggtccatcatatttcattcttt

SEQ ID NO: 217593 - DNA, 3058 bp, Zea Mays
cagcttttccgctcgcctcgcctctgcggctgcgcctgcgcgcacaaagactcaacacaagcgcccccctcgtcgcagtcccgccgttacatggcccgctctgttcccctttccggcgcccgcgacggactgcgacgagcggatagatagatctgtgccccgtccctgtctcgccatcctcctttctcctcctccactccctatcgactatcgagcagagcgaatccttagcggggaagtctttccgagctcagggagtggggtttaaaacgcggctcgacgaaaggaaggccgcactcgctgctgctgctggtcgcttgctttcggtggcgagcgtctcggtaaagcggcgtcggcgtcggaggcggcggcagagactggacttgcttgctccttgctgcgcagtgtagtgctgtgctaccttggagacaggatcctgccgcagggactcataattgatcagtgtgccccaacataagagcgaaacgtgactgagtttgccagctcccccttcatccactgtggtcgctcgtctgctaatgcccgcatcggaggattgctcacggatatgcttctggtgatgggcaacccggggcgctcgcggcagttgtcagcgctggttgcttccgccgccatcttgctgtcactgtccgcgttgccaatttgtcggccctacacctacgagcaagatgtgtttgcgataaacggcttgtacacggcacttggagcaccacagctgcctaattggacttcaaatggtggtgacccctgcaatgaaggctggcaaggtgtttcatgtgtagcgtcaaatataacctccataattctcagcggtgcaaatttaggtggacagctgggcaacactttggggaattttacatcattaatcacctttttcctttcagctaaccaactaagtggtagccttccaagtacattgtcatcccttacacttttgacaagcatgtcactcaatagcaatcatttgactggagcgataccagatgtattttcagcactcactggacttgcaaatttagatttttctgataacaatttgaccggtccgttgccaccttcaatgggaaatttgacatcattgactagcctacatattcagaacaatcaaatatctggaactcttaatgtgttgcaagatctccctttccaagatttgaacgttgaaaacaaccttttctctggtcccgtgcctgtgaaattactgaacttgccaaacttcaagaaggatgggaacccattcaatacaagcatagctccatctgcgcagcctcccatcgcgccaacaccattaccgtctatcccaccttcgtcagggcatgtcccctcaaaagaacctgcacattcttctagtgttccaggtcgagagatgatatttatatgaaaaacaagataggaagggtacctcagaagcttggagagcctaaaatcaaggagccaccattaaaactcaagaatgatgctgagaaagctccgaatgttgtttctgatggaagagaggagcataagttaaaagtgccaacatcagaaacttcaaatgtggtttatgatccaagtccaagggatggggcagaacttagattcatcaccgacagctgtacctttggctgttacaatgaataaaaaagagcatgtgattgatatggaaaaggctgataattttgttgaggaccaactgcatcctccgcagccgatggcactgcggactgaaaaagtcactgtcaatcccagtgtacgtacaagaaggggaagagtaccttcagttgaaaaggtggaatcgacgactactgtcaagtccttttccattgcatcccttcaacaatataccaatagtttcagtgaggaaaatatcataagagacagcaggtttggtaaggtgtatctggcaaagcttcctgatggagagctactggaaattttgaagattgactcttctaactcaaaagtgccagtagatgcctttcttgagctagttgtgaggatttctgaactgaggcatcctaacatacttggtcttgttggatactgtgcggagtttgagcagcgattacttgtctatgagtactgtagcaagatgaccctacatgatgaacttcgtcatgtggatgactcaagcaagccattatcgtggaatgctcgcctccaagttgcttcagaggcagcaaaagcattgcaacatcttcatgacggttgccaaccaccagttgtacaccagaattttgaaccctctgttgttctgctcaacagcaccttagttgtgcatatttctgaatgtggccttgcatcactagcatcaaaatcagtttctcagttgtctggacacaccttattccattatgaagcacctgaagtgcatgaatctggatcagtaagcgatcgaagtgatgtttacagcttcggtgtagttatgttggagcttctaacaggacgtaaaccttatgacagttcgtatccacgagctgaacaacatctagtacgatgggccacttctcaactctatgatattgatgccataacgaagatggttgatccttccattcgaggacaatgttctgataaggcattatcccgttttgctgacattattagccgctgcattcagcatgaaccagaattcaggccaccaatgtctgaagttgtccaagacttaactcgcatgatgcctttgacgaccattgatgcggtagtaggatattttggccaatgcaaaatgggtggaacacagtggcaggatgcagagactgcaccacgttttgtccactgccagtaatgctcctctgaatctctggtcaatttatagttcaaagctattgttgtaattctgtagtctgcactctgcacaatatatttcttagtgcccagttccagatcacgtggtgtgattatgcgtggttatctagaccatatgtaaataccaagaagttaaacaaatgtattatagcgtgcttgtttgaggaatgagaaagtacatcttcttactcctcactttattatttgatttgttaaatgaaatgagttggtccatcatatttcattcttt

SEQ ID NO: 217594 - DNA, 3122 bp, Zea Mays
ctgcgccagcttttccgctcgcctcgcctctgcggctgcgcctgcgcgcacaaagactcaacacaagcgcccccctcgtcgcagtcccgccgttacatggcccgctctgttcccctttccggcgcccgcgacggactgcgacgagcggatagatagatctgtgccccgtccctgtctcgccatcctcctttctcctcctccactccctatcgactatcgagcagagcgaatccttagcggggaagtctttccgagctcagggagtggggtttaaaacgcggctcgacgaaaggaaggccgcactcgctgctgctgctggtcgcttgctttcggtggcgagcgtctcggtaaagcggcgtcggcgtcggaggcggcggcagagactggacttgcttgctccttgctgcgcagtgtagtgctgtgctaccttggagacaggatcctgccgcagggactcataattgatcagtgtgccccaacataagagcgaaacgtgactgagtttgccagctcccccttcatccactgtggtcgctcgtctgctaatgcccgcatcggaggattgctcacggatatgcttctggtgatgggcaacccggggcgctcgcggcagttgtcagcgctggttgcttccgccgccatcttgctgtcactgtccgcgttgccaatttgtcggccctacacctacgagcaagatgtgtttgcgataaacggcttgtacacggcacttggagcaccacagctgcctaattggacttcaaatggtggtgacccctgcaatgaaggctggcaaggtgtttcatgtgtagcgtcaaatataacctccataattctcagcggtgcaaatttaggtggacagctgggcaacactttggggaattttacatcattaatcacctttttcctttcagctaaccaactaagtggtagccttccaagtacattgtcatcccttacacttttgacaagcatgtcactcaatagcaatcatttgactggagcgataccagatgtattttcagcactcactggacttgcaaatttacatattcagaacaatcaaatatctggaactcttaatgtgttgcaagatctccctttccaagatttgaacgttgaaaacaaccttttctctggtcccgtgcctgtgaaattactgaacttgccaaacttcaagaaggatgggaacccattcaatacaagcatagctccatctgcgcagcctcccatcgcgccaacaccattaccgtctatcccaccttcgtcagggcatgtcccctcaaaagaacctgcacattcttctagtgttccaggtggtagtacttcaggatcaggaaaacatactacactcaaattagttggatatattcttattggagtggtattagcagtagttcttgtgctaattgcaatgtactgtttatccaagtacaaagaaaaaaggtcgagagatgatatttatatgaaaaacaagataggaagggtacctcagaagcttggagagcctaaaatcaaggagccaccattaaaactcaagaatgatgctgagaaagctccgaatgttgtttctgatggaagagaggagcataagttaaaagtgccaacatcagaaacttcaaatgtggtttatgatccaagtccaagggatggggcagaacttagattcatcaccgacagctgtacctttggctgttacaatgaataaaaaagagcatgtgattgatatggaaaaggctgataattttgttgaggaccaactgcatcctccgcagccgatggcactgcggactgaaaaagtcactgtcaatcccagtgtacgtacaagaaggggaagagtaccttcagttgaaaaggtggaatcgacgactactgtcaagtccttttccattgcatcccttcaacaatataccaatagtttcagtgaggaaaatatcataagagacagcaggtttggtaaggtgtatctggcaaagcttcctgatggagagctactggaaattttgaagattgactcttctaactcaaaagtgccagtagatgcctttcttgagctagttgtgaggatttctgaactgaggcatcctaacatacttggtcttgttggatactgtgcggagtttgagcagcgattacttgtctatgagtactgtagcaagatgaccctacatgatgaacttcgtcatgtggatgactcaagcaagccattatcgtggaatgctcgcctccaagttgcttcagaggcagcaaaagcattgcaacatcttcatgacggttgccaaccaccagttgtacaccagaattttgaaccctctgttgttctgctcaacagcaccttagttgtgcatatttctgaatgtggccttgcatcactagcatcaaaatcagtttctcagttgtctggacacaccttattccattatgaagcacctgaagtgcatgaatctggatcagtaagcgatcgaagtgatgtttacagcttcggtgtagttatgttggagcttctaacaggacgtaaaccttatgacagttcgtatccacgagctgaacaacatctagtacgatgggccacttctcaactctatgatattgatgccataacgaagatggttgatccttccattcgaggacaatgttctgataaggcattatcccgttttgctgacattattagccgctgcattcagcatgaaccagaattcaggccaccaatgtctgaagttgtccaagacttaactcgcatgatgcctttgacgaccattgatgcggtagtaggatattttggccaatgcaaaatgggtggaacacagtggcaggatgcagagactgcaccacgttttgtccactgccagtaatgctcctctgaatctctggtcaatttatagttcaaagctattgttgtaattctgtagtctgcactctgcacaatatatttcttagtgcccagttccagatcacgtggtgtgattatgcgtggttatctagaccatatgtaaataccaagaagttaaacaaatgtattatagcgtgcttgtttgaggaatgagaaagtacatcttcttactcctcactttattatttgatttgttaaatgaaatgagttggtccatcatatttcattcttt

SEQ ID NO: 217595 - DNA, 3015 bp, Zea Mays
cctgcgccagcttttccgctcgcctcgcctctgcggctgcgcctgcgcgcacaaagactcaacacaagcgcccccctcgtcgcagtcccgccgttacatggcccgctctgttcccctttccggcgcccgcgacggactgcgacgagcggatagatagatctgtgccccgtccctgtctcgccatcctcctttctcctcctccactccctatcgactatcgagcagagcgaatccttagcggggaagtctttccgagctcagggagtggggtttaaaacgcggctcgacgaaaggaaggccgcactcgctgctgctgctggtcgcttgctttcggtggcgagcgtctcggtaaagcggcgtcggcgtcggaggcggcggcagagactggacttgcttgctccttgctgcgcagtgtagtgctgtgctaccttggagacaggatcctgccgcagggactcataattgatcagtgtgccccaacataagagcgaaacgtgactgagtttgccagctcccccttcatccactgtggtcgctcgtctgctaatgcccgcatcggaggattgctcacggatatgcttctggtgatgggcaacccggggcgctcgcggcagttgtcagcgctggttgcttccgccgccatcttgctgtcactgtccgcgttgccaatttgtcggccctacacctacgagcaagatgtgtttgcgataaacggcttgtacacggcacttggagcaccacagctgcctaattggacttcaaatggtggtgacccctgcaatgaaggctggcaaggtgtttcatgtgtagcgtcaaatataacctccataattctcagcggtgcaaatttaggtggacagctgggcaacactttggggaattttacatcattaatcacctttttcctttcagctaaccaactaagtggtagccttccaagtacattgtcatcccttacacttttgacaagcatgtcactcaatagcaatcatttgactggagcgataccagatgtattttcagcactcactggacttgcaaatttagatttttctgataacaatttgaccggtccgttgccaccttcaatgggaaatttgacatcattgactagcctacatattcagaacaatcaaatatctggaactcttaatgtgttgcaagatctccctttccaagatttgaacgttgaaaacaaccttttctctggtcccgtgcctgtgaaattactgaacttgccaaacttcaagaaggatgggaacccattcaatacaagcatagctccatctgcgcagcctcccatcgcgccaacaccattaccgtctatcccaccttcgtcagggcatgtcccctcaaaagaacctgcacattcttctagtgttccagaaaaaaggtcgagagatgatatttatatgaaaaacaagataggaagggtacctcagaagcttggagagcctaaaatcaaggagccaccattaaaactcaagaatgatgctgagaaagaaacttcaaatgtggtttatgatccaagtccaagggatggggcagaacttagattcatcaccgacagctgtacctttggctgttacaatgaataaaaaagagcatgtgattgatatggaaaaggctgataattttgttgaggaccaactgcatcctccgcagccgatggcactgcggactgaaaaagtcactgtcaatcccagtgtacgtacaagaaggggaagagtaccttcagttgaaaaggtggaatcgacgactactgtcaagtccttttccattgcatcccttcaacaatataccaatagtttcagtgaggaaaatatcataagagacagcaggtttggtaaggtgtatctggcaaagcttcctgatggagagctactggaaattttgaagattgactcttctaactcaaaagtgccagtagatgcctttcttgagctagttgtgaggatttctgaactgaggcatcctaacatacttggtcttgttggatactgtgcggagtttgagcagcgattacttgtctatgagtactgtagcaagatgaccctacatgatgaacttcgtcatgtggatgactcaagcaagccattatcgtggaatgctcgcctccaagttgcttcagaggcagcaaaagcattgcaacatcttcatgacggttgccaaccaccagttgtacaccagaattttgaaccctctgttgttctgctcaacagcaccttagttgtgcatatttctgaatgtggccttgcatcactagcatcaaaatcagtttctcagttgtctggacacaccttattccattatgaagcacctgaagtgcatgaatctggatcagtaagcgatcgaagtgatgtttacagcttcggtgtagttatgttggagcttctaacaggacgtaaaccttatgacagttcgtatccacgagctgaacaacatctagtacgatgggccacttctcaactctatgatattgatgccataacgaagatggttgatccttccattcgaggacaatgttctgataaggcattatcccgttttgctgacattattagccgctgcattcagcatgaaccagaattcaggccaccaatgtctgaagttgtccaagacttaactcgcatgatgcctttgacgaccattgatgcggtagtaggatattttggccaatgcaaaatgggtggaacacagtggcaggatgcagagactgcaccacgttttgtccactgccagtaatgctcctctgaatctctggtcaatttatagttcaaagctattgttgtaattctgtagtctgcactctgcacaatatatttcttagtgcccagttccagatcacgtggtgtgattatgcgtggttatctagaccatatgtaaataccaagaagttaaacaaatgtattatagcgtgcttgtttgaggaatgagaaagtacatcttcttactcctcactttattatttgatttgttaaatgaaatgagttggtccatcatatttcattcttt

SEQ ID NO: 217596 - DNA, 2904 bp, Zea Mays
cgcccctgcgccagcttttccgctcgcctcgcctctgcggctgcgcctgcgcgcacaaagactcaacacaagcgcccccctcgtcgcagtcccgccgttacatggcccgctctgttcccctttccggcgcccgcgacggactgcgacgagcggatagatagatctgtgccccgtccctgtctcgccatcctcctttctcctcctccactccctatcgactatcgagcagagcgaatccttagcggggaagtctttccgagctcagggagtggggtttaaaacgcggctcgacgaaaggaaggccgcactcgctgctgctgctggtcgcttgctttcggtggcgagcgtctcggtaaagcggcgtcggcgtcggaggcggcggcagagactggacttgcttgctccttgctgcgcagtgtagtgctgtgctaccttggagacaggatcctgccgcagggactcataattgatcagtgtgccccaacataagagcgaaacgtgactgagtttgccagctcccccttcatccactgtggtcgctcgtctgctaatgcccgcatcggaggattgctcacggatatgcttctggtgatgggcaacccggggcgctcgcggcagttgtcagcgctggttgcttccgccgccatcttgctgtcactgtccgcgttgccaatttgtcggccctacacctacgagcaagatgtgtttgcgataaacggcttgtacacggcacttggagcaccacagctgcctaattggacttcaaatggtggtgacccctgcaatgaaggctggcaaggtgtttcatgtgtagcgtcaaatataacctccataattctcagcggtgcaaatttaggtggacagctgggcaacactttggggaattttacatcattaatcacctttttcctttcagctaaccaactaagtggtagccttccaagtacattgtcatcccttacacttttgacaagcatgtcactcaatagcaatcatttgactggagcgataccagatgtattttcagcactcactggacttgcaaatttagatttttctgataacaatttgaccggtccgttgccaccttcaatgggaaatttgacatcattgactagcctacatattcagaacaatcaaatatctggaactcttaatgtgttgcaagatctccctttccaagatttgaacgttgaaaacaaccttttctctggtcccgtgcctgtgaaattactgaacttgccaaacttcaagaaggatgggaacccattcaatacaagcatagctccatctgcgcagcctcccatcgcgccaacaccattaccgtctatcccaccttcgtcagggcatgtcccctcaaaagaacctgcacattcttctagtgttccaggtggtagtacttcaggatcaggaaaacatactacactcaaattagttggatatattcttattggagtggtattagcagtagttcttgtgctaattgcaatgtactgtttatccaagtacaaagaaaaaaggtcgagagatgatatttatatgaaaaacaagataggaagggtacctcagaagcttggagagcctaaaatcaaggagccaccattaaaactcaagaatgatgctgagaaagaaacttcaaatgtggtttatgatccaagtccaagggatggggcagaacttagattcatcaccgacagtttcagtgaggaaaatatcataagagacagcaggtttggtaaggtgtatctggcaaagcttcctgatggagagctactggaaattttgaagattgactcttctaactcaaaagtgccagtagatgcctttcttgagctagttgtgaggatttctgaactgaggcatcctaacatacttggtcttgttggatactgtgcggagtttgagcagcgattacttgtctatgagtactgtagcaagatgaccctacatgatgaacttcgtcatgtggatgactcaagcaagccattatcgtggaatgctcgcctccaagttgcttcagaggcagcaaaagcattgcaacatcttcatgacggttgccaaccaccagttgtacaccagaattttgaaccctctgttgttctgctcaacagcaccttagttgtgcatatttctgaatgtggccttgcatcactagcatcaaaatcagtttctcagttgtctggacacaccttattccattatgaagcacctgaagtgcatgaatctggatcagtaagcgatcgaagtgatgtttacagcttcggtgtagttatgttggagcttctaacaggacgtaaaccttatgacagttcgtatccacgagctgaacaacatctagtacgatgggccacttctcaactctatgatattgatgccataacgaagatggttgatccttccattcgaggacaatgttctgataaggcattatcccgttttgctgacattattagccgctgcattcagcatgaaccagaattcaggccaccaatgtctgaagttgtccaagacttaactcgcatgatgcctttgacgaccattgatgcggtagtaggatattttggccaatgcaaaatgggtggaacacagtggcaggatgcagagactgcaccacgttttgtccactgccagtaatgctcctctgaatctctggtcaatttatagttcaaagctattgttgtaattctgtagtctgcactctgcacaatatatttcttagtgcccagttccagatcacgtggtgtgattatgcgtggttatctagaccatatgtaaataccaagaagttaaacaaatgtattatagcgtgcttgtttgaggaatgagaaagtacatcttcttactcctcactttattatttgatttgttaaatgaaatgagttggtccatcatatttcattcttt

SEQ ID NO: 217597 - DNA, 3032 bp, Zea Mays
ccctgcgcccctgcgccagcttttccgctcgcctcgcctctgcggctgcgcctgcgcgcacaaagactcaacacaagcgcccccctcgtcgcagtcccgccgttacatggcccgctctgttcccctttccggcgcccgcgacggactgcgacgagcggatagatagatctgtgccccgtccctgtctcgccatcctcctttctcctcctccactccctatcgactatcgagcagagcgaatccttagcggggaagtctttccgagctcagggagtggggtttaaaacgcggctcgacgaaaggaaggccgcactcgctgctgctgctggtcgcttgctttcggtggcgagcgtctcggtaaagcggcgtcggcgtcggaggcggcggcagagactggacttgcttgctccttgctgcgcagtgtagtgctgtgctaccttggagacaggatcctgccgcagggactcataattgatcagtgtgccccaacataagagcgaaacgtgactgagtttgccagctcccccttcatccactgtggtcgctcgtctgctaatgcccgcatcggaggattgctcacggatatgcttctggtgatgggcaacccggggcgctcgcggcagttgtcagcgctggttgcttccgccgccatcttgctgtcactgtccgcgttgccaatttgtcggccctacacctacgagcaagatgtgtttgcgataaacggcttgtacacggcacttggagcaccacagctgcctaattggacttcaaatggtggtgacccctgcaatgaaggctggcaaggtgtttcatgtgtagcgtcaaatataacctccataattctcagcggtgcaaatttaggtggacagctgggcaacactttggggaattttacatcattaatcaccttggatctcagcaacaacaatattggagggaccataccagatggtctaccactcacaatgcagagatttttcctttcagctaaccaactaagtggtagccttccaagtacattgtcatcccttacacttttgacaagcatgtcactcaatagcaatcatttgactggagcgataccagatgtattttcagcactcactggacttgcaaatttagatttttctgataacaatttgaccggtccgttgccaccttcaatgggaaatttgacatcattgactagcctacatattcagaacaatcaaatatctggaactcttaatgtgttgcaagatctccctttccaagatttgaacgttgaaaacaaccttttctctggtcccgtgcctgtgaaattactgaacttgccaaacttcaagaaggatgggaacccattcaatacaagcatagctccatctgcgcagcctcccatcgcgccaacaccattaccgtctatcccaccttcgtcagggcatgtcccctcaaaagaacctgcacattcttctagtgttccaggtggtagtacttcaggatcaggaaaacatactacactcaaattagttggatatattcttattggagtggtattagcagtagttcttgtgctaattgcaatgtactgtttatccaagtacaaagaaaaaaggtcgagagatgatatttatatgaaaaacaagataggaagggtacctcagaagcttggagagcctaaaatcaaggagccaccattaaaactcaagaatgatgctgagaaagctccgaatgttgtttctgatggaagagaggagcataagttaaaagtgccaacatcagaaacttcaaatgtggtttatgatccaagtccaagggatggggcagaacttagattcatcaccgacagtttcagtgaggaaaatatcataagagacagcaggtttggtaaggtgtatctggcaaagcttcctgatggagagctactggaaattttgaagattgactcttctaactcaaaagtgccagtagatgcctttcttgagctagttgtgaggatttctgaactgaggcatcctaacatacttggtcttgttggatactgtgcggagtttgagcagcgattacttgtctatgagtactgtagcaagatgaccctacatgatgaacttcgtcatgtggatgactcaagcaagccattatcgtggaatgctcgcctccaagttgcttcagaggcagcaaaagcattgcaacatcttcatgacggttgccaaccaccagttgtacaccagaattttgaaccctctgttgttctgctcaacagcaccttagttgtgcatatttctgaatgtggccttgcatcactagcatcaaaatcagtttctcagttgtctggacacaccttattccattatgaagcacctgaagtgcatgaatctggatcagtaagcgatcgaagtgatgtttacagcttcggtgtagttatgttggagcttctaacaggacgtaaaccttatgacagttcgtatccacgagctgaacaacatctagtacgatgggccacttctcaactctatgatattgatgccataacgaagatggttgatccttccattcgaggacaatgttctgataaggcattatcccgttttgctgacattattagccgctgcattcagcatgaaccagaattcaggccaccaatgtctgaagttgtccaagacttaactcgcatgatgcctttgacgaccattgatgcggtagtaggatattttggccaatgcaaaatgggtggaacacagtggcaggatgcagagactgcaccacgttttgtccactgccagtaatgctcctctgaatctctggtcaatttatagttcaaagctattgttgtaattctgtagtctgcactctgcacaatatatttcttagtgcccagttccagatcacgtggtgtgattatgcgtggttatctagaccatatgtaaataccaagaagttaaacaaatgtattatagcgtgcttgtttgaggaatgagaaagtacatcttcttactcctcactttattatttgatttgttaaatgaaatgagttggtccatcatatttcattcttt

SEQ ID NO: 217598 - DNA, 2844 bp, Zea Mays
cccctgcgcccctgcgccagcttttccgctcgcctcgcctctgcggctgcgcctgcgcgcacaaagactcaacacaagcgcccccctcgtcgcagtcccgccgttacatggcccgctctgttcccctttccggcgcccgcgacggactgcgacgagcggatagatagatctgtgccccgtccctgtctcgccatcctcctttctcctcctccactccctatcgactatcgagcagagcgaatccttagcggggaagtctttccgagctcagggagtggggtttaaaacgcggctcgacgaaaggaaggccgcactcgctgctgctgctggtcgcttgctttcggtggcgagcgtctcggtaaagcggcgtcggcgtcggaggcggcggcagagactggacttgcttgctccttgctgcgcagtgtagtgctgtgctaccttggagacaggatcctgccgcagggactcataattgatcagtgtgccccaacataagagcgaaacgtgactgagtttgccagctcccccttcatccactgtggtcgctcgtctgctaatgcccgcatcggaggattgctcacggatatgcttctggtgatgggcaacccggggcgctcgcggcagttgtcagcgctggttgcttccgccgccatcttgctgtcactgtccgcgttgccaatttgtcggccctacacctacgagcaagatgtgtttgcgataaacggcttgtacacggcacttggagcaccacagctgcctaattggacttcaaatggtggtgacccctgcaatgaaggctggcaaggtgtttcatgtgtagcgtcaaatataacctccataattctcagcggtgcaaatttaggtggacagctgggcaacactttggggaattttacatcattaatcacctttttcctttcagctaaccaactaagtggtagccttccaagtacattgtcatcccttacacttttgacaagcatgtcactcaatagcaatcatttgactggagcgataccagatgtattttcagcactcactggacttgcaaatttagatttttctgataacaatttgaccggtccgttgccaccttcaatgggaaatttgacatcattgactagcctacatattcagaacaatcaaatatctggaactcttaatgtgttgcaagatctccctttccaagatttgaacgttgaaaacaaccttttctctggtcccgtgcctgtgaaattactgaacttgccaaacttcaagaaggatgggaacccattcaatacaagcatagctccatctgcgcagcctcccatcgcgccaacaccattaccgtctatcccaccttcgtcagggcatgtcccctcaaaagaacctgcacattcttctagtgttccagaaaaaaggtcgagagatgatatttatatgaaaaacaagataggaagggtacctcagaagcttggagagcctaaaatcaaggagccaccattaaaactcaagaatgatgctgagaaagctccgaatgttgtttctgatggaagagaggagcataagttaaaagtgccaacatcagaaacttcaaatgtggtttatgatccaagtccaagggatggggcagaacttagattcatcaccgacagtttcagtgaggaaaatatcataagagacagcaggtttggtaaggtgtatctggcaaagcttcctgatggagagctactggaaattttgaagattgactcttctaactcaaaagtgccagtagatgcctttcttgagctagttgtgaggatttctgaactgaggcatcctaacatacttggtcttgttggatactgtgcggagtttgagcagcgattacttgtctatgagtactgtagcaagatgaccctacatgatgaacttcgtcatgtggatgactcaagcaagccattatcgtggaatgctcgcctccaagttgcttcagaggcagcaaaagcattgcaacatcttcatgacggttgccaaccaccagttgtacaccagaattttgaaccctctgttgttctgctcaacagcaccttagttgtgcatatttctgaatgtggccttgcatcactagcatcaaaatcagtttctcagttgtctggacacaccttattccattatgaagcacctgaagtgcatgaatctggatcagtaagcgatcgaagtgatgtttacagcttcggtgtagttatgttggagcttctaacaggacgtaaaccttatgacagttcgtatccacgagctgaacaacatctagtacgatgggccacttctcaactctatgatattgatgccataacgaagatggttgatccttccattcgaggacaatgttctgataaggcattatcccgttttgctgacattattagccgctgcattcagcatgaaccagaattcaggccaccaatgtctgaagttgtccaagacttaactcgcatgatgcctttgacgaccattgatgcggtagtaggatattttggccaatgcaaaatgggtggaacacagtggcaggatgcagagactgcaccacgttttgtccactgccagtaatgctcctctgaatctctggtcaatttatagttcaaagctattgttgtaattctgtagtctgcactctgcacaatatatttcttagtgcccagttccagatcacgtggtgtgattatgcgtggttatctagaccatatgtaaataccaagaagttaaacaaatgtattatagcgtgcttgtttgaggaatgagaaagtacatcttcttactcctcactttattatttgatttgttaaatgaaatgagttggtccatcatatttcattcttt

SEQ ID NO: 217599 - DNA, 3148 bp, Zea Mays
cccctgcgcccctgcgccagcttttccgctcgcctcgcctctgcggctgcgcctgcgcgcacaaagactcaacacaagcgcccccctcgtcgcagtcccgccgttacatggcccgctctgttcccctttccggcgcccgcgacggactgcgacgagcggatagatagatctgtgccccgtccctgtctcgccatcctcctttctcctcctccactccctatcgactatcgagcagagcgaatccttagcggggaagtctttccgagctcagggagtggggtttaaaacgcggctcgacgaaaggaaggccgcactcgctgctgctgctggtcgcttgctttcggtggcgagcgtctcggtaaagcggcgtcggcgtcggaggcggcggcagagactggacttgcttgctccttgctgcgcagtgtagtgctgtgctaccttggagacaggatcctgccgcagggactcataattgatcagtgtgccccaacataagagcgaaacgtgactgagtttgccagctcccccttcatccactgtggtcgctcgtctgctaatgcccgcatcggaggattgctcacggatatgcttctggtgatgggcaacccggggcgctcgcggcagttgtcagcgctggttgcttccgccgccatcttgctgtcactgtccgcgttgccaatttgtcggccctacacctacgagcaagatgtgtttgcgataaacggcttgtacacggcacttggagcaccacagctgcctaattggacttcaaatggtggtgacccctgcaatgaaggctggcaaggtgtttcatgtgtagcgtcaaatataacctccataattctcagcggtgcaaatttaggtggacagctgggcaacactttggggaattttacatcattaatcaccttggatctcagcaacaacaatattggagggaccataccagatggtctaccactcacaatgcagagatttttcctttcagctaaccaactaagtggtagccttccaagtacattgtcatcccttacacttttgacaagcatgtcactcaatagcaatcatttgactggagcgataccagatgtattttcagcactcactggacttgcaaatttagatttttctgataacaatttgaccggtccgttgccaccttcaatgggaaatttgacatcattgactagcctacatattcagaacaatcaaatatctggaactcttaatgtgttgcaagatctccctttccaagatttgaacgttgaaaacaaccttttctctggtcccgtgcctgtgaaattactgaacttgccaaacttcaagaaggatgggaacccattcaatacaagcatagctccatctgcgcagcctcccatcgcgccaacaccattaccgtctatcccaccttcgtcagggcatgtcccctcaaaagaacctgcacattcttctagtgttccagaaaaaaggtcgagagatgatatttatatgaaaaacaagataggaagggtacctcagaagcttggagagcctaaaatcaaggagccaccattaaaactcaagaatgatgctgagaaagctccgaatgttgtttctgatggaagagaggagcataagttaaaagtgccaacatcagaaacttcaaatgtggtttatgatccaagtccaagggatggggcagaacttagattcatcaccgacagctgtacctttggctgttacaatgaataaaaaagagcatgtgattgatatggaaaaggctgataattttgttgaggaccaactgcatcctccgcagccgatggcactgcggactgaaaaagtcactgtcaatcccagtgtacgtacaagaaggggaagagtaccttcagttgaaaaggtggaatcgacgactactgtcaagtccttttccattgcatcccttcaacaatataccaatagtttcagtgaggaaaatatcataagagacagcaggtttggtaaggtgtatctggcaaagcttcctgatggagagctactggaaattttgaagattgactcttctaactcaaaagtgccagtagatgcctttcttgagctagttgtgaggatttctgaactgaggcatcctaacatacttggtcttgttggatactgtgcggagtttgagcagcgattacttgtctatgagtactgtagcaagatgaccctacatgatgaacttcgtcatgtggatgactcaagcaagccattatcgtggaatgctcgcctccaagttgcttcagaggcagcaaaagcattgcaacatcttcatgacggttgccaaccaccagttgtacaccagaattttgaaccctctgttgttctgctcaacagcaccttagttgtgcatatttctgaatgtggccttgcatcactagcatcaaaatcagtttctcagttgtctggacacaccttattccattatgaagcacctgaagtgcatgaatctggatcagtaagcgatcgaagtgatgtttacagcttcggtgtagttatgttggagcttctaacaggacgtaaaccttatgacagttcgtatccacgagctgaacaacatctagtacgatgggccacttctcaactctatgatattgatgccataacgaagatggttgatccttccattcgaggacaatgttctgataaggcattatcccgttttgctgacattattagccgctgcattcagcatgaaccagaattcaggccaccaatgtctgaagttgtccaagacttaactcgcatgatgcctttgacgaccattgatgcggtagtaggatattttggccaatgcaaaatgggtggaacacagtggcaggatgcagagactgcaccacgttttgtccactgccagtaatgctcctctgaatctctggtcaatttatagttcaaagctattgttgtaattctgtagtctgcactctgcacaatatatttcttagtgcccagttccagatcacgtggtgtgattatgcgtggttatctagaccatatgtaaataccaagaagttaaacaaatgtattatagcgtgcttgtttgaggaatgagaaagtacatcttcttactcctcactttattatttgatttgttaaatgaaatgagttggtccatcatatttcattcttt

SEQ ID NO: 217600 - DNA, 2278 bp, Zea Mays
ccgcgctcgtcgcccgagccgaggaggccgtgtagcgctgtggggtgcgcgctgcgagcactgacagggcagcgcggatggaatcgagcgaggcgccacccgtcgcgtttcctctgaggctctgacccgaccgtcgctgtcgcgctgttcctctcgggctctcgttcctcttgctccctcccgcgggccgcggccgccttcgcccgtccccgtccccgtccccgtccccgtcccaatttccaccaacctttcccaatcgccctccaggctctggcactgcgagacgtttcattagccacttagccgttcccacgacacaatcagcaccaccggtgtcctcgctgccaaggcgcccgcccgctcgtgtgacgagtggcgttcgtccaccgcccattccgcgctcagctctgagggcctcccgcccgccgcggcatcatctccggctcctctcgtcgccacgggtgtcacgaaatgatcctgacttgcttgagttgcttcttgacaccataagaagcgatccatctgtttccagttgtacacagaaaattagtgcctggaaaaataagaatggtaaggggggcgataggtgtcctaagatgaaactgcggttgcatctgttcgtcctgtgcgtgatcattatattcctggtgtacaacatggctaactttcaacataagcagacaacgttggaagcaaaatctcatccatttgatacagtgacggtgtctgacagagatgctgttaaggtgcctcaaaaggctgaggctaggattggttatttaccccatggtatagtggagtctaactctgacatggacttgaagccattgtggctgactacaagtgcacggtcaaagaagcctaaacaaaatgataattttttgattgctattgctgccggtataaatcagaaaaaaactgtggatgctattatgaagaagtttcttccagaaaattttacagctatattgttccattatgatgggaatgtcaatgggtggaatgatctaccatggagcaaaagtgtgatacatatagctgcctctaatcagactaaatggtggtttgcaaagaggttcctccatcctgctgttgtgtccatataccagtacatctttctttgggatgaagatctggaagtagataactttagcccgagaagatacttaaatatagttagatcagaagggttggagatatcacaaccaggtcttgactctaagctttctgaaattcatcaccggataactgttcgtaaaaaagcagggacctttcatagaagagttagccgggctaacaaaaagtgttcaagagaaggaccaccttgttctggatgggtcgagggcatggcaccagttttctcaaagtccgcttggcaatgtgtgtggcaccttatccagaatgatcttatccatggatggggcatcgattacaagtttgggtattgtgctcagggtgacaggacaaagaacattggcgtagttgatagtgaatttatagttcaccgaggagtgcagacattaggaggttctacaataacaaaggatggtattcgtggcaaaaatgccaagccactcggccagaaagcagctcaaatccaaagatcgagagggagggctccaggccttgatatgcgaacaaagatccggagaaaatcgcgatccgagctccgtgattttcagaagcgctgggaccgggctgcaagggaagacagaacatgggttgatccgtttgcccgctcccgaagaaagcggaagaatagaaacccacagtagatcagcataatcttcactgttacacttgcacataattccgtttgcaccttggatttagagtgtataataattgcataatcaacattgtataaattctcacagacgaaacgagaaccacacacgtgaaattttccgatgggagttgtgggttcttgtatcgaggggcaggtccaggatttaaaggatgggcattcggaattgtagttggcacaatttttttaacaacataaatttattattcatgggagcggataattatccattggacatagatgtggtataatttgttatccacatgtatgagtatgaatataataaggtattcattgatattttttttctgaacccaatgggtatcagacatgagtacaaatctatacctacgaacgtatatgagtatgagtatatattgaattttgtctcgtagttatagatttgtaaaccatatactcatgtcctaaccgtgattgctatctctagtcatacggtagggaaatgaaaag

SEQ ID NO: 217601 - DNA, 2463 bp, Zea Mays
caaaccgagcggaaaacccggtcgcgggcgtggccggaacggcagctgcgccgcctccgcgctcgtcgcccgagccgaggaggccgtgtagcgctgtggggtgcgcgctgcgagcactgacagggcagcgcggatggaatcgagcgaggcgccacccgtcgcgtttcctctgaggctctgacccgaccgtcgctgtcgcgctgttcctctcgggctctcgttcctcttgctccctcccgcgggccgcggccgccttcgcccgtccccgtccccgtccccgtccccgtcccaatttccaccaacctttcccaatcgccctccaggctctggcactgcgagacgtttcattagccacttagccgttcccacgacacaatcagcaccaccggtgtcctcgctgccaaggcgcccgcccgctcgtgtgacgagtggcgttcgtccaccgcccattccgcgctcagctctgagggcctcccgcccgccgcggcatcatctccggctcctctcgtcaatggtaaggggggcgataggtgtcctaagatgaaactgcggttgcatctgttcgtcctgtgcgtgatcattatattcctggtgtacaacatggctaactttcaacataagcagacaacgttggaagcaaaatctcatccatttgatacagtgacggtgtctgacagagatgctgttaaggtgcctcaaaaggctgaggctaggattggttatttaccccatggtatagtggagtctaactctgacatggacttgaagccattgtggctgactacaagtgcacggtcaaagaagcctaaacaaaatgataattttttgattgctattgctgccggtataaatcagaaaaaaactgtggatgctattatgaagaagtttcttccagaaaattttacagctatattgttccattatgatgggaatgtcaatgggtggaatgatctaccatggagcaaaagtgtgatacatatagctgcctctaatcagactaaatggtggtttgcaaagaggttcctccatcctgctgttgtgtccatataccagtacatctttctttgggatgaagatctggaagtagataactttagcccgagaagatacttaaatatagttagatcagaagggttggagatatcacaaccaggtcttgactctaagctttctgaaattcatcaccggataactgttcgtaaaaaagcagggacctttcatagaagagttagccgggctaacaaaaagtgttcaagagaaggaccaccttgttctggatgggtcgagggcatggcaccagttttctcaaagtccgcttggcaatgtgtgtggcaccttatccagaatgatcttatccatggatggggcatcgattacaagtttgggtattgtgctcagggtgacaggacaaagaacattggcgtagttgatagtgaatttatagttcaccgaggagtgcagacattaggaggttctacaataacaaaggatggtattcgtggcaaaaatgccaagccactcggccagaaagcagctcaaatccaaagatcgagagggagggctccaggccttgatatgcgaacaaaggtgagctaacaaagcacttggtatacgtcgtttgaagtgtttaactcgaaaaatgttggtggaagctgaaaattcagagttcaaaaacctatcacttcgcttgtaaaactgctgttccgcttcagttgacagtaacagctcagtaatcaatagctacccagattatgcaatgcgtcggaatttacattccatcccatcgatcagccctcacggtttgctgcaatttttttcgatcttgcagatccggagaaaatcgcgatccgagctccgtgattttcagaagcgctgggaccgggctgcaagggaagacagaacatgggttgatccgtttgcccgctcccgaagaaagcggaagaatagaaacccacagtagatcagcataatcttcactgttacacttgcacataattccgtttgcaccttggatttagagtgtataataattgcataatcaacattgtataaattctcacagacgaaacgagaaccacacacgtgaaattttccgatgggagttgtgggttcttgtatcgaggggcaggtccaggatttaaaggatgggcattcggaattgtagttggcacaatttttttaacaacataaatttattattcatgggagcggataattatccattggacatagatgtggtataatttgttatccacatgtatgagtatgaatataataaggtattcattgatattttttttctgaacccaatgggtatcagacatgagtacaaatctatacctacgaacgtatatgagtatgagtatatattgaattttgtctcgtagttatagatttgtaaaccatatactcatgtcctaaccgtgattgctatctctagtcatacggtagggaaatgaaaag

SEQ ID NO: 217602 - DNA, 2215 bp, Zea Mays
caacaaaccgagcggaaaacccggtcgcgggcgtggccggaacggcagctgcgccgcctccgcgctcgtcgcccgagccgaggaggccgtgtagcgctgtggggtgcgcgctgcgagcactgacagggcagcgcggatggaatcgagcgaggcgccacccgtcgcgtttcctctgaggctctgacccgaccgtcgctgtcgcgctgttcctctcgggctctcgttcctcttgctccctcccgcgggccgcggccgccttcgcccgtccccgtccccgtccccgtccccgtcccaatttccaccaacctttcccaatcgccctccaggctctggcactgcgagacgtttcattagccacttagccgttcccacgacacaatcagcaccaccggtgtcctcgctgccaaggcgcccgcccgctcgtgtgacgagtggcgttcgtccaccgcccattccgcgctcagctctgagggcctcccgcccgccgcggcatcatctccggctcctctcgtcaatggtaaggggggcgataggtgtcctaagatgaaactgcggttgcatctgttcgtcctgtgcgtgatcattatattcctggtgtacaacatggctaactttcaacataagcagacaacgttggaagcaaaatctcatccatttgatacagtgacggtgtctgacagagatgctgttaaggtgcctcaaaaggctgaggctaggattggttatttaccccatggtatagtggagtctaactctgacatggacttgaagccattgtggctgactacaagtgcacggtcaaagaagcctaaacaaaatgataattttttgattgctattgctgccggtataaatcagaaaaaaactgtggatgctattatgaagaagaaaattttacagctatattgttccattatgatgggaatgtcaatgggtggaatgatctaccatggagcaaaagtgtgatacatatagctgcctctaatcagactaaatggtggtttgcaaagaggttcctccatcctgctgttgtgtccatataccagtacatctttctttgggatgaagatctggaagtagataactttagcccgagaagatacttaaatatagttagatcagaagggttggagatatcacaaccaggtcttgactctaagctttctgaaattcatcaccggataactgttcgtaaaaaagcagggacctttcatagaagagttagccgggctaacaaaaagtgttcaagagaaggaccaccttgttctggatgggtcgagggcatggcaccagttttctcaaagtccgcttggcaatgtgtgtggcaccttatccagaatgatcttatccatggatggggcatcgattacaagtttgggtattgtgctcagggtgacaggacaaagaacattggcgtagttgatagtgaatttatagttcaccgaggagtgcagacattaggaggttctacaataacaaaggatggtattcgtggcaaaaatgccaagccactcggccagaaagcagctcaaatccaaagatcgagagggagggctccaggccttgatatgcgaacaaagatccggagaaaatcgcgatccgagctccgtgattttcagaagcgctgggaccgggctgcaagggaagacagaacatgggttgatccgtttgcccgctcccgaagaaagcggaagaatagaaacccacagtagatcagcataatcttcactgttacacttgcacataattccgtttgcaccttggatttagagtgtataataattgcataatcaacattgtataaattctcacagacgaaacgagaaccacacacgtgaaattttccgatgggagttgtgggttcttgtatcgaggggcaggtccaggatttaaaggatgggcattcggaattgtagttggcacaatttttttaacaacataaatttattattcatgggagcggataattatccattggacatagatgtggtataatttgttatccacatgtatgagtatgaatataataaggtattcattgatattttttttctgaacccaatgggtatcagacatgagtacaaatctatacctacgaacgtatatgagtatgagtatatattgaattttgtctcgtagttatagatttgtaaaccatatactcatgtcctaaccgtgattgctatctctagtcatacggtagggaaatgaaaag

SEQ ID NO: 217603 - DNA, 2001 bp, Zea Mays
ctcacagcaaattcgtctcacgcatattcgtcatccagctccgtttaaaatgcgtgctcattatccctcaagcatgcatatactatatatgatgcagatcatatatgacctttatacaattatcaccacctcgattcctcgcggcacatctttgcaccgcagaacgaccgtgcagtattttatacaaacatctactctcgatctacccatgagctaactcccaatatataagcgagccgaacttttctcctatctgagcactgctgctgctgaaaatggcgcctgggcttgcgaactgggtcgcgctggttctgaccgtcctccttggtctctcgtgcctcgtcgtcgcgctctcggaggatggtttgtgccggacttgtcacgcgctctttggtatttctgcagttctgcaaacgtgtgaattggcatggacatgtgcagaaacactggacaagctgcggttcgtgcgccacgcacaggacgcgcccctggtgtcgcagtacaactacatcgtgatcggcggcggcacggcggggtgcccgctggcggcgacgctgtcggagcactcgcgcgtgctgctcctggagcgcgggggcctcccgtcccgcaacatgtccgaccagcagcacttcacggacgcgctggcggacacgtccccggcgtcgcccgcgcagcggttcgtgtccgaggacggcgtggtgaacgcgcgggcccgggtgctgggcgggggcagctgcctcaacgccgggttctacacgcgggccagcaccgactacgtgcgcgccgccggctgggacgcccgcctcgtcaactcgtcctaccgctgggtggagcgcgcgctcgtgttccgccccgccgtgcccccgtggcaggccgcgctccgcgacgcgctgctcgaggccggcgtcacgcccgacaacggcttcaccttcgaccacgtcacgggcaccaagatcgggggcaccatcttcgacagcagcggccagcgccacaccgccgccgacttcctccgccacgcgcgccccagggggctcaccgtgttcctctacgctaccgtctccaggatcctcttcagacagcaagagggcgtgccgtacccggtggcgtacggtgtggtgttcacggacccgctcggggtgcagcaccgggtgtacctccgggacggcgccaagaacgaggtgatcctgtcggcggggacgctggggagcccgcagctgctgatgctgagcggcgtcggcccgcaggcgcacctggaggcgcacggcgtccagtcccgggccttcgccaacttcacctacgccaacgcttccacggagtccatcttcaccgactccgccaacttccccgtcaacctcctgccgcggcacgtcaacgactcccggacgcccgagcagtactgcagggacaccgtcatgaccatctggcattaccacggcgggtgccaggtcggcgccgtcgtggacgacgattaccgggtgttcggcgtgcagcgactgagggtgatcgacagctccacgttcaagtactcccccggcaccaacccgcaggccaccgtcatgatgctcggaaggtatatgggtgtgaaaattcaggccgagagatggaggaaatgatcgagatttcaagtttcagcatggtctagggactaggcctctagctgtgataatgaatatcaatcaacacatctgtaactgggtaactgctctagcctctagagtaggttttatttttctctagatatttttttaatctcctctagacatactcctagcttccgcatgttgttggttccatttcaccacacccctagatgcattgttcagcatttcgcgggaataatgagaattatgctgaaaaggcatgatcgctcctcctgcctattctacagaaaattaaataaagaaccgccatttcatcaaataaaccaaaggccgtgttctgtggattggaagggatcgaggaagattaaatcgtttctatttaattttcccttaattttaa

SEQ ID NO: 217604 - DNA, 1740 bp, Zea Mays
aaagtcacacagctcacaaactggtggattcgtggcgtcacctgctaaaccatctgctattctgctcgacggctcagctctagcctccactccaggcaccggagtccgagagcccgcctacagtgatggcgcccaagcacctcaacctcttcgccgcggcgctgctcctcctcctcctcccctccggctccagcgccaccgccgtcgagtactgcaaaaaggggtgggactacccagtgaaggtgagcagcgtggaggtcgtccccgatcccgtcgtcaggggacagccggccaccttcaagatttccgcctccacagataaaaacatcactaaagggaaactaacgatagatgttgcatacttcatcttccacgtccactcggaaactcataacctctgtgatgagacttcttgcccagtaacaggtgaatttgtgctagctagccaacagacattaccatcgttcaccccgccaggttcctacaccctcacgatgaagttgctgggggacagcaacgaggaactgacctgcatctctttcgggttcagcatcgggtttgttgcgccgaatcccgtcatctgaacccagtatcgaatgtcatggatgtactttacatgaaccttgtagtgcaacattctccatggagtcagggcatcccgaggcatattttcccagagctcttctcctttgccaagaactcaaaaatgaccatcaaagaggtcaaggatcaagagcagttccatgatctttttcatttacctgtctctgatcaagcgtttgatcaatttctggtactcaaggggtcttgggagcaaattattcttaataatgttcatgaccgctggaagtatatttggggatcggacaaattctcgtcccaaaaagcttacagatctttcatgggccagatgcagactcatcctatctacaaactagtttggaaaagtaagtgtcagcctaagcatagagtcttctattggctgtggcttaagaacaggctaaacaccagaaatatgctgagaaggagaaacatggagctagattcctattcttgcgaaaactgtctttggcaaagagaggagaccctttatcatcttttcctcagatgcaacttcgcgaaagcctgctggaactcaattggcattaccccacccagaatttccaaccctgaagaggcatctgtaaacctcaaacaccagctcaacgttcccttctctatggagatcactattcttatgacttggagcatctggaaaagccgaaacgagtggctgttttcaaacagagatccctccgtgctccgctgcactcaggaatttagtagagaattgcgactaatcattcacagagcacggggagaattcgacacctcaatcccgaactggctaaatttgtggcaaatatagaaatagctcttcttttttctttctttctctcttctttttattgattgtaaaaggaacagggcctaacctttaatattcgctttctaataaaatgcgcagtaggggtttccccctcctgatccttcaaaaaaaaagtaagactcggaacgtgtgaccaactgctgtcttgcattcggagttgggcgcctgacctaacgatcttaactgcatacagttttatcatggacctaccagagtttggtgctccgtgctccatgtcagcatgccttttacatgtatataagactatgtacaacggctcccacgggcatccctctccccttgatttagcg

SEQ ID NO: 217605 - DNA, 3644 bp, Zea Mays
gcaacttcagcttgaactcggaagcagtcagcgactcacctcgtcgtcgcccggtcgccgtgcacgtagatgttcgccaagcggctcttccacagggcactcgtgcatcatcatcagggagtaggaagaggaggaggaggaggagcctcagcaccagcggcatcaccagcggatgccatccaaatggacgcgcagatctcgactcactgcggggtgccatacacagcttcactactcgccttcgatcccgtccagcgcctcctcgctgtcgcaactctggatggtaggataaaaatatttggcggtgataacattgaaggcctccttatatcaccgaagagtgtgccgtacaagtttttgcagtttattacaaaccagggacttctggttgcaatttccaatgaaaatgaaatccaggtatggaatcttgagttcaggcaactattttattcgtcacagtgggatgtcaacattactgcttttgcagtcatagagaggacctttatgatgtatcttggagatgagaatggccttctttctgtattgaagtatgatgtagatgatgggaagcttcaaataatgccatacaatgttcatatccattctctaatcgaaagatctggtgtttcgttacaggatcctcaacctattgttggaatactgatccagcctgacacttttgggacaaggttgctaattgcatatgagagagggttgttggttctttgggatgtatctgaggaccgtgcagtttctgtcagaggctatggggatttacgcatgaagggtcaaatcaatggtgctcagggggattctggtgaagatcaactaaatactactattgatgacagtgaagaagaaagagaaatttgctctctttgttgggcttcaagagagggctcaactgttgcggtgggctatataacaggtgacatacttctatgggatatgactacaaaatcctccagacaagagaagcaaagtgatgtttcatctaatgttgttaagctacagctggcctcagggagtcgtaggcttcctgttattgtcttgcattggtctgctgggtcagcagtacattctaataaaggagggcatctttttgtttatggcggcgatgatatgggatctgaagaagttctcacggttcttagcctggaatcaactgctggattagaatcagtgagatgcatgtcacgaactgatctcaaacttgatggatcatttgctgatatgattcttattcctgatactggggttcctgataaaagcagaacttctgcactttttattttgacaaatcctggacagctgaatttttatgatggtggctctctattttctgtgcaaaactcaaaagagggaactcctcttcctgaagcacagaaatttccagtcgcaattcctacccttgatcccaacataacggtcactggtctttattcgctaaccgaaagtgaatttccaaatatttcactgaagaaattttgtgctaggaaaaatgctgggcatttcatatcagagaacatgaaatggcctttgactggtggggttccaaatgagatgtcactggacgaagatcatgctgttgaaagaatatacattgcaggctaccaagatggttctgtgagaatatgggatgcaacatttcctgttctaatgccaatgtttgtcttggatggaaatgttgctgatgttaatttggatggagctaatgcttctgtatcatctctagccttttgttcattaagcatgactttggctgttgggacaacaagtggtctggtgcgcatctataaactccgagaacacactgggggttcaagcttccattttgtgagtgaatttaagcaagaagttcatgttgttcatcatgggaaaggatttcattgttatgttgcctttttgtcagcaaattcctcagtgctatctctattatttatggcttcaggtggcctccttgctgcaggctatcagaatggtcaggtggcaatgcttgatccaagtcagttatcaattctattcactgtagatggtgcatcaggaacaaattctcctgttgtttccttgggcatctacagtgttgctgcatctgctgcaaaagcagatcaatcaaagaaagataatcctcaaaatgcaacgttatccagagatgttcttctttccttgacaaaggatgctcgtgttactgtacttgactgtacaacgggtgtgatgataaattcacatatcatacatcagaagcaatcatctgctatttccatgtatgtcatagatgcagagtcagacgagacacaaacccaattatcagaggacaaaattccaagtcaaggtcagacagggaaagatggcaatgatcttgacaaaatacaaacccaaggaattgaaaagcacctgaaaaatgcttcccagctttcgcaaaatggtggttcagattcactccttgtggtgtgctgcgaggatgttttgcttttgttatccctggcgtcattgattcagggaagcagcaagcatctacagaagacgaaacttgcaaaaccttgttgctggtcagcagttttcaaaaacatggatgacaaagtttgtgggctgatattagcttatcagactggcactatagaaatgaggtttgggccagatctggctattgttgctgagacctctttgatgtcattattgcgatggagttacaagacaggcatggaaaaatccacaagctcctcaaatggacaagttactttggtaaatggatctgaatttgcgattatctctcttatggcctcagagaatgacttgaggattccagaatctctgccatgccttcatgacaaagtacttgcagcagctgcggaagcagctatgagtttctcaactgatcagagaagaaagcagaatccagcagcagggattattggtggcttcattaaaggaatgaaaggcaaggctgaagaaaatgcaaaaatgagagaaagtttgacattgcgagctccaagcgaacagttggagtcaattttctcgaaagaaccatttgctgaaccttcaatacccgaccttgatgatccgatggaagaactgtcaatcgatgacatagagattgacgatgaagtagcagtagccctggcacaagcagcatcgtccacatcccaagggaataagagaacagcagtggaggaggagagagcgaagctgtttgaagggtcaaacagtgcggataaaccgagaatgagaacgcagcaggagattctaaccaaatataggtttggcggggacgccgccgccgcagctgctcatgcgaaggataagctgatgcagaggcaggagaaactggagagaattagccaacaaaccgcggagcttcagaatggagcggagaactttgcttccctggcgcaggagctcgcgaaaacaatggagaacaagaagtggtggaagctataaactgggtttgtttgtacgtatgtgtgttgttggatgccacccgtcgttgcgaattgggacacataccagcattaccatttttttgtgtccgtattaatcactttggatattctttttgtgttttggtgatgtacgtgtaaagataaaaaagagagaatgaaaggaaccctcttctcctggctatatgagcgagtctcttattcgtc

SEQ ID NO: 217606 - DNA, 3633 bp, Zea Mays
gcaacttcagcttgaactcggaagcagtcagcgactcacctcgtcgtcgcccggtcgccgtgcacgtagatgttcgccaagcggctcttccacagggcactcgtgcatcatcatcagggagtaggaagaggaggaggaggaggagcctcagcaccagcggcatcaccagcggatgccatccaaatggacgcgcagatctcgactcactgcggggtgccatacacagcttcactactcgccttcgatcccgtccagcgcctcctcgctgtcgcaactctggatggtaggataaaaatatttggcggtgataacattgaaggcctccttatatcaccgaagagtgtgccgtacaagtttttgcagtttattacaaaccagggacttctggttgcaatttccaatgaaaatgaaatccaggtatggaatcttgagttcaggcaactattttattcgtcacagtgggatgtcaacattactgcttttgcagtcatagagaggacctttatgatgtatcttggagatgagaatggccttctttctgtattgaagtatgatgtagatgatgggaagcttcaaataatgccatacaatgttcatatccattctctaatcgaaagatctggtgtttcgttacaggatcctcaacctattgttggaatactgatccagcctgacacttttgggacaaggttgctaattgcatatgagagagggttgttggttctttgggatgtatctgaggaccgtgcagtttctgtcagaggctatggggatttacgcatgaagggtcaaatcaatggtgctcagggggattctggtgaagatcaactaaatactactattgatgacagtgaagaagaaagagaaatttgctctctttgttgggcttcaagagagggctcaactgttgcggtgggctatataacaggtgacatacttctatgggatatgactacaaaatcctccagacaagagaagcaaagtgatgtttcatctaatgttgttaagctacagctggcctcagggagtcgtaggcttcctgttattgtcttgcattggtctgctgggtcagcagtacattctaataaaggagggcatctttttgtttatggcggcgatgatatgggatctgaagaagttctcacggttcttagcctggaatcaactgctggattagaatcagtgagatgcatgtcacgaactgatctcaaacttgatggatcatttgctgatatgattcttattcctgatactggggttcctgataaaagcagaacttctgcactttttattttgacaaatcctggacagctgaatttttatgatggtggctctctattttctgtgcaaaactcaaaagagggaactcctcttcctgaagcacagaaatttccagtcgcaattcctacccttgatcccaacataacggtcactggtctttattcgctaaccgaaagtgaatttccaaatatttcactgaagaaattttgtgctaggaaaaatgctgggcatttcatatcagagaacatgaaatggcctttgactggtggggttccaaatgagatgtcactggacgaagatcatgctgttgaaagaatatacattgcaggctaccaagatggttctgtgagaatatgggatgcaacatttcctgttctaatgccaatgtttgtcttggatggaaatgttgctgatgttaatttggatggagctaatgcttctgtatcatctctagccttttgttcattaagcatgactttggctgttgggacaacaagtggtctggtgcgcatctataaactccgagaacacactgggggttcaagcttccattttgtgagtgaatttaagcaagaagttcatgttgttcatcatgggaaaggatttcattgttatgttgcctttttgtcagcaaattcctcagtgctatctctattatttatggcttcaggtggcctccttgctgcaggctatcagaatggtcaggtggcaatgcttgatccaagtcagttatcaattctattcactgtagatggtgcatcaggaacaaattctcctgttgtttccttgggcatctacagtgttgctgcatctgctgcaaaagcagatcaatcaaagaaagataatcctcaaaatgcaacgttatccagagatgttcttctttccttgacaaaggatgctcgtgttactgtacttgactgtacaacgggtgtgatgataaattcacatatcatacatcagaagcaatcatctgctatttccatatgcagagtcagacgagacacaaacccaattatcagaggacaaaattccaagtcaaggtcagacagggaaagatggcaatgatcttgacaaaatacaaacccaaggaattgaaaagcacctgaaaaatgcttcccagctttcgcaaaatggtggttcagattcactccttgtggtgtgctgcgaggatgttttgcttttgttatccctggcgtcattgattcagggaagcagcaagcatctacagaagacgaaacttgcaaaaccttgttgctggtcagcagttttcaaaaacatggatgacaaagtttgtgggctgatattagcttatcagactggcactatagaaatgaggtttgggccagatctggctattgttgctgagacctctttgatgtcattattgcgatggagttacaagacaggcatggaaaaatccacaagctcctcaaatggacaagttactttggtaaatggatctgaatttgcgattatctctcttatggcctcagagaatgacttgaggattccagaatctctgccatgccttcatgacaaagtacttgcagcagctgcggaagcagctatgagtttctcaactgatcagagaagaaagcagaatccagcagcagggattattggtggcttcattaaaggaatgaaaggcaaggctgaagaaaatgcaaaaatgagagaaagtttgacattgcgagctccaagcgaacagttggagtcaattttctcgaaagaaccatttgctgaaccttcaatacccgaccttgatgatccgatggaagaactgtcaatcgatgacatagagattgacgatgaagtagcagtagccctggcacaagcagcatcgtccacatcccaagggaataagagaacagcagtggaggaggagagagcgaagctgtttgaagggtcaaacagtgcggataaaccgagaatgagaacgcagcaggagattctaaccaaatataggtttggcggggacgccgccgccgcagctgctcatgcgaaggataagctgatgcagaggcaggagaaactggagagaattagccaacaaaccgcggagcttcagaatggagcggagaactttgcttccctggcgcaggagctcgcgaaaacaatggagaacaagaagtggtggaagctataaactgggtttgtttgtacgtatgtgtgttgttggatgccacccgtcgttgcgaattgggacacataccagcattaccatttttttgtgtccgtattaatcactttggatattctttttgtgttttggtgatgtacgtgtaaagataaaaaagagagaatgaaaggaaccctcttctcctggctatatgagcgagtctcttattcgtc

SEQ ID NO: 217607 - DNA, 3638 bp, Zea Mays
gcaacttcagcttgaactcggaagcagtcagcgactcacctcgtcgtcgcccggtcgccgtgcacgtagatgttcgccaagcggctcttccacagggcactcgtgcatcatcatcagggagtaggaagaggaggaggaggaggagcctcagcaccagcggcatcaccagcggatgccatccaaatggacgcgcagatctcgactcactgcggggtgccatacacagcttcactactcgccttcgatcccgtccagcgcctcctcgctgtcgcaactctggatggtaggataaaaatatttggcggtgataacattgaaggcctccttatatcaccgaagagtgtgccgtacaagtttttgcagtttattacaaaccagggacttctggttgcaatttccaatgaaaatgaaatccaggtatggaatcttgagttcaggcaactattttattcgtcacagtgggatgtcaacattactgcttttgcagtcatagagaggacctttatgatgtatcttggagatgagaatggccttctttctgtattgaagtatgatgtagatgatgggaagcttcaaataatgccatacaatgttcatatccattctctaatcgaaagatctggtgtttcgttacaggatcctcaacctattgttggaatactgatccagcctgacacttttgggacaaggttgctaattgcatatgagagagggttgttggttctttgggatgtatctgaggaccgtgcagtttctgtcagaggctatggggatttacgcatgaagggtcaaatcaatggtgctcagggggattctggtgaagatcaactaaatactactattgatgacagtgaagaagaaagagaaatttgctctctttgttgggcttcaagagagggctcaactgttgcggtgggctatataacaggtgacatacttctatgggatatgactacaaaatcctccagacaagagaagcaaagtgatgtttcatctaatgttgttaagctacagctggcctcagggagtcgtaggcttcctgttattgtcttgcattggtctgctgggtcagcagtacattctaataaaggagggcatctttttgtttatggcggcgatgatatgggatctgaagaagttctcacggttcttagcctggaatcaactgctggattagaatcagtgagatgcatgtcacgaactgatctcaaacttgatggatcatttgctgatatgattcttattcctgatactggggttcctgataaaagcagaacttctgcactttttattttgacaaatcctggacagctgaatttttatgatggtggctctctattttctgtgcaaaactcaaaagagggaactcctcttcctgaagcacagaaatttccagtcgcaattcctacccttgatcccaacataacggtcactggtctttattcgctaaccgaaagtgaatttccaaatatttcactgaagaaattttgtgctaggaaaaatgctgggcatttcatatcagagaacatgaaatggcctttgactggtggggttccaaatgagatgtcactggacgaagatcatgctgttgaaagaatatacattgcaggctaccaagatggttctgtgagaatatgggatgcaacatttcctgttctaatgccaatgtttgtcttggatggaaatgttgctgatgttaatttggatggagctaatgcttctgtatcatctctagccttttgttcattaagcatgactttggctgttgggacaacaagtggtctggtgcgcatctataaactccgagaacacactgggggttcaagcttccattttgtgagtgaatttaagcaagaagttcatgttgttcatcatgggaaaggatttcattgttatgttgcctttttgtcagcaaattcctcagtgctatctctattatttatggcttcaggtggcctccttgctgcaggctatcagaatggtcaggtggcaatgcttgatccaagtcagttatcaattctattcactgtagatggtgcatcaggaacaaattctcctgttgtttccttgggcatctacagtgttgctgcatctgctgcaaaagcagatcaatcaaagaaagataatcctcaaaatgcaacgttatccagagatgttcttctttccttgacaaaggatgctcgtgttactgtacttgactgtacaacgggtgtgatgataaattcacatatcatacatcagaagcaatcatctgctatttccatgtatgtcatagagtcagacgagacacaaacccaattatcagaggacaaaattccaagtcaaggtcagacagggaaagatggcaatgatcttgacaaaatacaaacccaaggaattgaaaagcacctgaaaaatgcttcccagctttcgcaaaatggtggttcagattcactccttgtggtgtgctgcgaggatgttttgcttttgttatccctggcgtcattgattcagggaagcagcaagcatctacagaagacgaaacttgcaaaaccttgttgctggtcagcagttttcaaaaacatggatgacaaagtttgtgggctgatattagcttatcagactggcactatagaaatgaggtttgggccagatctggctattgttgctgagacctctttgatgtcattattgcgatggagttacaagacaggcatggaaaaatccacaagctcctcaaatggacaagttactttggtaaatggatctgaatttgcgattatctctcttatggcctcagagaatgacttgaggattccagaatctctgccatgccttcatgacaaagtacttgcagcagctgcggaagcagctatgagtttctcaactgatcagagaagaaagcagaatccagcagcagggattattggtggcttcattaaaggaatgaaaggcaaggctgaagaaaatgcaaaaatgagagaaagtttgacattgcgagctccaagcgaacagttggagtcaattttctcgaaagaaccatttgctgaaccttcaatacccgaccttgatgatccgatggaagaactgtcaatcgatgacatagagattgacgatgaagtagcagtagccctggcacaagcagcatcgtccacatcccaagggaataagagaacagcagtggaggaggagagagcgaagctgtttgaagggtcaaacagtgcggataaaccgagaatgagaacgcagcaggagattctaaccaaatataggtttggcggggacgccgccgccgcagctgctcatgcgaaggataagctgatgcagaggcaggagaaactggagagaattagccaacaaaccgcggagcttcagaatggagcggagaactttgcttccctggcgcaggagctcgcgaaaacaatggagaacaagaagtggtggaagctataaactgggtttgtttgtacgtatgtgtgttgttggatgccacccgtcgttgcgaattgggacacataccagcattaccatttttttgtgtccgtattaatcactttggatattctttttgtgttttggtgatgtacgtgtaaagataaaaaagagagaatgaaaggaaccctcttctcctggctatatgagcgagtctcttattcgtc

SEQ ID NO: 217608 - DNA, 3479 bp, Zea Mays
cgtgcacgtagatgttcgccaagcggctcttccacagggcactcggagtaggaagaggaggaggaggaggagcctcagcaccagcggcatcaccagcggatgccatccaaatggacgcgcagatctcgactcactgcggggtgccatacacagcttcactactcgccttcgatcccgtccagcgcctcctcgctgtcgcaactctggatggtaggataaaaatatttggcggtgataacattgaaggcctccttatatcaccgaagagtgtgccgtacaagtttttgcagtttattacaaaccagggacttctggttgcaatttccaatgaaaatgaaatccaggtatggaatcttgagttcaggcaactattttattcgtcacagtgggatgtcaacattactgcttttgcagtcatagagaggacctttatgatgtatcttggagatgagaatggccttctttctgtattgaagtatgatgtagatgatgggaagcttcaaataatgccatacaatgttcatatccattctctaatcgaaagatctggtgtttcgttacaggatcctcaacctattgttggaatactgatccagcctgacacttttgggacaaggttgctaattgcatatgagagagggttgttggttctttgggatgtatctgaggaccgtgcagtttctgtcagaggctatggggatttacgcatgaagggtcaaatcaatggtgctcagggggattctggtgaagatcaactaaatactactattgatgacagtgaagaagaaagagaaatttgctctctttgttgggcttcaagagagggctcaactgttgcggtgggctatataacagctggcctcagggagtcgtaggcttcctgttattgtcttgcattggtctgctgggtcagcagtacattctaataaaggagggcatctttttgtttatggcggcgatgatatgggatctgaagaagttctcacggttcttagcctggaatcaactgctggattagaatcagtgagatgcatgtcacgaactgatctcaaacttgatggatcatttgctgatatgattcttattcctgatactggggttcctgataaaagcagaacttctgcactttttattttgacaaatcctggacagctgaatttttatgatggtggctctctattttctgtgcaaaactcaaaagagggaactcctcttcctgaagcacagaaatttccagtcgcaattcctacccttgatcccaacataacggtcactggtctttattcgctaaccgaaagtgaatttccaaatatttcactgaagaaattttgtgctaggaaaaatgctgggcatttcatatcagagaacatgaaatggcctttgactggtggggttccaaatgagatgtcactggacgaagatcatgctgttgaaagaatatacattgcaggctaccaagatggttctgtgagaatatgggatgcaacatttcctgttctaatgccaatgtttgtcttggatggaaatgttgctgatgttaatttggatggagctaatgcttctgtatcatctctagccttttgttcattaagcatgactttggctgttgggacaacaagtggtctggtgcgcatctataaactccgagaacacactgggggttcaagcttccattttgtgagtgaatttaagcaagaagttcatgttgttcatcatgggaaaggatttcattgttatgttgcctttttgtcagcaaattcctcagtgctatctctattatttatggcttcaggtggcctccttgctgcaggctatcagaatggtcaggtggcaatgcttgatccaagtcagttatcaattctattcactgtagatggtgcatcaggaacaaattctcctgttgtttccttgggcatctacagtgttgctgcatctgctgcaaaagcagatcaatcaaagaaagataatcctcaaaatgcaacgttatccagagatgttcttctttccttgacaaaggatgctcgtgttactgtacttgactgtacaacgggtgtgatgataaattcacatatcatacatcagaagcaatcatctgctatttccatgtatgtcatagagtcagacgagacacaaacccaattatcagaggacaaaattccaagtcaaggtcagacagggaaagatggcaatgatcttgacaaaatacaaacccaaggaattgaaaagcacctgaaaaatgcttcccagctttcgcaaaatggtggttcagattcactccttgtggtgtgctgcgaggatgttttgcttttgttatccctggcgtcattgattcagggaagcagcaagcatctacagaagacgaaacttgcaaaaccttgttgctggtcagcagttttcaaaaacatggatgacaaagtttgtgggctgatattagcttatcagactggcactatagaaatgaggtttgggccagatctggctattgttgctgagacctctttgatgtcattattgcgatggagttacaagacaggcatggaaaaatccacaagctcctcaaatggacaagttactttggtaaatggatctgaatttgcgattatctctcttatggcctcagagaatgacttgaggattccagaatctctgccatgccttcatgacaaagtacttgcagcagctgcggaagcagctatgagtttctcaactgatcagagaagaaagcagaatccagcagcagggattattggtggcttcattaaaggaatgaaaggcaaggctgaagaaaatgcaaaaatgagagaaagtttgacattgcgagctccaagcgaacagttggagtcaattttctcgaaagaaccatttgctgaaccttcaatacccgaccttgatgatccgatggaagaactgtcaatcgatgacatagagattgacgatgaagtagcagtagccctggcacaagcagcatcgtccacatcccaagggaataagagaacagcagtggaggaggagagagcgaagctgtttgaagggtcaaacagtgcggataaaccgagaatgagaacgcagcaggagattctaaccaaatataggtttggcggggacgccgccgccgcagctgctcatgcgaaggataagctgatgcagaggcaggagaaactggagagaattagccaacaaaccgcggagcttcagaatggagcggagaactttgcttccctggcgcaggagctcgcgaaaacaatggagaacaagaagtggtggaagctataaactgggtttgtttgtacgtatgtgtgttgttggatgccacccgtcgttgcgaattgggacacataccagcattaccatttttttgtgtccgtattaatcactttggatattctttttgtgttttggtgatgtacgtgtaaagataaaaaagagagaatgaaaggaaccctcttctcctggctatatgagcgagtctcttattcgtc

SEQ ID NO: 217609 - DNA, 3482 bp, Zea Mays
aagcggctcttccacagggcactcgtgcatcatcatcagggatggtaggataaaaatatttggcggtgataacattgaaggcctccttatatcaccgaagagtgtgccgtacaagtttttgcagtttattacaaaccagggacttctggttgcaatttccaatgaaaatgaaatccaggtatggaatcttgagttcaggcaactattttattcgtcacagtgggatgtcaacattactgcttttgcagtcatagagaggacctttatgatgtatcttggagatgagaatggccttctttctgtattgaagtatgatgtagatgatgggaagcttcaaataatgccatacaatgttcatatccattctctaatcgaaagatctggtgtttcgttacaggatcctcaacctattgttggaatactgatccagcctgacacttttgggacaaggttgctaattgcatatgagagagggttgttggttctttgggatgtatctgaggaccgtgcagtttctgtcagaggctatggggatttacgcatgaagggtcaaatcaatggtgctcagggggattctggtgaagatcaactaaatactactattgatgacagtgaagaagaaagagaaatttgctctctttgttgggcttcaagagagggctcaactgttgcggtgggctatataacaggtgacatacttctatgggatatgactacaaaatcctccagacaagagaagcaaagtgatgtttcatctaatgttgttaagctacagctggcctcagggagtcgtaggcttcctgttattgtcttgcattggtctgctgggtcagcagtacattctaataaaggagggcatctttttgtttatggcggcgatgatatgggatctgaagaagttctcacggttcttagcctggaatcaactgctggattagaatcagtgagatgcatgtcacgaactgatctcaaacttgatggatcatttgctgatatgattcttattcctgatactggggttcctgataaaagcagaacttctgcactttttattttgacaaatcctggacagctgaatttttatgatggtggctctctattttctgtgcaaaactcaaaagagggaactcctcttcctgaagcacagaaatttccagtcgcaattcctacccttgatcccaacataacggtcactggtctttattcgctaaccgaaagtgaatttccaaatatttcactgaagaaattttgtgctaggaaaaatgctgggcatttcatatcagagaacatgaaatggcctttgactggtggggttccaaatgagatgtcactggacgaagatcatgctgttgaaagaatatacattgcaggctaccaagatggttctgtgagaatatgggatgcaacatttcctgttctaatgccaatgtttgtcttggatggaaatgttgctgatgttaatttggatggagctaatgcttctgtatcatctctagccttttgttcattaagcatgactttggctgttgggacaacaagtggtctggtgcgcatctataaactccgagaacacactgggggttcaagcttccattttgtgagtgaatttaagcaagaagttcatgttgttcatcatgggaaaggatttcattgttatgttgcctttttgtcagcaaattcctcagtgctatctctattatttatggcttcaggtggcctccttgctgcaggctatcagaatggtcaggtggcaatgcttgatccaagtcagttatcaattctattcactgtagatggtgcatcaggaacaaattctcctgttgtttccttgggcatctacagtgttgctgcatctgctgcaaaagcagatcaatcaaagaaagataatcctcaaaatgcaacgttatccagagatgttcttctttccttgacaaaggatgctcgtgttactgtacttgactgtacaacgggtgtgatgataaattcacatatcatacatcagaagcaatcatctgctatttccatgtatgtcatagatgcagagtcagacgagacacaaacccaattatcagaggacaaaattccaagtcaaggtcagacagggaaagatggcaatgatcttgacaaaatacaaacccaaggaattgaaaagcacctgaaaaatgcttcccagctttcgcaaaatggtggttcagattcactccttgtggtgtgctgcgaggatgttttgcttttgttatccctggcgtcattgattcagggaagcagcaagcatctacagaagacgaaacttgcaaaaccttgttgctggtcagcagttttcaaaaacatggatgacaaagtttgtgggctgatattagcttatcagactggcactatagaaatgaggtttgggccagatctggctattgttgctgagacctctttgatgtcattattgcgatggagttacaagacaggcatggaaaaatccacaagctcctcaaatggacaagttactttggtaaatggatctgaatttgcgattatctctcttatggcctcagagaatgacttgaggattccagaatctctgccatgccttcatgacaaagtacttgcagcagctgcggaagcagctatgagtttctcaactgatcagagaagaaagcagaatccagcagcagggattattggtggcttcattaaaggaatgaaaggcaaggctgaagaaaatgcaaaaatgagagaaagtttgacattgcgagctccaagcgaacagttggagtcaattttctcgaaagaaccatttgctgaaccttcaatacccgaccttgatgatccgatggaagaactgtcaatcggttctctttctccttccttgtgcatcattttatattgagtgctcccttccctcttgacttgggagtaatgaatgcagatgacatagagattgacgatgaagtagcagtagccctggcacaagcagcatcgtccacatcccaagggaataagagaacagcagtggaggaggagagagcgaagctgtttgaagggtcaaacagtgcggataaaccgagaatgagaacgcagcaggagattctaaccaaatataggtttggcggggacgccgccgccgcagctgctcatgcgaaggataagctgatgcagaggcaggagaaactggagagaattagccaacaaaccgcggagcttcagaatggagcggagaactttgcttccctggcgcaggagctcgcgaaaacaatggagaacaagaagtggtggaagctataaactgggtttgtttgtacgtatgtgtgttgttggatgccacccgtcgttgcgaattgggacacataccagcattaccatttttttgtgtccgtattaatcactttggatattctttttgtgttttggtgatgtacgtgtaaagataaaaaagagagaatgaaaggaaccctcttctcctggctatatgagcgagtctcttattcgtc

SEQ ID NO: 217610 - DNA, 979 bp, Zea Mays
atgtgcccacgtcctcaatctgcctccacgacgctccgccacttccgcacgcacgagctcgacctcgcctgtttccgccagctccgccacttcctcgcccccgacctcgatgtgtgggattcgataccaaatgaagagacaagaggagaatacgagccctcagcctcgcccttgtcctcggtgttccccattcaccgctcaggcgcactccatcgctccttcgacgaggactccaatgactacagctccatcgctcctcatggtgatgccgccaagggaaccacaacgactacaacgaagccgtccacgatgccatcagtggttgcccacataggagcatgctccaccatgcgcgcaccttgccctgcacaccggcagacacaccctgcggctgcccacacaaggctgctaatggcggaggctgagcgccgccatggatctgacacggtgtggaatggggaggagccgaagtggagattggatcaaagtggactaggcaggagccaagcaaatcgacgactgggttcgctatgctaagatgactgaagcaattggagagcaactgcatattgtcggtgatgaccttgtcactaatcccactgttagtacatttatttctttccttctaaaatagaagttaaaattccagtttggttgttgcaatacccttatgtcagctgcttttaatatagtagagatatgttctggtgtttgctaatcagcagatgtcatgctatgagttctgtcgtgaataactctctgggagcagtggcttggttttgtggtgggcgtttggacaaaatctttaggattaacaagacttcgtaggttgaattagaccttgcaaaattatgattgtcttagtggtgtcactaagcatttgccagtgaccagaaaattatgactttgtctttttatatcgacaccatgcatattccaatcaataacaggaatcatctataaaatgtctactgtgaac

SEQ ID NO: 217611 - DNA, 4497 bp, Zea Mays
aaaaaacgagaggagagcggagagacagacaggagccaaatctacgtctcctgccaattcgcctttctccaaccagcttccccgcgccgcccgcccgtcgccgctcctccccgccctctctgcccgcatcagatcgtcttccccacgccgtgtgaccgaggtcccgtgatccctcccacttctgcgccggcgaggacccgggaggcgggatgagcggctgagcacgacgatggcacgcagagccacgccgcaggaggccgccgtcgctgccgcggaggccgccatacgatccgtaggcctggggttcgacgtcgtcagcgacgtccgcctcaagttctgtaagcagcggggcgcgcccgacccctggctcatcgaacttgaccatggggaggtccaggatatcgtgctgcccggcggcgtcaccgtcgctggcgtcaccgcttcggttaagtgtgacaaaggggagcggatgaggttccgctccgatgtcctgtcgttccagcagatgtctgagcaattcaaccaggagctatcattgtctgggaaaattccatctggcttcttcaatactatgtttgagttttctggcagctggcagaaagatgctgctaataccaaagcacttgcttttgatggttggtatgtcacactatacagtgttgcgctctcaaaagggcaaattgtactccgggatcatgttaaacagtctgttccatcaacctgggatcctgccgctttggcaaggtttattaaaaaatttggcactcatatagttgttggcctaaagatgggtgggaaagatgtaatttatttgaagcaacaacattcatcaaccttgcaagctgtcgacgttcaaaaacgattgaaggagatgtcagatagtagatttcttgatgcaaatgtgcaatatgacatgagtaggaacaatcaggtgctttccgagccttcgtttcttcttctatccccaggatttcttccatttaacaccattgattactgttaaagtggtattggaacagtataacttattaacatttaattattgttttattgaacacccccacaacatgcaaagtttacttctgtgagctttaaaactgcatcttttgaccagtggaatttgtgtttatcaccacaattactaggccaacaaacataaaaataatagactgcctcaaatttatttcattgaatttgtggggaagttgggacaaccagctggcctatattgtcttttccaataggtgttttccctttctatggtatgatacatacacactggttctatgggcatgtgaccatagcctcaaactgtgtctagtatggctgttttggttgagaaacatttagatggataagagaagtattcattgacaaaaatatttgatatatcatgcccatagatctaaactgcttacatgctccaaattctgaatttcaaccttaggttttactttcgtcgggtactgtgactactgtcatgtatatttgtcatcgcataacgataccagggtattgcatgtacccgagaggattgatgagtggaagatagagcgatgggcgtaggctgaagtcatattgatcctaggtactacttagctactagcacacaagatatttatagacgcccaggctgtaaatatgcaataccctacgtcctcgttgtgtatggtggattgatggatgttgaatgcaaatgtgaagaagataacatgctcaagtatcaactgagccccaagacagtctagctctcccttcccttttggtcatggtgagagttctagacaactgatccctagttcactctgtctatcctgcttggaatcgagagatcgatcccaaggcgaaagcccgaactctggaagaagcaccttatatgtttccctacctctcccttttatatctcaagcgaggagactgatacatgtctgctgagcagtgggccatgtccagtagaagctcaatcatcccaatattgtctctggcgtgaagtcgcacatggtgcatgccttggacatgtcatagtgttgagctcatcgtgttgcaggggttgatacttagtgttgtaggtaggactgaagaccaacgtcgggtacgacatagttggtaaacggtttagctgctcgtactttatcatgcatgcaggtatgttagtacattcaggcgtggcaatagggacggtggcacacattgcacaacagcctcgggtacactagctgcacattgttgtggctacagggacggtggcacggactacacggtggcctcggatatgcccgcggtctctggcgtgaccatagtgcaccttcttgatcgcataaacctccttgaccgcaatgtcgtccatcacatttatgcgatggacaaaagtcttatcctgattgcctgatatcaggcggccgtcctgaatagggttgcacatggcactagtactgccttggggaggggcatctactttcgagggcgcttcgtctcgagagcatcttgaaggatgatcgtgatgtctagttacactcttaagtctgtaggtcgatcaatgagcttggttcccagcctagaggaccttgggagaccgtgatcgcttgccccagaggtccaaaaggccacaggagtgccctggaggtccggagggccttaggaccttgtcctctggcgtggaggctataagaggccggaagagcccaggaggtccggagggccttaggaccttgtcccctggcctggagggccttgggaacatgcggttggcatcaaccgggcactcgttgagttttgttttgctgatgggatcttcggaaggcgttttgtgagtatcatcttcggaaggcgtattgtcagtacctagacgtatgacttttcccagatgccgataatattgtatcatgaaaggattctggctggacataatatatgttcccagtttacgtttttcttccacaatttctgatgtaacatactgtacagagtgatatcagagagcaatagctaagatttgtacagtacagtccattgaattcttactcgtcaattgagggacagagctttgtgttcataatatttcattactcaagcaaagaatcatttatattagcttagctggatcttttagcatgatacacatttttgttggccctaactcaggatttggtgatgatgcttaagcgaagaggtgggagggataaagaatctatatctcatagtgagtggcttaatactgttcaagcagagcctgatgttacctcaatgtcctttataccaatcacttcgctgttgaatggagttcctggaagtggatttttgatccatgcaattaatctgtatctccgacataaacctccaatcgaggaattacatcagtttttggagttccagcttccaaggcagtgggcacctgtttacagtgatctcgctctgggtcctcagaggaaaagacaaggcagtacatcgttgccagtaaatttaatcggtccaaagctttatgtttgcactaacatggttgatgtgggtaaaagaccagttacaggactccggttgttccttgaaggaaggaagagcaacaaattagctgtacatcttcaacatctctgctctcttcctcagattattcagcttgaagacgacccttacaatcaccaaaccccggaatatgaccgcaaatactacgaaccaattggaccgtggaaacatttctctcatgtttgcacagcaccagtcgagtcagatgacctgtgcatcgtcacaggggcacaattagacgtggtccaccaaggcctcaagaaaattttgttccttcgcctacatttctccaaagcctgcaatgccgttgtgaggaactcggaatgggagaattctcccaacatagctcagaaatcaggccttatctcaacactcattagcacacatttctcctcggtagctcagacgcctccgccgcggccagccgatgtgaacataaactcggcggtgtaccctgggggaccacctgttccagtgcagaccccaaagctgctgaaatttgttgatccaacagagatgatgcgtgggccgcaggactcaccgggctattgggtggtttcaggcgcaaagttgaaccttgagaggagtaagatctcattgcgggtgaaatactcactgctgacagctatgatgccagatgatgagtttccacttgatgatgatgaattttagaacctggaacgaaagaaacctgtgtagcaaaggttgaggatccaagatttccgtcatttgggcatttgtttgatgttgtatactttgtggtttctttaaacattatagcataaacgagttctctgccctgaatggagcgagaagaattgttgtaacatttctttgtagcgtgggcgtggcacatagcgatcagcattagatgatagatcaaattatctgtatatatgggatgaataaaaaatattgtttcaaatgttttcttgtcttggtactgttgtgatgtattctgggagttttggctcccttgcc

SEQ ID NO: 217612 - DNA, 8982 bp, Zea Mays
ctgacttcacatctccatctctctctccactcccccgcttttgcatgcgtcgcggcagctccctgccccgagacgatcgacgaccacgacgacggtgggggaggtcagagagagagagagatatgagcccgtccgccgcctgcgttaaagcgttgctgttcgactgatcatcctccaccaccgagctgagtgcgcgtcggcgaaatggggaccaaagttaacataatcgtggggtcccatgtgtgggctgaagatcccgatacttgctgggtcgacggagaggtggttaagatcaatggcgaagaggctgagatccaggcgaccaatggaaaaaagattgttgcgaatttgtcgaaactatatcccaaagatatggaagcagctgccggtggagttgatgacatgacaaagctctcctatctccatgaaccaggagtgctgcagaatctggcgatcagatatgagcttaacgaaatctatacatatactggcaacattctcattgctgtaaatcctttccaaaggctgccacatttatatgatccgcatatgatgcaccagtacaagggtgctccatttggagagttgagtccgcatgtttttgctgtggcagatgttgcatacagagctatggttaatgagaataagagtaatgccattcttgttagtggtgagagtggtgctggaaaaacagaaacaacaaaaatgcttatgagatatcttgcctatttgggtggccgagctgcaactgaaggaagaacagtagagcaacaagttctcgagtcaaatccagttcttgaagcttttggcaacgcaaaaactgtaaggaataataattctagtcggtttggtaagtttgttgagattcagtttgacaagcatgggaggatctcaggcgctgctatcagaacttaccttctagaaagatcacgtgtatgccaagtatctgacccagagcgcaattaccactgcttttatctcctttgtgccgcaccacaagaggacgtcgataagtacaaattaggaaatcctaagacttttcactatctcaatcaatcaaactgctatgagttggtcggtgtaagtgatgcccatgaatatttagctaccagaagagcaatggatattgttggtataagtactcaagaacaggatgctatttttagggttgttgctgccatccttcatattggcaatattgaattttccaaggggaaagaagccgattcctctgtcttgaaagatgaaaaatctaagttccatcttgaaacaactgctgagcttcttatgtgtaaccctggagccttggaagatgctctttgtaagcgtgtcatggtaacgccagaggaggttataaaaaggagccttgatccttacaatgcaaccattagcagggatggtctagcgaagacgatatactctcgcttgtttgactggcttgtcgataaaattaatagttccattgggcaagatgctagttctaaatgtcttattggtgtgctggacatctatggtttcgagagcttcaaggcgaacagtttcgaacaattctgcattaactatacaaatgagaaactgcaacaacacttcaatcagcacgttttcaaaatggaacaagaggagtacactaaagaacaaattgattggagttatattgagtttgttgacaatcaagatgttcttgaccttatcgagaagaaacctggtggtgttatcgcacttcttgatgaggcatgtatgttccccaaatccacacacgagacgtttgcccagaagctataccagacttttcaaaagcacaagcggtttgtgaagccgaagctatctcgtaccgattttacaatctgtcactacgccggagaggtgctgtaccagtctgatcagttccttgacaaaaacaaagactacgttgtggcggagcaccaggaactgctgagcgcttctaaatgctcgtttatctccggattgtttccgcctccgccagaggagacgtccaaatcgtccaagttctcttccattggagctcgctttaagcaacaacttcaagcccttatggacacattgaactccacagagcctcactacattagatgtgtgaagccaaacaatgtcctgaaaccagcgatctttgagaacgtcaatgtcatgcagcagttgcgctgtggtggtgtgcttgaggccatcaggatcagttgtgccgggtacccgacgcgtcgcacattctacgagtttctgcatcgtttcggaatacttgcgcctgaggccctcgaagggaatagcgatgagaaggctgcgtgcaagaggatcttggaaaagaagggtcttttaggctttcagataggtaaaacaaaagttttcctgagggccggccagatggctgagctagatgccaggaggactgaagtgctcagtgccgcggcaaagacgatccaggggaagatgcggacacacatcatgcggaagaagttcctttccttgaggaaggcgtccgtgtgtgtccaggcgatatggagaggaagactggcttgtaagctgtacgacaacatgcggagggaagcggccgccatcaaagttcagaaaaaccagcgcaggcaccaggcgaggagatcctacaagctccgctacgcttctgtgctcgtagtgcagactgcgctgcgagcgatggcggcgcggaacgagttcagattcaagaagcagtctacgggagcagttacaattcaggctcgctacaggtgctatagggctcataagtaccacaagaagctgaaatgcgcagccattgttgcacagtgcagatggagaggaaggatcgcgaggaaagagctgaagaaactcaagatggaagcaagagaaacgggtgcgctcaaggaagcgaaggacaaactcgaaaagaaagtggaagagctcacatggcgcgtgcagttagagaaacgactaaggacagacctggaagaagcaaaagctcaagaggtgtcgaaactgcagaactctatggaagcattacaggctaaactggacgagacaaacacaaagctcgctaaggagcgagaagctgctaagactatcgaagaagcgcctcctgtggtgcaggaaactcaggtcctcgtccaagacaccgaaaagatcgattccttgacagcagaggttcaagaccttaagacttcattacaatcagagaaagaaagggctggcgatttggaaaagaaacactctgaagagcaacaggcgaatgaagaaaagcaaaagaaactggatgagactgaaataaagatgcgccagtttcaggactacctgagaaggttagaagagaaactcgctaatgtagagtctgaaaataaagtgctccgtcagcaagctgtctcgatggctccaagcaaaatcctttccggccgctccaagtccaatctgcaaagaaactccgaaaatgttcaagtgtcaagcaatgatccaaaaacagctccagaatccaacagcacgtcctcacctaagaaggagtacgatatcgatgacaagccacagaagtcgctcaatgaaaagcagcaggagaaccaagatctattgatcaggtgcatcgcgcagcacttgggctatgctgggaacaggccagtcgctgcttgtatcatatacaaatgccttctccattggaggtcgtttgaagtagaacggacaagtgttttcgatcgcatcattcagaccattgggcatgcgattgagacacaagacaacaacgaagtcctagcatactggctttcaaatgcttcgacgctgctgctgctgcttcaacggacattgaaggcgagtggatccaccggtatggctccacagcgtcgacggtcgtcttctgctacactcttcggacgaatgacgcagagcttccgaggagcgccacagggtgtaaatctttctctcataaatggaagcatggttactggggtcgaaactctgagacaggtcgaggccaagtacccggctttgctgttcaaacagcagctcacagcgtacgtggagaagatatatggaatgatcagggataatctgaagaaagagatatctcccctgcttggcttatgcattcaggccccgagaacatcaagggcaagcttaatgaaagggtcttcgcgttcaaacactaacactgctgcccagcaagctttgattgctcactggcaaggaattgtgaagagcctagggaattttctgaacatactgaaagtgaacaatgttcctcctttcttggtgcgaaaagtattcactcagatattctcatttatcaatgtacaactatttaatagtttactactgagaagggagtgttgttccttcagtaatggcgagtatgtaaaggcaggattagccgagcttgaacattggtgctatagggctactgatgagtatgcaggttcagcctgggatgagcttaaacatattagacaagctattggtttcctggtaattcatcaaaagccaaagaaaacattggatgaaataagtcacgacctttgtccggtacttagtatacaacagctatacaggattagtactatgtactgggatgacaagtatggaacgcatagtgtctccccagaggtaatatcaaacatgagagtgttaatgacagaagactccaacaatcctataagcaattcattcctcctggacgatgactcgagcataccattctctgtcgatgacatatccaaatcgatgcagcagattgacatatctgacatcgagccacctccattgatccgagagaactctggctttgtattcttgttgccgccacctgaatagatgtgtggcatgatggtcaattttgtcaatgattgcaagaacctaagaatggttattgggcgacaatctatgcagagctagatttacttatgcccaatggaatggagtgaatggcttcgtcgtaggtagatgttgatcatctacaccatggcaaatgtaacaaatccgctaggtttttatggcatgcctggactcacctagtgttgatccacctctagtcaagtagttgtgcaccccatagtgctactgttttcctttttgtttccattcagctttgcctttgattattccaatgctttggtaccctagttcaaagtatagtttagaaggtcttagtaaaaccagtagaaattccttccactggttgtttttagttctagagctttttgttctgagttcgctagagctgggtaataggatgtttactttcctccctcgttaatggttcagttctttggtgacatctttgtattattactgatcttgtgtatacattacattgaacacgatgcctacaatgttatagatggctattccgaataatgaaattattatgcttgtgtatttccctttctattttaaatgtatgttctgttctttctagacgcaagaggtcaactgcttttatttgtgacactgttttacttcggggatagtttcataccttgaaaaagtccattttagctctttagactatcaacagcttatccatccacatactcatattcaaactttactctgcgaacaatacagtctacaatgtaaaatagtacaaaacagtgttttaggtggtcacacgggtgaattattagcagccttggaactccactctctctcacaacactcttacgcttgactcaaggagatcagaagagggtgggcacaacacaagcaagtaggcgttgctagcttctctcggtggacacaggaatacaggatgctcacaacacaggcacacacttgtttcatgacggcactgcacaccagaaccaacacaaactctacttttctctcgacactgcacactaactctagacacaagcacaatactaccactgtcgctttgcatacaggcttcagcttatatgcacacacgcactgcccacgattgcatgcatgtagccactaatcacatgcatgctgttacaccgccattgtcagatactccacatgaggaactccatcctggtgagcgtggaagaagcgtgcgtcacactaatgtttgagtcgcaggtcttgagcgggtgtaactaagtgcagccatgttgttgctgtcatgtctgggtgtaagtctctggcgtgttgggttgtgttcttcggtcaccagttggtgggccatgttcctaagtagtcgcatatatgctgttgccttgggggtagggagaaccatgtatgaactttgctctgaatcaatacagtctgtctctagttcctcccccattctcgtctcctacctctgctccctctctactatcttctccttccattagcagtagctaacaattggtatcagagggccttcgttcctcagccatcgcatccatggtgtctccttcactggttgatgctcaactcactcaggcgttggagcaccagatccatacaatcctcgctgagctcgacaagcggttcacgacgatcgactccaagtgggaagcgcgagtcgaggcggcgcaccaagcagtggtgggcgccgtcgtggagtggcgaccccgggtggatgcctccatcgagcatcttcaacagcaccaagcagatgaagatgttgtcggcgggttcggtgatgtgggcgttgtcccagatccagtggaggaggaggtacctgtcgacacgcccaccaagtgtttgatgggagccctcaaccgcgaaacctatcctcgacaagggcttcaagcacagccgtccagcctagtgtgcccactcatggagttatttgagtttgtaacaatctcgtcgcgcggcttcgccactatattactccgcagctgcgcatcgccaatttggtattatgcagcacatatctgcgccatattgggactgttattcttccgaactctgttaccgtctatgaactgtggcgagctccaccagctggatctccagggagcccctgcgaccttggccatggccgacctccacttctcccttggcaggcgctgccctcctctggtccgagctcgagcaggtgagctcgccccatggcctcggctcctagcctccaggctcggctacgaggacaccacgctcgccctcaccctccgcctcccgggctccgactccggccgttcctcctcgctcgccgcgccctccgctgcgccgtcacccaaggcgcgggtggtggggtggccgccggtgaggtcgtaccgcaagaacgcgctcgccgactccagcaaggccaaccgcgcagccaatttcgtgaaggtggtcgtctcccgccgctcctcggcctctgctcctcccgcgcccggagtctactggcgtgctggacgttgctttcccaccgccttcaacgacgactccatcgattccaacgacaccgagggcttctacgcgtgggcaaacgccgaggacacggaggcagccctgccaccatcctcgccgctgccccggacgctctcgagcctcatccaccacacgttagctggggacgtcgtccatgccgccttcgacctagtctgccacactgcagttcccctgcgcggcagcggcggccaccacgacgccaagcagctggttccggacaccaccttctcagcattcttccacaagtccgtcgtcgcgctcgcctccaccaaaaacatcgtcggcctccacagcatactacatcgccaactcggccaccttcgcccgagagcgcctcccagatcacggttgggtcagcttcgtggtgaacgcgcaggcgttgtgggaggaaataggggaacggaaatcgcagcaaccgattctttggagcatctcaactctctccggaatgtgcttcaagcaagtggtgaacaggttgtttctcgtggatttggaagaccttatgtgttcattgcagagatgctaaaaagagttagacgtacatcggaagccaaagattcagctcgagtggcactgaaatcaccatggtggacgcttggctgcagttacgaagaggatgatgaactaccttcattgttagatagatgtctgctattgttgatttgggaagattgcacttatcacatgtctgctagtgcaatttcacatctaacggacttggaagatctatatttcagcagatcagctaataatggagtgttcatttgtctacagtgctatggtgttcatagaagcgttgggacacatgtttcaaaggtgctgtcagtcactctagatcaatggacagatgatgagatcaactccataatagaagttggtggaaactcttatgccaatgctatatacgaagcacttctgccggaggactatgagaagccgcatccaaattctagccaagaagagagagctgaattcatcagatcgaagtatgagttgcaagaatttgtgaagccaagcctcgtttccagctataagggctccttaggggaaaccagttctcaaaaacatacaggtaattccgtgttcctttctgctagtttcagcggtgaggctggaatgcttgagagtattggaatactaaaagttaaggtgataagagggactaaattggctgtaagagacctgatgagtagtaacccctacgttgtgctgaacctaggacagcagaaagcaaaaacttttgtgagtaaatgtaatcggaatcctgtttggaatgaagagtttaagctgtcagtttcccagcagtgcgggcctctgaagcttcaagtgttcgaccacgacatgctgtcaaaggacgattcagaagcaagaattctggtttcagaaaaagattgtcggtggtacagttcaagaccttggaacacatgctccttcacttagggcatcaggattctggatgtgctcagattctgcatcgacttgagggcaactcgagttttaaggagggaatgttataccgccattgtcaaatactccacatgaggaactccatcctggtgagcatggaagaagcgtgcgtcacactaatgtttgagtcgcaggtcttgagcgggtgtaactaagtgcagccatgttgttgctgtcatgtctgggtgtaagtctctg

SEQ ID NO: 217613 - DNA, 1028 bp, Zea Mays
cgttgcaacgcacgggcattcagctagtttttgatgaaaactctaagtctgaaaacgcaattggtagcccgtttcgtatcagcctactacagcccgattcacttcgacagcccacatcttgaagctccaagtgcatcccggcccagtccagtccagcctttcctctcctgccccgtctcccgttcccacagcacagcctccatctcccaatctcgcaggcgacgccgacgcgttccaccggcggcaccgatgcgggcgatctcgacggccgcggggggcatgctgcgcgcgcggctccgctcctcgtcccgcgtgcgcggcggcggcgatggcgcggggcgatggacgacgccggggcacgaggaaaggcccaaggggtacctcttcaaccgcccgccgccgccgccgggggagacgcggaagtgggaggactgggagctgccctgttacatcacctccttcctcaccgtcgtcatcctcggcgtcggcctcaacgccaagcccgacctcacgatcgagacctgggcgcacgagaaggcgctggaacgcctcaagcagcaggagctagccgccgtctccggaggcggtgacgccgatgccgacgccgagtgatccgctgagtgattaaggagcgtcgtcgccgactcacaagtgatatggtggagattttatcatgtataaaggactgggaattagcggactcacatatgcaacacaatgtggagaaggacaccaaagaaatggaacttatacatgaaagtatgatccttgaagatgcaacctctgtttgaaatgtttgtaatgaacacttatttgtattctgtactgtggactgtaatgaacactattactttaatttagagctagctgtactcttttttcctttctaaggttttctcatgaggtgtgagtttttacctagaaaagtttttaacgaggcaacattgcacattagctccaaacctaattaaatatctattttcctgaagtattaatgttatgctttgaaatatggacttgtaattgtg

SEQ ID NO: 217614 - DNA, 2100 bp, Zea Mays
attctgttggttttggtctgcgttatcatggtttcgtacaaatggctcagtcggaacttctctgtgtcatcaaatgatgccaagaggttgcttcaggactttgtcaacaaacatggaactgacctccaagtgatttacagtgtgtcggggtggttgaagagcaatccccaaaactattgtgtaaagctcatttcaggcccaaaacttgaagaagcaaggcaaattttcaaagattcttgttcagttcagatctacagtatccaggcctgtattccaaaagatacagctgtactttggaatcctgaatttgtgcaggcagaggagcttttcaaccagccttttgattatgagaactgtttgagagataataggttttgtggtgttttgaattcttttgtcaagcgaacatccaatggaaagcatgtgagttcattgccaccaaagcccttgaatagtgctgcagccgccgcgcagtctaagcctagtgttactccaaaggagcagtttgttactgctcgacggcaagatttgcctgtaagttcaaagcagggagcagacactaagtccgagaaggataattccacagtattagataaggctggcaatggtcctgttgtcaaagaacaatcagttgatgcccatgcaagcaaaagtaaagctcaaaatggaaaggccatgcctagtaatggtggatcactggctaacatgtggggccgtgcatcagcaaaacctaagcctccaagtaccactaattctacagctgtagcaagtgttgcagctactgctgatgcacaaatttgtgcaaaggaagaagcagatggaaatagcagcgatgatgaacatgggataaagtacaagaggggatccactaatgcaaataacagaaagagaagagcggtatttgattattcggatgatgaggaagatgacaatattgtaagcattgcatctcctgagctaccaaaacagcataccccagaccctgttgttggaattgctgaagacgctgaagtaaatcaaaagaacttggaaactgaacaccatgtaccaaacaatgggaaaggttcctcaacgggggtggattctgacttcacatctgaatgtaaaatcaaaacgatcgatcctatgaacgattctgggattactttaaaagaaaagagcagtgatcctccaatcaatgacaagaagcaggattctgctgctgagcctgcctccacctcaccaaagaggagaaaggttttgaagacacgcatagatgagaggggaagggaagttaccgaggttgtctgggagaatgaagcttctgcagatgacaaggcagagcagaatgtcaacactattgatgcgactgcaagcggggcgactgtcccaagcaaaccgaagcccgcaacaaacgctgacaaaagcaaagctccaagcaaaacagcagcaggcaacaagaaagctgcgaaggctggagccaagcaagggagcattatgtcgttcttcaagaaagcatgagccagcggggggtgcgcatgcaccaaaatgagacaggacttggttaagcaaactggcagtggcagttatacctgaacattgtcagtcaggccggcgagcaagaagggctgctccaagcaggcgaccgttagctgtatcgtttgttttagctagcgtagcgatggttgagtcaagcagcagagagcacgcattctagctgaggtagtactatcttgctgaagatgtacacgtacacatatacaataactgttgtctactgtgctgtctagaagagtaaaggtccaaggtggaagggcggaacagtttgagtacctgtgtctggttggtatggaccccactggaagagagtgcacacaccatcatggtcttggagggtgcgagctgggcaccggtggcgtagcaagccagcaaacggccgacagcaacgtagggagggagttggagagccagagccaccccatcgtatcggtatcgcgactcgtcaacacatgtttgctgttggtcctacaagatgacgattcatataccagcttggagttggagagccagagccacccctgcggccgaccgaagccagcggctaagcagctaaatgcctga

SEQ ID NO: 217615 - DNA, 3486 bp, Zea Mays
ctcatagtatttgagaacaagtccccaacagattattacctagaaaaggattggatgatggattaatggtcgtcatatcagattcaaacaccaatgcatcgtgttctgtggtaaatcgagtgaagtatctggttctgcattttgaccatgataacaatgttggtggtttagattgggatgatgtagtggcaaacccaactgcttctctccccaaggtcttaagccttgtcaaggcacaaccgactaaagacgaagaggtagagaaactaccagatttttacaatgacttgaaccccgtaactgaagtagactgtccagatattagcatcgaagaagatttagacttagtggacactgataatgaagtggatgtaggtgatactgacatagctgctcacaatgaagatgtagatgatgggtatcatgttgtttcaagatcaaagttgaaaaaggctgttggcagtaggttaaaggtagacattgcctctaggaaaagggttgtacaagacgacttagactcaactgatgaagatcttgagtgtcccaacactgaaaaggaggaacaaagcagcacaaagttaacatcattcaaaaaagttgaccttagtgaccctatgttcaaagttgggatgatgtttgagtcaatgaagctactaaggaaagctattactgagtatagcatgaaaaagaggtttgaaattaagctgccaaggaatgacaacaagaggctgagggctcattatgcacatggatgctcttaatgttatttgcatctatggacaacagagaaaatggcatcatggttaagacctatgtgtccactcatagatgccagagagagtggaatttgaggaggtgtactgctacatggctggctgagaagtacattgactcctttaaaagtgatgataaaatgactttgacaaacttttcaaggacagtgaaaaggaaatggaatgtcactcctatgagaagcaagttagttagggtcagaaggctagcactaaagaagatatatggtgttgagagtgaactatacaacaagctttggaattttggacttgaattgaggagtaacccaggaagtagtttctttctaaatttggtggacaatcattttcaatctgttatatgtccattgatgcttgcaaaaggggttttcttaaaggatgtaggcccaaaatcttcttggacggatgccatattaagacaaaatttggtggacaaatattcactgttgttggtctagatccaaatgactggatttatccaattgctttgggagtagttgaggttgaatcaaagtcaacttggaagtggtttcttgaaacactaaagcatgatttatgtattgaaaacacataaccttggattgtcatgattgacaagcagaacgtgattttccttgaattgtttaattttgaagcatgtcacatttattaaaaggtactaattttttttgaattcttgttaatagggaatgattcctgcaattgaggaggtattcctagaatatgagcacaaattctgtgttagatatttgtagtccaactttaaggatgcaggcttcaaggtggaagcaataaatgaataagatgaaggaactcagccctgctgctcatgcttgatttgaaaaaaatggcacctaacacttggagaataccaatcttgagcatgttggagagaataaaacaaaaagtcatgacgcgattctacaacaaacagaaggaacttaaggattttgtaggcaccatttgtccaaatattaggaagaaaatatctaaatttgcggatctagcgaatgtgtgctatgtgttaccttctggaagtgtgattttccaagttgtggacagagatcaccagtatatagtagaccttgcagctaagacttgtgattgtagagagtggaatttgactggaattctatgccagcatggtacaaacatcatgccatgcaaagatatgaccagttgggagaaagttgatgcccctacagtctcacctcctatctatgttagaaaacctggaaggccgaagagatgcagaaggaagcagcctcatgaaaaaattggaaagtatggcccaactctatcaaggcatggtgtgaaaatgacttgcaactattgtaaaggggacgaccataatgacaaaggcttccccatcaagaagctaggtgtcagtccaaaacctaatcatcttgagatgacaatcaagttgtcacccaagataacagtcaaggggccaccaatggaccagatgacacaagatggtgatgaaccccattattgcaatttgatgatagaaatgagctcaacgatgctacttcaaatgatggaacaggttggtcctagtcaactactttcacaggaacctaaacaagctgtgtcgaatgtaaattcatcatagcaaacattcctgtgccaagacctatagtcctcacatcagcaaccaaagaaggaaggaacacaacaagaaagaggattgcaaaaccaccaacaaataagggagaaacaaggaccaagaataataagaattgaagtagatgtatgcagtttgatcaaggccgatgaatgcctttaactataatagttgagcatgaatgtttttgtatgatgcactgatgctcttgatcagtcttttgtgtgtgttatctacagagggcaacaaaaatgctagctaaacatgaatgcttttgtatgttgcctatatgaacttaaatggcaacaataatgcttctgtgaactggggatgaggtttacaaatgcttaatgaatctgagtactcttttcattcattaccaccataactcacatcaaacaatccttacatatagattaatcagaaaaatgcacacacataagactgatattatttttagtggcacaacaatcttaactaagtaaccctactactaaatctagcttttgaaccatcaggccatctgcttttctatcttccctcttcattccacaacttcctaaaacatcagcttcaccagtaatcatcttctctgcttggctgaatattggtagatgattatgtagaacatggccattctccatcaaatattgctcatagtcatcttcctagtaccagaagtcacaaccactaccatcacgctgcaaacatatacaaatcaatcaaaaaaaatcaaatccacacatgagtttacagtccaaacacacttaaatcccaatatgaccttgtatgtcgggcagatgtagaagtaccgtccatagtttccgcttgtcttggccctgagtgcaatcacctttcttgtactgcatcggtcacatatggaggtggatgttccattaatgggtgcgatgcgggttagatctaggggagggggcagagctgctagggaatcgatttgaacagaggaggctacggttcttccatggggaagaaacgagtaattatgtatgtaatgcggtccaccgtggctgccacgtcggcaagcagtatgctagaaaccaggttttg

SEQ ID NO: 217616 - DNA, 1458 bp, Zea Mays
cagaaatcaccttcccgtcgtcgtcgctcatggtaaaaaaataaaataaaaaataccggctctttcgatctgtttcgtctaaatcgcctgaaatctacgtggctccaaattgctgaggtttttgggggcacatggttactatgtggctgtgcgttttcttattatccatttctatgcttgattgcttctgacaaacaaaaccagtagctacacatcctatcggtatctttgatttgaagctctaggaatgcaagagatgtcttgtgcgcccttttcttatgcggtttgactccatctcagcctggaccaagggatgcgccgatgcactgttttatccggagggacaaaaaaaattcaaccttttctctctatctcagcttaacgcaggccctaacggataaagggaagtttcttttggctgctcgaaggttcagacaaggagcacatacagaatatatcatctcttatgactatgatgatctgcacccaagaagcagttcatatgttggaaagttgagatctgacttcttggggacaaagttcatcatctatgatagccaggcgccatatgacggtgccaaaccttcgaggacccgatccactcgccgctttgcaagcaagcagataagcccacaggtttcaggcggcaatttcgaagttggacaagtgacctacaggttcaacttcatgaaatcaagagggccgagacggatgcagtgcaatatccagtgccctgtaggccagggcagcgcttcggatccgtccaaggagaaaacaccctcgccgagttccttggacctgaagaacaaggctccaagatggcacgaccatcttcagtgttggtgcttaaatttccacggtcgggtgaccgtcgcctccgtgaagaacttccagctcgtcgccacagctggctccggcggtccatggggcgtcggagacgaggagacggtgatcctgcagttcgggaagatcgaggacgatgcgtttacgatggactaccggcagcctctgtccgccttccaggcgttcgccatctgcctgaccagctttggcacgaagctggcctgtgaataaatggttgccggtttaccaactatgttggggatcagattgtagggggtagtctgaactagttgccctgagcacctcagatgggagaaaactggcgataagaaacagggcggacgttgtccctataagctttgactccttgtaatcgcctaaatgattgatttatatatatatgatgtgcgcctatgttgttgaagagatgacgatgacttatagttgtaaatggcactccctttcgtttggtgacattcactcatcactcataatgcctcattccgttgtaatgtgctgttgaacttccccttctctgcattttgtcaatcatgatcgaccatgtctgagcatatctagttgtggttgctgctgatctggaccaaggttaggaag

SEQ ID NO: 217617 - DNA, 1935 bp, Zea Mays
aaaaataaaataaaaaataccggctctttcgatctgtttcgtctaaatcgcctgaaatctacgtggctccaaattgctgaggtttttgggggcacatggttactatgtggctgtgcgttttcttattatccatttctatgcttgattgcttctgacaaacaaaaccagtagctacacatcctatcggtatctttgatttgaagctctaggaatgcaagagatgtcttgtgcgcccttttcttatgcggtttgactccatctcaggtgatctctcgatcaattgctggatttcatcttcttcgaattcattttccgtttctgaataggcttctacgcctattcaattttatttgcacgcagaaatgcgaaaaaaatgtatatctaattcttatgtcttatccttataacgatcagcagatccatgtatgtactctaaccatttgtatatttaaattctgattattgttcgtctggcgctgctgtaatgttccttgtgcgttaggatttagaacgaagccgcatatattcaacttaatctctatcctctctctttttggctacatagcactatatttttggtggctagtgctaataaagtatgacagtagtggagaagttggcaccacacggactttctttatttatgtttacatgtgatagcttgattttgtttggtatgtcaatagcgatatgataaatacctataaaagcctgcttctccgtttgggtttattaaatattgatttaatggactcttatattgtttcttttgcacagcctggaccaagggatgcgccgatgcactgttttatccggagggacaaaaaaaattcaaccttttctctctatctcagcttaacgcaggccctaacggataaagggaagtttcttttggctgctcgaaggttcagacaaggagcacatacagaatatatcatctcttatgactatgatgatctgcacccaagaagcagttcatatgttggaaagttgagatctgacttcttggggacaaagttcatcatctatgatagccaggcgccatatgacggtgccaaaccttcgaggacccgatccactcgccgctttgcaagcaagcagataagcccacaggtttcaggcggcaatttcgaagttggacaagtgacctacaggttcaacttcatgaaatcaagagggccgagacggatgcagtgcaatatccagtgccctgtaggccagggcagcgcttcggatccgtccaaggagaaaacaccctcgccgagttccttggacctgaagaacaaggctccaagatggcacgaccatcttcagtgttggtgcttaaatttccacggtcgggtgaccgtcgcctccgtgaagaacttccagctcgtcgccacagctggctccggcggtccatggggcgtcggagacgaggagacggtgatcctgcagttcgggaagatcgaggacgatgcgtttacgatggactaccggcagcctctgtccgccttccaggcgttcgccatctgcctgaccagctttggcacgaagctggcctgtgaataaatggttgccggtttaccaactatgttggggatcagattgtagggggtagtctgaactagttgccctgagcacctcagatgggagaaaactggcgataagaaacagggcggacgttgtccctataagctttgactccttgtaatcgcctaaatgattgatttatatatatatgatgtgcgcctatgttgttgaagagatgacgatgacttatagttgtaaatggcactccctttcgtttggtgacattcactcatcactcataatgcctcattccgttgtaatgtgctgttgaacttccccttctctgcattttgtcaatcatgatcgaccatgtctgagcatatctagttgtggttgctgctgatctggaccaaggttaggaag

SEQ ID NO: 217618 - DNA, 1133 bp, Zea Mays
aaggactcgtacacctacgttgctgtctcacctacaacatttagggggttcttctgcctaaatccctaacggataaagggaagtttcttttggctgctcgaaggttcagacaaggagcacatacagaatatatcatctcttatgactatgatgatctgcacccaagaagcagttcatatgttggaaagttgagatctgacttcttggggacaaagttcatcatctatgatagccaggcgccatatgacggtgccaaaccttcgaggacccgatccactcgccgctttgcaagcaagcagataagcccacaggtttcaggcggcaatttcgaagttggacaagtgacctacaggttcaacttcatgaaatcaagagggccgagacggatgcagtgcaatatccagtgccctgtaggccagggcagcgcttcggatccgtccaaggagaaaacaccctcgccgagttccttggacctgaagaacaaggctccaagatggcacgaccatcttcagtgttggtgcttaaatttccacggtcgggtgaccgtcgcctccgtgaagaacttccagctcgtcgccacagctggctccggcggtccatggggcgtcggagacgaggagacggtgatcctgcagttcgggaagatcgaggacgatgcgtttacgatggactaccggcagcctctgtccgccttccaggcgttcgccatctgcctgaccagctttggcacgaagctggcctgtgaataaatggttgccggtttaccaactatgttggggatcagattgtagggggtagtctgaactagttgccctgagcacctcagatgggagaaaactggcgataagaaacagggcggacgttgtccctataagctttgactccttgtaatcgcctaaatgattgatttatatatatatgatgtgcgcctatgttgttgaagagatgacgatgacttatagttgtaaatggcactccctttcgtttggtgacattcactcatcactcataatgcctcattccgttgtaatgtgctgttgaacttccccttctctgcattttgtcaatcatgatcgaccatgtctgagcatatctagttgtggttgctgctgatctggaccaaggttaggaag

SEQ ID NO: 217619 - DNA, 1139 bp, Zea Mays
ctcacataatcggttcaacttataatctgtgaaagcaagaaaatgttgaaagatcgggtcctgtcaagtccctaacggataaagggaagtttcttttggctgctcgaaggttcagacaaggagcacatacagaatatatcatctcttatgactatgatgatctgcacccaagaagcagttcatatgttggaaagttgagatctgacttcttggggacaaagttcatcatctatgatagccaggcgccatatgacggtgccaaaccttcgaggacccgatccactcgccgctttgcaagcaagcagataagcccacaggtttcaggcggcaatttcgaagttggacaagtgacctacaggttcaacttcatgaaatcaagagggccgagacggatgcagtgcaatatccagtgccctgtaggccagggcagcgcttcggatccgtccaaggagaaaacaccctcgccgagttccttggacctgaagaacaaggctccaagatggcacgaccatcttcagtgttggtgcttaaatttccacggtcgggtgaccgtcgcctccgtgaagaacttccagctcgtcgccacagctggctccggcggtccatggggcgtcggagacgaggagacggtgatcctgcagttcgggaagatcgaggacgatgcgtttacgatggactaccggcagcctctgtccgccttccaggcgttcgccatctgcctgaccagctttggcacgaagctggcctgtgaataaatggttgccggtttaccaactatgttggggatcagattgtagggggtagtctgaactagttgccctgagcacctcagatgggagaaaactggcgataagaaacagggcggacgttgtccctataagctttgactccttgtaatcgcctaaatgattgatttatatatatatgatgtgcgcctatgttgttgaagagatgacgatgacttatagttgtaaatggcactccctttcgtttggtgacattcactcatcactcataatgcctcattccgttgtaatgtgctgttgaacttccccttctctgcattttgtcaatcatgatcgaccatgtctgagcatatctagttgtggttgctgctgatctggaccaaggttaggaag

SEQ ID NO: 217620 - DNA, 2144 bp, Zea Mays
tgctgctggaatgaacttcccagactctataagacaattgaaagtcaagttccaaatgtttgtcaaactgaagcatggaagagcaggacacattgggctggttctcaagtgcctgaagaagctacccaatccattaaaaaggccgatgaatacctccagtcttgcagacctgtacggagaaaacatgggaggttgctggaggaaggtgctagtggttttcttgctgggaaagttcctgttggggatgatgattctgttaagtgtcatgagaaaagttggagctctttcaatgaacttattaaatctaaggagagtgctgagaatacatttggtagcagtaactgggcatcagtttatcttgcaagtaccccccaggaagcagccgcattaggtctccagtttcctggagttgatgaggtaagggaagaggatgacgcaaaaataatgaagtgcctgcagcgccgtttgaaaggaaaaaggatgagagactggtgtaaggagaactttggtttggtctcatcatgtgacgagaagcctcctctaccagaaaatggcgttttaggtgctaaaagtgactgtccttcatctaaaaaactcaaaactgatgaaaacaaagtttctattgagatatgaagcatacatgtgaagatgatgataatgagaagagattgaaaactgtgatagttgaaagcgatgatgatatgcagatagatagcaaacaagctttacaaaaggatggtgaaggtagttcaacagaatttgaaaaagtggttgatatcattgatcttgatctcttcccaagccctaagctccctaataaaagtttgcataaaactttcaaatgtactatttgctctgaaatgctgaatgcctctgatgtgcatcgccaccctgtcttggatgttgttgtttgtggatcatgcagatttcttgtgatagagaagaatcgccttgaggatcctgtatctggtagttattgcacttggtgtgcacaaagtgaactgattcaaagttgtagttcttgtaagcttcttttctgtacaaattgcttgtcaaggaatttaggtgaagaatgcttatcagaagctaaagccactggttggcagtgttgctgctgtgtacccagtcaactagagctcttaatttctgaatgtgacaaggccctcagtggtgtggaatcttccgattcagagactagcaatgcagagctttctggatcagagaataatggtcctgttagcaagcaaaaaatgaagaagagtattagaagaattatggatgatacagaacttggtgaagaaacaaagcgtaaaattgcaatggagaaggcaaggcaagaccatttgaagtcaatgcaagagcaatctgccaccaagttaaggagcaagaatgttggaaatccctttgaaactccactggaaatctgtttacaggatgctggggatggacatgtagtcaaccttgccagggaggaggatgaggaacctgttaggattccaagcagcatgtcttctaaactgaagcctcatcaggttgaaggaataaggtttatgtgggaaaatgttattcaatctgttaaaaaggtcaaatccagggataaaggtcttgggtgcattttggcgcataacatgggccttgggaaaacttttcaggtctgtgttgggctgttggcttatagcttggatatatatttacattttcttcaagagttattcgttcattgtatgctgcacctattgtacccatgacaatcaattatgtgctggaactagatcatgcatgccagaaacttcaatttttgtacatgtattcttatatttgtgatgaagttattgttgggctgacatcaattttgagttcaatgcatcgtgggcccttgttaagagatgtcacttaggtccacaaactttgtaaatacatttttgggctgacattcaattttgagttaaatgcacgccgtgggagagaaaggtgtaagacgtagagttatcaaactccctttcattgtcgcactgaagagcttggatggtacgaccgaattgagtcgacactcacgcgaagaagtgagaaaggtgggaggtgttagacttacaacagaggggaaaggtccacaaatagtgagagaagtcatccagaatggcgag

SEQ ID NO: 217621 - DNA, 2245 bp, Zea Mays
ttggatgctgctggaatgaacttcccagactctataagacaattgaaagtcaagttccaaatgtttgtcaaactgaagcatggaagagcaggacacattgggctggttctcaagtgcctgaagaagctacccaatccattaaaaaggccgatgaatacctccagtcttgcagacctgtacggagaaaacatgggaggttgctggaggaaggtgctagtggttttcttgctgggaaagttcctgttggggatgatgattctgttaagtgtcatgagaaaagttggagctctttcaatgaacttattaaatctaaggagagtgctgagaatacatttggtagcagtaactgggcatcagtttatcttgcaagtaccccccaggaagcagccgcattaggtctccagtttcctggagttgatgaggtagaggagatatctgaagttgatggtgattttgatgatataaaaggtgtagatgaagtagagctttctgaggaacagagaaggaaatacagaaaggtaagggaagaggatgacgcaaaaataatgaagtgcctgcagcgccgtttgaaaggaaaaaggatgagagactggtgtaaggagaactttggtttggtctcatcatgtgacgagaagcctcctctaccagaaaatggcgttttaggtgctaaaagtgactgtccttcatctaaaaaactcaaaactgatgaaaacaaagtttctattgagatatgaagcatacatgtgaagatgatgataatgagaagagattgaaaactgtgatagttgaaagcgatgatgatatgcagatagatagcaaacaagctttacaaaaggatggtgaaggtagttcaacagaatttgaaaaagtggttgatatcattgatcttgatctcttcccaagccctaagctccctaataaaagtttgcataaaactttcaaatgtactatttgctctgaaatgctgaatgcctctgatgtgcatcgccaccctgtcttggatgttgttgtttgtggatcatgcagatttcttgtgatagagaagaatcgccttgaggatcctgtatctggtagttattgcacttggtgtgcacaaagtgaactgattcaaagttgtagttcttgtaagcttcttttctgtacaaattgcttgtcaaggaatttaggtgaagaatgcttatcagaagctaaagccactggttggcagtgttgctgctgtgtacccagtcaactagagctcttaatttctgaatgtgacaaggccctcagtggtgtggaatcttccgattcagagactagcaatgcagagctttctggatcagagaataatggtcctgttagcaagcaaaaaatgaagaagagtattagaagaattatggatgatacagaacttggtgaagaaacaaagcgtaaaattgcaatggagaaggcaaggcaagaccatttgaagtcaatgcaagagcaatctgccaccaagttaaggagcaagaatgttggaaatccctttgaaactccactggaaatctgtttacaggatgctggggatggacatgtagtcaaccttgccagggaggaggatgaggaacctgttaggattccaagcagcatgtcttctaaactgaagcctcatcaggttgaaggaataaggtttatgtgggaaaatgttattcaatctgttaaaaaggtcaaatccagggataaaggtcttgggtgcattttggcgcataacatgggccttgggaaaacttttcaggtctgtgttgggctgttggcttatagcttggatatatatttacattttcttcaagagttattcgttcattgtatgctgcacctattgtacccatgacaatcaattatgtgctggaactagatcatgcatgccagaaacttcaatttttgtacatgtattcttatatttgtgatgaagttattgttgggctgacatcaattttgagttcaatgcatcgtgggcccttgttaagagatgtcacttaggtccacaaactttgtaaatacatttttgggctgacattcaattttgagttaaatgcacgccgtgggagagaaaggtgtaagacgtagagttatcaaactccctttcattgtcgcactgaagagcttggatggtacgaccgaattgagtcgacactcacgcgaagaagtgagaaaggtgggaggtgttagacttacaacagaggggaaaggtccacaaatagtgagagaagtcatccagaatggcgag

SEQ ID NO: 217622 - DNA, 2199 bp, Zea Mays
ttggatgctgctggaatgaacttcccagactctataagacaattgaaagtcaagttccaaatgtttgtcaaactgaagcatggaagagcaggacacattgggctggttctcaagtgcctgaagaagctacccaatccattaaaaaggccgatgaatacctccagtcttgcagacctgtacggagaaaacatgggaggttgctggaggaaggtgctagtggttttcttgctgggaaagttcctgttggggatgatgattctgttaagtgtcatgagaaaagttggagctctttcaatgaacttattaaatctaaggagagtgctgagaatacatttggtagcagtaactgggcatcagtttatcttgcaagtaccccccaggaagcagccgcattaggtctccagtttcctggagttgatgaggtgtagatgaagtagagctttctgaggaacagagaaggaaatacagaaaggtaagggaagaggatgacgcaaaaataatgaagtgcctgcagcgccgtttgaaaggaaaaaggatgagagactggtgtaaggagaactttggtttggtctcatcatgtgacgagaagcctcctctaccagaaaatggcgttttaggtgctaaaagtgactgtccttcatctaaaaaactcaaaactgatgaaaacaaagtttctattgagatatgaagcatacatgtgaagatgatgataatgagaagagattgaaaactgtgatagttgaaagcgatgatgatatgcagatagatagcaaacaagctttacaaaaggatggtgaaggtagttcaacagaatttgaaaaagtggttgatatcattgatcttgatctcttcccaagccctaagctccctaataaaagtttgcataaaactttcaaatgtactatttgctctgaaatgctgaatgcctctgatgtgcatcgccaccctgtcttggatgttgttgtttgtggatcatgcagatttcttgtgatagagaagaatcgccttgaggatcctgtatctggtagttattgcacttggtgtgcacaaagtgaactgattcaaagttgtagttcttgtaagcttcttttctgtacaaattgcttgtcaaggaatttaggtgaagaatgcttatcagaagctaaagccactggttggcagtgttgctgctgtgtacccagtcaactagagctcttaatttctgaatgtgacaaggccctcagtggtgtggaatcttccgattcagagactagcaatgcagagctttctggatcagagaataatggtcctgttagcaagcaaaaaatgaagaagagtattagaagaattatggatgatacagaacttggtgaagaaacaaagcgtaaaattgcaatggagaaggcaaggcaagaccatttgaagtcaatgcaagagcaatctgccaccaagttaaggagcaagaatgttggaaatccctttgaaactccactggaaatctgtttacaggatgctggggatggacatgtagtcaaccttgccagggaggaggatgaggaacctgttaggattccaagcagcatgtcttctaaactgaagcctcatcaggttgaaggaataaggtttatgtgggaaaatgttattcaatctgttaaaaaggtcaaatccagggataaaggtcttgggtgcattttggcgcataacatgggccttgggaaaacttttcaggtctgtgttgggctgttggcttatagcttggatatatatttacattttcttcaagagttattcgttcattgtatgctgcacctattgtacccatgacaatcaattatgtgctggaactagatcatgcatgccagaaacttcaatttttgtacatgtattcttatatttgtgatgaagttattgttgggctgacatcaattttgagttcaatgcatcgtgggcccttgttaagagatgtcacttaggtccacaaactttgtaaatacatttttgggctgacattcaattttgagttaaatgcacgccgtgggagagaaaggtgtaagacgtagagttatcaaactccctttcattgtcgcactgaagagcttggatggtacgaccgaattgagtcgacactcacgcgaagaagtgagaaaggtgggaggtgttagacttacaacagaggggaaaggtccacaaatagtgagagaagtcatccagaatggcgag
